United States Patent Application Publication US 2005/0266459 A1 - sequence listing, part 5

SEQ ID NO: 74 - DNA, 154452 bp, Homo sapiens
gaattccttaagctctgcaggctatacaccctccacaggaaaggcctgggcctggctgttgatgatgatgggatttctcccccaacacatgcacctcccttggctggcaggcaactcaggagtgaggaatgaccaaagccaattcccagagcagcggaggagcacggttcaccttccagtcagtgcctcagggcaagccctttccatcctctccatagcgccacctctcagcgggagaaatgcttggttcacacacagggtccaccctgctcccacctggctctttgagctaacgaagtatcaccctttacaggtcctggttctgatgcaccaagatgtctgataataataaaaaaaaaaagcccagtagttactcacactccaaggtgcctgggctttcttctgggaggttgctcccttctttgcggccatcaccacacattcctctagtaaggaaaccccaagaggccggatgtctgcagcacatgagctgtgtgtattcccacaccatgattattgccaagaggttagaaactgaacatgatttgggtcctgaggggccttaaatcactgtcaaatgggaatttgctataaaccagctgagaccagggactaagttcctgtctccaagaactccacgaaggaccctgcaagagaagagagcacattccattgtttagactaagctgaatcccaactactcaaggcatcctggcctttgggattggataaggtaagttttgtaaggattcctgacccaagctgtcatgtcaagcttctttacccatctggccatatttcatgttcggatccatcacgcagttctctgcattttattgacaatgcacaggccgtttcctgtgtgtaactccttgccaccctcaggaggaaggtcctcagacaaatatatgaatgttcattcattcaacaagcatttattcagcatctactatattcctggcccagtgccaggctcagcgtctcctgtggatcctcatggggccttcagatatgaaaagaaaagtacaaaatgatgcaggtgctatggtagacttaagtattaggctccatgggagcacagagtaagaataagtcatttcctagatgggcagtgagttgaactcagggtgaggggccagcgaatcctcccaacacctaacatctggagttgttttggggggtaaagtacacgcagctcttatgtgtactcttggatctgcatgccaggcattgtgttgtctgcctgcccatctggttggaccagcatctggggggtgggtcaagtcatccaagctccaaggagatgggtaggacaagagattgtcagtatcttacttgtccacaatgggagctatatttgtgcatgggagggtataactgcctggacagaggccactccttctggggcacaaccctgcccaggaaaccccaaatagaggtttgcttcaataagagctatgtttatctaggaaacattccaagttgtggagaaaaaaaggagaataaaagaaaaagaagaaaccttccatccacagctagagacctgaatattgcccaggaagtcttgctaggtttgtctagtgagaccagagacatgtgattttatgtgggatgtgattttacgtgggatggctaagggaaaacgcttttactgcacattcacaggcctaccccgccacgtcatcatgacaattgtggttctctctgtgcccaaatccatgattcaggttttatagctcttaataattgcatcctttcataagacttttccgcagagttactgccagagttaccttttatatatcacatatattaacatggaaatgagatggcattgctgcccaggattcctacagcatagatactaattgacagccgaggaccaaaggcagctcaacttgcattgctgatttcactgctcatggtagatacagagaaacaaaattctaacttgaattacggcaattgctgggccatgctacaggtcatagaacatgttttctttcctttctgctattttttattttattttatgtatttttatctcttgctcaatttctctgatctgtgagggctttgggaagccacacatgtgcctactgcaacctctgaaagtacttgcaatagccaagtcttccattttggagaaactccatgcccttcagaagggcctgtaattccatctccactggtggctctcgggtgcttatggtgcagctcaaatcaaactctatattttcttcacccttgatcttgatcttaatggagtgtgtgagaccaggagctttggcagggcagtgccggggtgtttagcactcactggccctcagttactctggccttcaccaggcagcagcagtaaagaggcagctgtttgtctgtggagctgccttgtctccatctaccaggtgccgtccatggggctgtgacatgtgagcacaggctggtgcagctccatgatggcagccaggtagggtcaggaacaaatctcacttttgctttttcttatagaaaatcatgaaataagctatgtggtgacattaaaaaataagttccaaagccaggtgcggtggctcgcaactgtaatcccagcactttgggaggccaaggcgggtggatcacttgaggtcaggaatttaagaccagcctggtcaacacggtgaaaccccatatgtactaaaaataaaaaaaaaaaaaaacaaattagctgggtgtggtagtgggtgcctgtagtcccagctacttgggaggctgaggcaggagaatctcctgaacccaggaggcagaggttgcagtgagccaagattgcgccactgcatctagcctggaagacagagtaagactccatctcaaataataataataataacaataataataatttccaagtttaaaagctgtaaactatccgctgtcacaggttagttttaagacctactttttgtccttgagaaagtggcattacctaataaggaatcctggagggagggtgaagaggcaaagtctgggaagcacacagggtggggagcgcctgtgtgtagtcacttcaggctgtaactttcctaacaaagaaaactgctgagccatttcagaccctctccagcccgatgcagtgattgctttgcccttcagggctgtagggcttatggagcacagctcagcatcaagtgaccaggccatcttggtcactatgctggtggctctgaagcccaaggctttcccagatctgcacgagtttctgtaactgatgaacagttttacgctgtgccattgtaaggactcacaatctatacaggaggaagaccatgtattcacatgtgttcaataactatttacttggtaccttccctaggccaggcacttgtgttagtcaccaaggattcagtagtgaacacaacacagttgctatcattatggggctaatgttctagggcagagatccctgacccccgggtcacggaccactgctggcccatggcctgttaggaaccaggcggcatagcaggagtgagtggtgggtgagtgagcaaacttcatcagtatttacagctgttcctcattgctcgtggtaccacctgagctccacctcctgtcagatcagctatggcattagattctcataggagcgcaaatcctattgtgaactgtgcttgcaagtgatctaggttgtgtactccttatgagaatctaatgcctgatgatctgtcactgtctcccaacacccccagaaggaaccatctagttgcaggaaaaaaaactcagggctcccactgattctacattatggtgagttgtataattatttcactatatattacaatgtaataataatagaactaaagtgcacaataagtgtaatttgcttgaatcatccccaaacatccctccccacccccactgggtccatggaaaaattgtctgccacaaaaccagtcactggtgccaaaaagaatggactgctcttctaggcgaaggagatagacaataaacaaataaacacagtaatctacagcacagcttcccatagtgaaagatgccaagaaacacgcagagtggggtagaaggatgggagctgctctgggtcaggtggtcaggggcagtctccggagagccaacctttgagcagagagtcctgactttagagggtgcaagcctcggggttgcctagggcagagcatctcagagggagccgcgggtccagtgcttagcagaaggaagaatctgactgggagcactgtgaactctaaaaagcagctgctatctattaagagcttactatgtatcaagcactttgcacgcctcttatgcgccatacaaacatggtctcatttaactattacaacagtcctgtgacatagatccaactgttcccattttatagctgatgaaacagaggctgaaagataacctagcctgcctcagagcaagcttgtctaaccagtggcccaggacggctttgaatgcagcccaacacaaattcataaactttaagacattatgagatttttttttgcgatttttttttagctcatcagctatcattagtatattttatgtgtggccctaaacaattcttcttcttccaaagtggcccagggaagccaaaacattggacactcctgtcacagagttaggaaacggcagagctgagacttgagcctgtatctagtctgtgtccaaaaccctctgttcccaacctcctccaagacccacagctccactctgttgtagtgggagagcgctcacaggcccacagcacttcgtgcggaggaaaggatacttttgagacctagtttgcctggaagaagctttgctcatcatgaaaagccactttcttttctaactgttttctctctcttgcttggaaacattgtccagccaaagctgcttctctgggtggcttcctctttgtggcttcattgttttatgtggtgaatgctgttgctaccaggatgcccacagagtacacttgggtccccagctttatttcagggcttcctggggctgccaaaaagttgtgcaattctttcaaggccctggcaccggggactcacacttgtaaggctgattcattcttatgtcagctctgagaccagaaaggactctccaagggtagccacctaggtgcatgcttcatccccagaaccacatgggcacagagtggtgcagaagaaagaacagcaggttggaatcagtcagtttacacgtttgcagagtcccataaaaaacaaaacaaaaacaagaaggcaaagtaaccaaaccgcgcaatcctgagcaaataagtcagcagtcctccaagcctcagggtccttattgtaacaataggagcagtcttgctaacctctgtccgctgttttcagcggcgatgacacccccatgagaatatgcttcttgcaaaggatttccttcatctctccccataagaaaggaggaaacaagatgaaatgcatggtgcaaagcccaatgcctatctgctggatgtgaaatgcctgcatgctataaaatcactctggggtttacccacgctctaacagtggttgtgtgtgttgactattctctgtcctcagccagcctaccggaggcaaagtatggtgactggaggacatctctgcaggcagaagcagcactgaaggcacctggaatgaagatgagtggaaaacatctcagtaaacacagcactattcatgatagcctagatgtggaaacaacctaagtgcccattgatgaatgaatggataaataaattgtgatatctatatatattacaatatccctacaatggaatactattcagcctttaaaaaggagatactgctatttgctacaacatgaatgaacctggagtactttatgctaaaaagtaagacagatacagaaagaaaactactgcatgatctcacttgtatgtggaatctaacaaaaagtctaatacatagaaacagagtagaacagtggttaccaagggtggggaggggaaagaaatggggagtttgtcagaaggtacaaagttatgtgggaaggataaatttaaaaatccaacatacagcaggaggactatagttaatcatacagtcttgtatattgaaaagttgctaagagactagattttaggtgctcttactgaaaacagggtaactagagaaggtagggaaggtgatgaatacgttaatttgcttacctgcaataatcgtttcactatgtatatcaaaacatcatgttgtataccttaaatatatacaatagaaaataaataataaaataaacacagattaaaaaataaaaacaactcaagatacaaatgtacatatggctggctgtagatgtagttactggctaaggcatggattctgagccaatccctttgagttcagatcatggctcttccactttctcactgtatgttcttcagtgatggcatcttttttaatggcttaggaattttttaaagtcctaaattaggtagttttagctggtagatccgtggatatgtcttgttcttcttcttcactctttgtaaataggggataataataccacctaccccagggttattgtgagatttaataagtaaatatgtacacacagagagaggcaaagaaagacagagcagttggaacagtccctgacaagcaactttaaagtgttggctattattataagggaagggccaggtaaatgctggtgcttgacacttatttacttaaaaaagagaaaagaaaagaaaagaaacaagtcatacccaacatctaccagcttaaaccacctaatttagggtaaaaaaaaattccagacaatggaaaagatgctgtctcttaattattcagggaatggcttttctctaggaaaggcaatctgaaatgtgtcctggcaaaccaactcttcggctaaagacacatggtggctcttggttgggcgtggattaaagcgcagctcctcccgctttccaaactcagaaaggaggaggaatgttaagtgtggctgcattgtcattaattaatttctcaagggctgcagtaatcaggaagctcattaatgtgttttagcctgcctttcatttagagaatgagtaggaaatgtaaatggagtgcacttagaaaccttaaaaatcgttcagtgctgtagtgcggggggagaaaccatggtatgtctctaaggaaaagcaaaaacccacaagggcttctttaatcacatgaaagagaagcaattctaactcaacagcagcagaggctccccgtggcgtttcaaaatattatcatttggacttggttgttcctctactcttgtgccatgtttaaagacgccacgctccatccatatttatacttctcccagcagggagcataattgtgaagggcaaattccaggggccagagctccgcggggccattccacagggtgctgccaggagctcccctggggtattcattaggaaaggcggcgcagaggaaatcaggtctccacggctccccctagcggaggctctgctgttgggccaggttgggggcggggcaccagcagcttctctaattcttcaaggccaacctagggccatacatgttctccttcattctgctcttgaccgccccggaggaggtgcctgaaattgagctcattccttctcctctgtgaagtcagcgtgtttcagaggcctcctctcacagacgtggaccaattcttcccttgcaattcctgttaaatgtatacataaagcacttagaacaggaggcagtgttctgtcattctcattgtgattgttagtgctagctagtggcagacagtgggccacccggttttggggggtgtttacccctccagtttccacacggggcttcctgacaatgatcactaaacaattcgtcacacgaccagccatagaatcttgagttgtgactcaaacctccctctgtcctatgtccacatccttatctttggtagatgcaggtctcacttttactctcctctcgatgtgagagggaggggctgggcctgagtccacatacaccctctctagtaggacgtgcctctggtgggcatggacatgagcctacaggaagccaagtttcttctgaccagaaaagggaagccaagtaatctatgtctctccctggggagaccagggaacaaataagccacttaacacttatcctgccccatcttaccccgcccccacctctcccaggggaccttgcatacatgaccctctcctatgaccccaaccgaactttcctcttcagttcagttcaacaaacgtctattgaacaccatgtgccaagccctatgccaggtgaggggatccaaaatgaataagacgtgtttccattcttaaggaacagattagggagtaagtcaaacccagaggcattattccaacaaatgggagtacagagggggctggaactcaacctaggcttcctggaaaggaagggagcctgaggttggccttggcagacatgtggcaggttccccgggactggagagtggtgggcataggacagcgtggcaatgtgcctccaaggtgagcacggtacttggcacacagtaggtggtcagcacacgcactgagctgatagatggagcaggtagccagcagtcagtgctactggtgcgtgaacgctggcctgtgggggttgatggcgctgaagagggtctgaagcccgaacctgaggagggccttgagtgccaggcccttatcttataagaccttaccctacaagagtttgaagcaaaagagtgacatagtcagatttacatcttctttgctcattattccactaccctaaggaagcctcctgagaactttgaagagttgccctctaagatcacagtctcatgtgactggtattgcaagcagctactctccagccatattataatcgtggtgctccttcagccaacaaatgggctaactagatagctaatcttgagatactcggtcgacagtttatagggtgaaatgttcagtctctaccttagttcctaatctgtaaacagaccttttgaattctattgaaaagctttctccacaaacctttcctacaaacaagagtttattcccacctcctgtccttaactgctacaatgcactcttaccatcatgaacacacctctgcacatccaagtacccagtcctatttgtacacttacggaccagtatcataatatgacatcctggatcaacttctgaaatgcaataagcaacgtgtcacagcataggaaagaatcaacttcaggcttgggcacaaggtaggccaaggctgacattcaaaagagggctgtctattgtaatgtctagttttaaacctggatcatgcctcactctctgagatttctgctacgttttaacgatttttctgaagattgaataaaataatgagtaaagtgcttaaaaatgccctacctatagtaagctctcaataatattgtctatgttcattatgattaacaggatagttctgccaaacgttcaggtcatttatacctctgaggatagagagaaatttatctattgtgagaaatgaatttggcagtttttaacgttaattactttggtattgttccttcatgttttgtgtttatatcttggcccctaattatactgttaggactttgaaggcagggatcttgttagatttgtatttttatatccttcaaagaatctagcactatttctagtatgtcatagatattcaataaatagatctagattgactcaatgttagaagggctctataagtattaaagtgttaatcaccacaatactcggcaagtgataatctgccccacagtccttgtctttgctgccacatcaggaaaatgggcagacataggttcttgaggtgggtaatgagcccaaaggtctgtagactatactgtctgactggttcgcacaccccagctaatcactgtatctctgcttgccactatacactggctgaggaaacctcatgaacttctctgacctgcaggctccagggtcccagatgcagcaccggttccccaggcatttcttgtgctaaggtgcgtatgactcctccaaaggtcaggagaggccctggagagctggcccccttcttgggtatcacttgcaacaagttggggcagactactttggcttcttcctcctggtcaaataataggccattcagtcttggggagagaaatgaatcagcaaccccagggccattccagtggccctgaaagctgccagctggacagcccatttcaaacaaccaattaatatgagcaccacaagttgatttgagcaaatccaggcacctctctctgcaagtacaagacgggcctgcgtgtctgcatggaaaatgaagttgtttcaccttccatggcattgttccactcaaagaaacaagctttatttatctcaaaacttggcttctgttgacttgccagatgaaaaatgatgtgaagttactgaaatcatctgctaagggaaatgaatccaagcacggtgaaagatgttttgctgctttttcaaagcacatcagtcagcttgtcttacaagcacaatataattttctaccaggtaaagacagtaattatttcaattagcaattgaattagatgtagaagataatgaggaataaagatgctgaactaagttcaataactcaccacatatgcttctctttcttgttctagctaaagtagcagtaaacagagtgaattcagctgtgggatgataggggcctttccccgcaagtggactgagtctcaattcatcattcactgcctgatgaagaggcagtatagcagacatgagatgccaacagtactcagcctatgctcagtccagcaccatccttggtgcacagtgacccttgtggaaaatgggaaattatgaagttctatggtaattagtgaaacaataacttaaagatattttcagttccactgctgaaataaaataaggaaattccaaggatctagagtatttttattcagcatcttctgagaccattcctttgatttcactcatgtgcgtttctggaacgggaagaaggaaaagagaaggggagagagtgcaagagccagggcttccttattctgggaagactttgaccaaactaggctaatacggcagaaagaaactgacacagctgatggtctttttgcacgtttagcacatctgaagtttctgttttgattagcgcctctccatgttatctgaaaagtctatcactaagcaaaaactgacagtacttcaaggagtaattgacaaatttgtgatcagagtgggagctttaacatgtctttcttagtaactgatagatcaaacagccaaaaaattcagtaaagttataaagatttgaacaagacgattaacaagtttgatataaaagacttatatagagcactgcattcaaccactggggaatatacattctttttaaaatcacatattacctttgtaaaaactaattgtgaattagggcagaaagcaaatatcaaatctcaacaaattcaaagaataagtatcaaaagaccacaacacaattaagttagaaaaaagtgaaaattataattaaaaatcttcatacaattagaaatttaaaacacatcacataaaaatccatagagacagaaagcagattggtggttgccaggggctgggaggagaggggaattactgcttaatgaatagagtgttttcttttggggtgatgaaagtgtgttgttactggatagaggtggtagttacataacattgtgaatgtactaaatgccactaaagtgtgaattgtatactttcatacggttagctttatgctatgtaaatttcacctcaacaacaaaaaaaaagtgctcatatctctgtgttttaattctttttttttttttttagatggagtctcgctctgtcacccaggctggagtgcagtggcacgatctcggctcactgaaacctccgcctcctgggttcaagtgattctcctgcctcagcctcccgagtagctgggattacaggtgtacaccaccacatctggctaatttttgtatttttagtagggacggggttcaccatgttggccaggctggtctcaaactcctgacttcatgatccacctgcctcgacctcccaaagtgctgggattacaggcatgagccaccatgcctgacctctgtgtttaaattctaatgtgtggatacacaggtgtgtatagtttatgaaagtttttcaaaccattcacttataacacgtacactttctgtattaaatgtgtatatttacattttctatattatgcttcaaataaagagttttaaaatgaaaagaaaacatattacttaactcatgggtcaaaaagaaattgtgcaggaaaatataaaaagctaagaactgtatgacaactacactaaaaatgtgcagtttgcagtgcatttattcagaccaagggatgcaggtgagaaatcagctgtgggagaggacggcaatgggttctcttaagtatgtatgaatacgaatttataggtttgaatgtttatttgggaaaaaatgccactttaaacataaaattaataagctaagcatcaaacataagaaggtagaaagaaaacaaaattcccaaagaaaataaaaagaaggaaatgacaaccttaaattagataatagatacaataagtacaatcaacgaagccaaaaattaacactttgaagagactaacttctggaaagactgtataaggaaactaaaaaaatatataaagagataaggcacaaataatattagcagagaaagtagaatacaaacggtcaaaaagataataaaaatataaaatgaaaaaccttatccaataagtctggaaatgttcattaaatggacaaattcctagaaaaatataatttgccaaaactgaccaaaaaagaaatagaaagcctgtataaccagcagtaaaaatcttcccacaaaataaatcctaggcttagagagttttatttgtgagttttacaaggcgtttcaattacagctgaagatttaccagtatgttaaagaagcaggattcatgggatataatccagaaagttattagttttgtctcctatggcccctttaaatcttctcagtgaaggcaatccttcccctgccattggatgaaaactcaggcaagccctatataaaataactataaaatattcacttttatagttgttcttgagtaatagaaatacctttattcactttcagacacaaacccagactcaaattagtaacttgacataaaaagccaggctttttttttttttaattatgctttcagttctgggatacatgtgcagaatgtataggtttgttacataggtatacatgtgccatggtggtttgctgcacccatcaacctgttgtctacattaggtatttctcctaatgctatccctcccctaatcccccatccccaacaggccccagtgtgtgatgttccccttcctgtgtccatgtgttctcattgttcaactcctgaaaacccaggctttcaatttaaaagttaagacttctcttcactctaccttcttttcccccagctaagggctatggcagggaggccacctgtttgggggaaagacataaaatccaatctcttccttttttctgtctcaccttgtcaatcaccctcccctatactagtcaggggacagaaaacacaccagttatttgagaaataatttaatataaagaattattaactagatataaagctactaaccaggtaacagaagagagaagagaatgctaaggcgtcataagcaatcatttgaggaaatggctatcattcccagggctgaagaaataaaaggaagagattggaattcttgaaatctaaaagctgagacaaaggatcctggtgagctgaaaccctgaccctgaggagggggagatgattgactgatggtggtgtctcagctcagaagagcagccgggggaggctggggcccggactctgaacagggggcactggtcagcacatagtcatgtctcaggttaaaggggtgaatgtgacaagtctggtcctgcaagtttggtagaaatagcgaactggatcagctgctgctatggaaggaactaccaccaatgcagtgaaggtgcagtgctggagtgatactcacaagaactgtgagcagaaaggaagtccaaagcaagcaactgggaggagcacattccttctgctcctccagcctttgagtttccctctagcaccccaattggcagagcccaacagggaatagctggcaaagcagaaaaatgatttccagggttcctgtccaagcaccaaaaagcagggaataaaagggtggaatgagctgaaagacaattaataactcatacatcccccatccatttactgctgtttctgatcctcttcaggtctgggagatggggaaggaagacaggcagaaagtccttacttaactggtatcagcaaggtatttgaagctgattctttctcttatggaatgctttcatgtgtactttggagaacctattttcttaccctatcactgctgatttcctttgatctgaatgaatgcacagtgttctggaagttgctcacttactaccccttactgccaaggaaagcagtatccacctctagctcatgctgtaatgaaacctgttcacctctccaattgacctgactctgagttcatctatgatgacccaattcccagctcttttgtgtatacctagccaaggaaaccatcgtactgctttgtccaggcaaactgggggattacgagctgattcaagcccagcagcatctttcattcaatccaccaccaaaccacttagcctatccttttcttgccttctgtgttctagatgggagctggacacaagtctgctgacctgcctaggtggagaggacgcatatggagctttccacagggaaaacttgaatcccttctcagttggctcagttcatactagcaatgttttccaaagaaatcctcttcaaatctccattaaactcccctttctagtcatttatttgcttgagagggcaaggagttgttagtgtgaaggaatgattcctggatatttcctttggaaaggcaatcttggtctaacatttcactttgaaagtttatattttttgaatcttggtgcttcaattgaaacttaatttaacatcctttttcaccattcttaaattcttccttttcatcctgagatcagtataacattgatcctaaaatcaaattaaatagtactagaaaggaaaattattggccaatcttattcacatgcaaattcgccaaaattctaagcaaactattatcgaccaaatccagcagggtatgaaaaaaagtccatcacactaagttgggtttatcccaggaatgcaaagctgggttaacattataaaattaattaacgcaattccttatattaacagattagagaaagaagacaattttatcatttcttttccttttcctttttttttgagatagactctcactctgttacccaggctggagtgcagtcggatgatctctgctcactgcaacctctgcgtcctgggctcaagcgattctcctgcctcagcctcctgagtagctgggattacagaggcgcaccatcacaacaagctaatttttgtatttttagtagagacagggtttcaccatgttggccaggctggtctcaaattcctgacctcaggtgatctgccagcctcagcctcccaaaatgctgggattacaggcgtgaaccaccgcacccagctgacaattttataactttaatatacggcaaaaagcatttgagaaaaagcaacctaatttgtggtagaaacactgaaaattataattaagaaggtaactcgtttaacaggataaaggtcaaaaacaaaaatttatggcagataatattcttaataataaaacttacaactatttcctttaaaatcaggaacaagttgaagatgctcaatattatcattctattcaacattattctactgattctcatcagtaaaattttaaaaaggaaaataaaaaggtacgcaaattggaaagaaagaataaaataataattattagcagataatatgattgcctatgaagtatatttttaaaaatctatagttaaattattagagttaaaaagagtttaagttttgcaaggtagctgggtatacaaaaatcaattgcacttccataaagcagccgtaaaaattgtagtaatataatttttaaaagataccagtacaatagaaataaaactataataaaataaaagcaagacctttatggaaaaaatgctattgaaaaatgttaaagaagacggaaactaatggagagatatactgttcctaggtagagagatccaatttcataaatatgccaattctccctaaatacaatgcaattccagtcaatatctcaattgtttatcatgaaacttattatctgatttcaaaacttacatggaagagtaaaagcctacaaatagtcaagatacttttgaggaataacaacaaagtgtgtgtgtgtgtgtgtgtgagatggggtagaggtaggggttgccctgcaatttgtggtaaatctatgtaaatcatgtaagtcatgataaatctatgtaaataagataatgtggtattggaagacagataaacaaatagaccagaggaaagaatagtgagccccaaaatgaatccatgaatatatgaagacttacctacaggcattgcatagtggctgaggtgtggggccggggtagaaggcatggtagagaatgaactgctcaataaatagtgggggaacaagagtttatccatattggaaaaaaatgatattggatccctcccttataccgtttataaaataaagtccaggtaaaataaagacttaaatgtaaaaggaaaaactttaacatgtttaaaagtcaatatagaacaatagttatgtgactttggctaagagagtactttctaaacaacactcagagaatacaagccataaaataaaatattgataaattaaagaaattcaaataaaaaatttctaatttttacctaaagacaccataaagtgaaaagactagccaaaaatctagagggcatattttccatgcatataattaataaaagattagtattgagaatccataaagaagtcctaaaaatcagtgagagaaaatacaaacaacccaatagaaaatggccaataggaatgaaaagatttttcacagcaaagaaaacataaatggcaaatcaatatacaaaatgtatcttaatttcataagtaccaagaaaaagaaaaatgaaatcacaatgagagatagttttatgcccaccagattggtacaaattaaaaatctgacagatttaagtgttgacaagctgtggtacaaattaaaaatctgacagatttaagtgttgacaagctgtggtacaacaaggtctcctaaacagtgataatgggtgatgcaatcactttgcaaaacaatttgatgtgatgtaagctagtatagctgagactgcgcatctcctatgactcctaggcatgtgccctcggaaaactcttgcaaataagaaccaggtaacaagttggaggcagcattgtactaacaacaaactgaacacaacccaagtgttcaccaactggagaatggacaaatcaatgtgattcttcataaaacagctatagtgatgaaaataaatgaatcagcagtgaaatggaatgtcagatatagaatgttaagaggaaaattcatgaaatatgatatgttaataagcttggaaaacaagcaaggaaagcaatactttgtttattgatacatataaatgtgtaaggctatcaacaacagcaatggaatgataaagccaactttagggtaatggttgcctgccattacctggaggcccaggtaactttgaatttaaacaatgaatacattttttagtataagtatgtcccagatattgcatgggacatacttacactaaacaattatgcattgtttatctgaaattcaaagttagttgggcatgttttctcactgctgttgtttgtttttggctaaatctggcaaccctactcagagagagcttcaatgatatttataacattttatttattatgttgggtggtaggttcatggctgctcattgcattattttatttaaaaagaaaacattaaagcaaatctcattgtttataattccacttggtggatccaaagcttttgctaaaaaaaaaataagcagtagctgtagactaggctagagtgtcaggagctgatcctccctggccatgtggggatatgtcaaatggtttgtagctgggctttcttcttctctctctctctctctctctgtgctgtgttggtgatcagctcaccacactctaatactcaggagctgctgatggaatatactcggtcagatacccaccatctacctttcacaatgtctgcaagtgtggggtgttattcattgcaggatccagttaaagctcgtgttccaagccataaaagaccttttaaccataaaactccctcctatcttcccagctcacatccctcagagaaaacatcagaaaagaaaacatgaacacccaggtgaaagaggcgattagttacaaaatcacttgccagcccaatgggaaggagctcactggagggagaaaagcctttctcaaaatttacttgatgtcaaggctcacgacctaaagaatcttcttgaagcaagtacacaagcaaaggataaagactttgcagagaatataaggacccagcaacaacagcaagacattccagcatagcacaaacagctagcagggagggtatgggctgctcagcacatgtagaagaggttcagaccagatctgtctttaagcaagcctgaggagagtgagcaggcctgttgagctcactgcagtattccagggcttaacccagtgactggcatagggttgtcctcaataaatctttgtgggtagaatgcatgaagccatagtgaatgagagaaagagcaaatgcagcattgaatgttattatcattatctgatccttcaaacgatggaatcaaaaagtcatatcaggatctgccgattatcgtatatatttcattgtctataggtatgtacattgcttgttgttcttaacacaaggtatgggtttataaagccccgaatttaaagaaccctgggtgaaatctgcatatgtttttcttttcttttcttttttgagatggagtcttgctgtgttgcccaggctggagtgcaacgggtcgatctcggctcactgcaacctctgctctccaggttcaagtgagcctcctgagtagttggggttacaggcatgcgccatcacaccagactcatttttgtattttgagtagagacagggtttcaccatgttggccagggtggtcgtgaactcctgacctcaagtgatctgcccacctcggcctcccaaagtgctgggattacaggtgtgagccactgcacttggctgaaatccgcatatctattatctattccagtcaagaacctggtgcccagagtgggtagaaccaagaagcagcctctagcagacacccccttaatgaggccagcttctgcctgggtttgctcaatcaccttgggaggtctgttttctacatgtttggttccttctggcagaccttgagggatgataacttcagacacttcttcttttgacatgaggtgttgatgtactggccttctgcatcaatccttgcatttaatcatttattcaattaatatttataaggtatgtgccaggtactgtgcgaagccctggagatttagaggtagcatttaatgagcatttacttactaaatgtcaggcacagtgttaagctcacgacttaaagtgtctaatttatagccctaagcagtaggcactattattatcctattttgcagatgagaaaactcagagatgaataagacatggtcagtggctttaagaggaaagcctttcctaatgaagagggcttcattttcactgctatagctgttttatgaagaatcacaattgatttgtccattctccagttggtgaacacttgggttgtgttcaatttgttgttaatacaatgctgcctccaatttgttacctggtaccatgggcaagagttttcctggggcatatttctaggagtcacaggagacgaacagtctcacctatactagctcttgtcaaattgttttgcaaagtgattgcatcacccattatcagtgtttaggagaccccattgtaccacagcattgccatttgcaacacatggttctgaggattttccgaggtaccttaggaacatagtgtatgttgccaaaatattaatatgtattaattagataattaagtattaattatctattgctgtataacaacttaatcagcagcttaaaagaacatgcatttatttcctcacagtttcagtggattaggagtccaggtatgtttagctgggtcctgtgtgtcagggtctcaccagcaagctgcaatcaagtgccagccagggctgggttctcattcctctgcttgcctggggaagaacatgcttccaagctcatgtggttgttgacagcattcagcaccttgtggcctcagattcttcctggctgtcagctgttggctgctctcagttccttgccacctttcctctccgtgctcacaatatggcagcctgcttcctcacagccagcaaggacagggtctcccagcaaggtgaacatttaagctctgtaagcttctgtcttgggtaatataatccagaatggacatcctatcacctttggcatattgtattagttgaaattaaagtcacagtctggccacattcaagacagaaagggcctgaccaattgaccaacttggaagcaaatggagattttaggaccagcaaccacacagaaggaaaccaaggatacacgcagcaataaatgggaactaaagtactaaagccagaaatggttaccactccaaaataatcattctgtggttttctctgtaggaacagagttggttcctcaattgaacagaagaaacagaaaatcagacacttgcctggatgccacacttaccgtactatcttcgggaggagaggtagggatgagcagaagtcaagctttgatggaattcacgttatctgttcagtcactagcagcctttggacctgatgtccttcacataccgaggaacactttgactcagaacaaaggcactcgccggcaaagttcatggccttccactgttctgaccacagcatagatcactttcacaccatccggacagtgcttcatttctgctgaccacctcccttggccctgttcctgaagaatggaataattagaaagttttttctatgttgtttctattatgtatgagctttttttggtgccctcgagtggttttgagggcagaaaaaactattcagaggttaatgttgctttttaaaagttaatattaaattattaaagttacagattaataagccctatttttcctaaagcttttatgttctgcataaaatcttattgtttcttgtatattgcatatggtctgtcatattttcaagaactgtgttaagggcctttgaataatatgtgatcctatttataagcttagctaatttaacatcctcaagcattttaaattgaatttataaatcaatatattctatttatcttttaaaattacttcaattttctgattaaactaatataatctttctgagtacttaacacagaatacctatacatcaaactcataaatagggttaactttaagttcctttaaatatttcaatgacctatataaacttagtaatattataactttaaaactaaatcaattattcacacattataaattggaatctaaaatctgttcattttaattattaggccaaattgtcttaaacattacatgcatgtgagataccaaatacgtgcttctatctcacataaaggattaatatacaacaggttaatttccttaaacacatccatacttgaattgaaatcagcctagggttgggtgatacttacccactgtactgtattagtttctctgggctgctgtaataaatcatcataaaccaggtggcttcaaacaacagaaatttattctctcaccattttggaggctgggattccgaaatcaaggtgtcagcagggccatgaccctctggagtctctagaggtgaatccctccctacctcttccagcttttggtggctgttggcattcccgggcttccttggcttgtggccacatcactgctatctctagcttcatgttcacagcacctttgcctccacgtgtctccacttttcttataaggacggttgtcattggatttaggtcccagtcaggtattccaggataatcttatattaagattcttaacttcattacatctgcaaagatcaattttccaaataaagtaacatgcacaagttctagggatttggaggtaaacatatctttttaggggccaccattcaacccactgcacccacaaaagagctacctgtcactcccatgagtcatggtaacgcccagaggtggtgtctgggaagctaactgccttgccatcagcaatgctgctggaacatgcttcgttctatttatagcggcactatcaatgcccttcagatgatgtgtctcacagtccatgtccccaagttcacattctactttactgagtttctttatctcctcacagaagcctgcagcacccccaccccactcccctggactgcatacttcacccaattatgttttgcatatagatagatagatagatagatagatagatagatagatagatagatgtatatttgtgtatatacatatacatatatatgtgtgtatatatatatgtattttttttctgattctctccaaagacatttgaacttgatagatagaatcctgcattctttcaatctgttaggataattaattcttagggctattaaaatgacatccagttgaattctggcacctctcttatggctttgcctgactagttggtcacacttctgaggtctttccactgtttcaaacagctgggtaagaattcttttagggctttcggcaactgttgaaaaaggaataccaaagaaccaatcctgacaataggtctttgcttaaaggaggtagaattgtgaagtgataaagaaactcaatcccagcactttgggaggccaaaacaagatgtttgcttaaggctagaagtttgagaccagcctgaataacatagtaagacccccatttctaaaaaaaaaaaaaaaaaagattaggcatggtggcccatgcctatagtcctacatcctcaggaggctaaggcaggaggatggcttgagcccaagagttcagggctgcagtgagctatgatcatgccactgcgctccagcctgggtgacacagtgagacagaaagagagagagagaaagaaagagagagagaggaagaaaggaaggaaggaaggaaggaaggaaggaaggaaggaaatagtaagacccccatttctaaaaaaaaagaaaaagattagtcaggcatggtggcctgcatctgtagtcctacctcctcaggaggctaaggcaggaagatggcttgagtccaagagtttgaggctgcagtgagttatgatcatgccactgcactcctgcctgggtgatacactgagaccctggaaagaaaagaaaagaaagaagaaagagaagagaagagagggagggggagggaggggggatagagaaagaaagaaagaaagagagagaaggagggagagagagagaagaaagaaagaaagaaagagagagagaaagaaaagaaaagaaagaaagaaaaagaaagagagagaaagaaagaaagaaagaaagaaagaaagaaagaaagaaagaaagaaagaaagaaagaaaaagaaagagaaagaaagaaagaaagaaagaaaaagaaatttatatatacctatatatgctgtgtggtttgggaaaatcacttaacctttctgatctggtgtactggtgtactcctgtctatacaacggaggtaacatcactccaagttacttcattgggttgtgataatttaaagaaatgatgcttgcagaatgcttcccacagtgctcaacttataagcacacgataagtgttagtgattagaatacttgaatttggccagccatagtggctcacgcctgtaatcccagtactctgggaggctgaggcaggtagagcacctgaggtcaagagttcaagaccagcctagccaacatggtgaaaccccgtctctactaaaaatacaaaaaacactagctgggcgaggtggcaggtgcctgtaatccagattctcaggaggctgaggcagaagaatctcttgaacctgggaggcagaggttgcagtgagccgagatggcaccactgcactccagcctaggtgacagagcgagactccatctcaaaacaaaacaaaacaaaacagaatacttgaatttgtgtgcctagagtagttgttcagaagagtgttcccattctctcttagggactatatgaacacaaattcaatggaaagagacagtacagtattgcacactttaaaatatgttaagaggatagatctcatgttaagtgttcttaccacacacacacacacacatgcacacacacagacagacaaggaacaccaggaaatatttggaggtgatggatatgtttagtgatttgattgtgatgatggtattacaggtgtatgcatatgcccaagctcatcaaatgtgtacattaaacatgtgcaattttttgtatcgattataccttagtaaagcttaaaaaacaaatccagaagatggaaatattccttaaaaggaggttccctcctgtatattatacattcattctttattatttatatccaaatatttacagaacacctactatctgccaggctgttctaagtgcttggaatagatcactgaacataagaggcaacagtccctgcctcatggagcttaggttctagtagggggagcgttttagaagatgataagtactatgaaaaaaatggagcagaggaagggggaaggtcagaaccaggagtggggtgggttacaatttagataggatggttggggaaagtctcatgtagaaggaggcatttgggtacagatttgaaggagctgaggaagtaagccatgtgcagatatatgggagaggaaccaagagcacaagggccctgaggcagtagcatccctggcatgttcaaggacaagcaagaggatgatgtaatgggaatggtgtgagtgagggggagagtagaaggaggagaggtaaagaggtgacggggtaaatcgtgaaggtcgctgacatcactttaataagatgggaagccactgcaaagttcagagtggggagtgacatgacttgacttgaattgtaaaaggctcactctggctggagtgtggagaataaatgtaggaaagaagggtaggggctggaagaccaatgagagggtatgcaggaatccaggcaagagatcaaggtagcgcagaccaagaaatagcatggggggctgtgagaagtggtcagattctggttttacattaaaaagaaacaaggcagtttgttgacatattggacaaaaagtgtgagaaaaagagaagtgaaagaggagtctaagatttttgaccggagcaatctaaagaatcgtgttaccatcaactgagatgggaaagactgagggtagagttgtttgggggcaggaagaaatgtatgtgagctgtttaagtgaaattttctacatgagtttggagtttgagagggagaggtcttggccatagatagagatttgggagttgtccacatatagatgttatttagagccatatgattggatcagattatgaaaagagtgagggtagatagaaaaaagaactggacaagcggcagtgccctccagcatttacaagccagggagaagagtaaaaaccagtaaaagagacttggaaggggcaaccaagggaatatggtgtcctggaagccagtgagctgtgtcctctatggtgctagagtctgcatttaactctgtgggaatttcctccatgtgatgacaatggagtcaaccccttagcagtccaggtgacaccagtcctagcactcccagttacccttaacacgtcctctctagctaaacatattttgcctttctgcattcttctgtaagggaaccaaatggattttaataattaaaaaataataatggaaacaaaaatcatggagtatgcttcaggatagcaataataatttttaaaggatgtctgtaattcatttatataatctacagaacatgtgtatctcatacacaaatgtccttgaagtcattggttcttcggaaaattctagttggttccatagcaataatgagttttataccatatgctgcaagatgtataaaggcaatccaagtggcactttttgatagtcataaatctggtgagagacagcataggcaatcggtgagtatgttgctcctttcttgcttcacagtatttttttttttttttttttttgagatggagtctcactctgttacccaggctggaatgcagtggcacaatcttggctcactgcaacctctgcctcctgggttcaagcgattctcctgcctcggcctcccgagtagctgggactacaggcacacaccactacgcccggctaattttttgtattttagtagagacgatgtttcactgtgttgcccaggctggtcgcggactcctgagctcaggcaatctgcccacctcggcctcccaaagtgctgggattacaggcgtgagccaccgtgcccggcctattgcttcacagtatttactggaagagccttagtcattaatgtaagtgctttttgagctcagggtccattttatttccctcactatctttctcggttcccagcacactgttcagcccatggtagatactttatacaagtttgctctataaatggttgaatagtgcaagctgcatcaatgagtgacttaaactaaaaagactttcttgggacagaaactgaaactcagacaagcataacaattacacttagaagttgccttttatgttgaatttattgcatactttctggttgggtcatttgtagtccttttctttctgtaacaacaacaacaacaaaacccaaaagtgaatgctttctacccaaggacaggcaagatacatgccaccttatttgaaccacatgtatctcccaaaggaatacctaggcaaagaaaggagaaatgcagctttctaatcagcagcgctgatgaggacagatgctagtttatttttcatacaccccatttttttccatgattttacattgactgtgagcacacatattttatttttcatgctctaattcaggaattatgattttccatattatcaaagcaaaaaaaaaatctctgtgagaaggcaagcaaagcaatgttgtcactgagcacatcacacaggtgcagatgagaagctgtatccacaggccaaaggggcataaaatagagtgactctgcaaaccaatcaaaaggaccatttccataagcatccatcttattaaatgtatcatcaacaatctacctagggcctctttctgtgggagaagtggggaagataaagattcattttgtcagtatattgtagtttttcttatgattcttagctgtgtctagaattttttttcagcattcagacagacagctataaaactgattggcttgaaagccaaataaaataaaacacagtagcctactttatcatttaacactagctatttattatgagcagtgctgtgttgggatatcgaccctgagattaaagctggggaaatatagattctgagattctgtggacacataaagctcccaagccatggtgacaaataataatgagcttatactcaggggccatcttttatctcaatggagcccaacagctatcattttttaaaaataatgaattgtataaacaatgcagggaacattcacttagctattctgcaatgcaacttccttgggccctgagtacatgctcagccgcccagccaactggccattgaagacagacactctcctaattcatttattccttggttggttggttagatcattcattctttcatttatttcaacccatttggccctgggaggcatccttctccctgaatattccctgaattcctcatgttctttcttgcctccagagctttttttcctctagctaggaaaccctcttacatctccaaaataaaaattctactgctcctttaacacacaactgaagtcacacatcttccacaaaatcttaagcaataatcttagagtaaattgtttctggattcaaatcctggccttactccttattagttgtggacctgtgggcaactcacatcctcattctcagtctcagcatatttactctaaagtagaggttaaaattcttatctccaacagttgtttcaagactaagcatatacagtgtttaacacaatccctaacccattgtaggtactcaatcaatgttggttccccctccttggctcctgttctctgaattacaatagcagttaaatttatagcttacgcttatgtaattaaacatacactgaatttttcacagctgtatttcctggagctcaggctcttcactgtaccttcccttcaccctcttgctttaatccatggttcccaaccctggctgcacatgacaatcactttgggtgtatctatggttgggcccaaaccccagagattttgatttaattagtggagcccagacattgcctgacaaaataattcaactctgtctacagcataacgacatccaggcagctagatgggctggaaaggacatatggcctttctgaatggtagcaccttaaatctgtgccccccagcctcactgagggggacttggtctagcagccctactaagtctcctggtccactcactgccctactcctcgggagcgtgatttcttaccttctcatctcctcaaacctcctcctttaccattaccctctgctaatgatctggggcactcactgataagacaggagagaaaaaagtgaacattctcaccctatcttctaactccctgcattcatactctatcttcctcttcttactatggatggaatgtccctgttcaggtcaaaaaccagactcctccacctatatcctaaagcccattccttccagcaattgtcaccgctcacctgagttatcacttattccacctgtatacgtcccacactgggtcattcccaccaagagctaatatgctgtaataattcccatcttaaacccctccctcgacctcatatgcccctttaactattgccccatatctctggtcccttgtcaggaaaaaacaaacgaaaacctcaaaaatagcctgtcctcactgtctccaatcctctcctttcgttctcccttgaactccttccagttaggctttcacccctttcactctactgaaacagttttgtcagggtcaccaataaccaccaataacctctcaagccttgacttgcagtatctgacatggttgttctctcctgggtctccactgacttctagctctcttcctataccactggcttctccttctcaatctccttaccaactcctcatttctctgagttcaaacattggcagccctcagacctgttgtaatctctatcaacactcactgtttaagcgattttgtctaatcttatgacctcaaacagcatccatatactggtgattgatatctcctgtgtggacctcttccctgagctttgtatttacctggctgccttcttgacatctccacctgattgtgtctctgtgacattcaatgtcatacatctaaaatggaattcctgattcccacccactcccaaatctgctgctcctagcattttctctatctcaggaaaaagcaattccacttttgtggtagttttaaccaaaatttttgaagtcatccttaaaacacatctcttggtaccatagccaatccatcaacaaattctacattatacatgtttttcaatattattcacacctataactttaaatcactatatagaatccatcaataataataacagcaaatacacagtgcccagcactattctaagtgctttacataaaacttaatctccacaaaaactctgagataggcatgattgctattcccattttacaataagaattgaggcacaaaggaacttgcccaaagacacaaagctagccagtaaaagagctaagatgaaaatctaagcaatttggttccagagtccatgtacttgactacagtgctttatatttatcctgtacttaaatatttagattgtttagaagtttccagttcctataaatcacgtcattttagccacctttgtgtacaaaacctcttcctaatttagaacaatttcttcaacatacattctcgggagctgaattactcaaaaagcacaaacactcttaatccctaaaataggctaattctcagtaaacattggctctttgaaatctgaatttatatccagtcattcagaaactaggtttgtttttttttttctgaatagagaaggcctaaaggagagcttagagagcagtttgatccttgatttaatcactatgtattctgctcattcaatcttccagtctttattttcttcatctgcaaaatcaagatcatccctaagtcacaacttcccccacgatgcactaatgagactcttatttctatattaaaatgttggtcttatttcccacaaatcctgaaactttgatctattattgttccatcctaagaaggttttgatccattgcatcttttaagatcatagaacaccgagtctgacttttaaagtgactttgcatatccaaattttacacctccctttgctcattcgttattgtttcaagaccctattctactcaccatctggaaagctaaaggaaagattatgtattgatgtatttgccatggttttatattaactgtgaccacacatattttatttatcatgctctaaactcaattttgatatcacagatttggatattgaatagctaatgataagtgaagtatgatttttttttgaggtggagtctcactctgttgccaggctggagtacagtggctacatctcagctcactgcaacctctgccttcctggttcaagtgattctcctccctcagcctcctgagtagctgggattacaagcatgcgccaccatgccctgataatttttgtatttttagtagagacgaggtttcaccatgttggccaggatggtctccatctcctggcctcgtgatccacccacctcagcctcccaaagtgctgggattccaggtgtgagccaccgcgcctggcctgatgttatattctttttaggcttttttccgttcagcctttggatgatccctatactacaatgtggaactcctatgttatatgtaccaatatattattattattattattatcattattattattatttatttttttgagatggagtctcgccctgtcacccaggctggagggcaatggcacaatctcgactcactgcaacctccgcctcctgagttcaaatgattctcctgcctcagcctcccgagtagctgagattacaggcgtccgccaccacgcccagctaacttttgtatttttagtagagatggggtttcaccatgttggccaggctggtctcgaactcctgaccttgtgatctgcccgcctcgacctcccaaagtgctgggattacaggtgtgagccaccatgcccggccccagcattttatttttaagaaaattttcaccttactctaaaactgttatattatcttcttccctcagtcataaaaaactaatacaattgttcttagaaaggagaaagttccagaagccaagaagacccctctccccttcatttgtttccttctctgtgtgccagcttgtctgctgacagtgagttttattgctgttcctttctatgctgtcccctgtatctgaaaggctggaagcctgggaactatatttcccagaatacacacccagtaaatatctcagacaattactagagatgaggagggcagagggaagcagaacacatattcttctactagtggcagatttgagagtttggagtggcctgtggtgtccttccacaactcacagcctcagggggcactttccagtagtttctgacctgtgtggcaataattccctaaaagttaactgcaaatctgagagctaactatgggcttcctttgcctttgtttcctctagcctttccaactgttttataagcatctgtctgttttcgataccttcctgcttcaaatacccagagtggcttctgtttttctgactgaatactgactgataagtcccatctttaagacttatgtaaacctgtggtcagacatccacctaagcaagataaaacagaacaaacaaataagtctagtttacatcatcagtatcagatccccaaatcataaactgtaaaatgtctttaacccaaaaagaagcctatttagccggatgtggtggctcacacctgtaatcccagcactttgggaggctgaggtgggtgggtggattgcttgagctcaggagttcacgaccagcttgggcaagatggcaaaactccatctctacaaaaaccacaaaaattagccaggcgtgatggcgttcacctgtagtcccagctactcggggggctgagatgggaggattgctcgagcttgggaggcggaggttgaagtgagctgagatcgcgacaccagcctgggtaacagagtgagactctgtctcaaaaaaaagagaaagaaaaaagaaaaaaagaagcctgcttatatgatttccttttattcctctaggtctcagataattatatatcaaattacagaggcccaatctaaaaaccccaatgccaatagccaatatcaccagtgttccagtataatgccttgagggtggctaaagcaatacaaacatgtccatccttcatatttcacctccctttcactttagttctcttatttgtgtacttgtgcatatgcttgatttatgatttttgttttttcttttaagagcaggtttttttgggggaatgggtctccagcacctaggaaatgttctaaagatgttggttaaattaaatgtaaaataaatgtgtggttttctattaggcttgatggagtaaacagcagctgacacatatcaaattaagttcactcaggaaacataagcaaatcatcaagctcttaggttttccatatgggatggcggttccattttattttgaaaatcctttttcccctgtattgatgatgaatttatgatgacatatctcacacctgcctgaggcacacagattttaggttatctccctaggtaattctgatgcacactaaagcttgatgcagcaaatgaaaacagagctccttttctttgaaatctctatgccaagagtgaaatgcacagaatccaaagacttgggtctcttttccaggattcacatttgggagacgaagcacagaaagtgaattttggagctgaaaaggtccttataggtcatttaatttaagcctctcatttagaagatcagcactcatatctagagtttctttggcattttagggcagaacagaattcagaacacaggtattttgaatttcagtccgatgtgttatctccatgtgtcagctgtactgtggacaggcatacgtattagcagagttttctggctggtagcagtaaagtttttccaatagatgcaagcatcttgaggaagagatatcatttttctaatatgcacaaagatgtaacatgggcttgtggcaggcagccctccccctttttctttcatatatcttattaatatacagtgtggaggctctaacctcaataacaaaatacaatacagatgcattttaagaaaatttgaattatacaaagttgaaattgctgattcagaaaaatattacaaagttttgctgcataaaattgcaacttcctaaacaactgccaaggactgcaaattataaaatgggctggtgcagtgaattgcaaaccatgttcatggactgtcatgcagaggcgctgcattgcagtagtaggatgtgacccacgcttttattgacgtacactggaacctgcctgcatgtgattccagtgaccgttgtgctattatttgtacaataaacttgtatttaatttaattaataattaattcatttatttttgagacagagtcttactctgtcacccaggctggagtgtggcagcacaatctcagctcactgcaacctccacctcctaggttcaagcgattctcctgcctcagcccgacgagtagctgggattacaggtgtgcaccatcacacctggctaatttttgtatttttagtagagacagggtgggtttctccatgtggccaggctggtcttgaactcttgagctcaagcgatctgcctgcctcaggctcccaaagtgctgggattacaggcatgagccaccatgctcagcctgcactataaacctttaactcagtagttatagataacataacactctgaacctctaacaactgccattagtagcttaccatctgttaatttaggagcaagcatacaccagaaagcactgaagagaatggtgtaaagataaaatatggcattagggccaaaaaaagaaaataacccacatcaacaacatctcccatcgaatgtttatttatctgtgaaaactagccttaaattatgagtatttcaaaccatttaatgagttcaggagggcatccctcacacaaaaattcagcttccctgactttaaaaactcttctttactcctaagcctgaaagacaatgtgtaaaattggaaggagcctaggggtttccaatttaacacatttctggtccacaaagggataaaattctctggtaagtctcctagaagtcagatctgcttttgcctgtttttaattccttttagcatacagtgagatgcatcatcatgtgtttttactccaggctctaacagggccggagtttgtcactaagtcaccttcacggcatcttcacagacctcaccttcattaagtctgctcaaccaattaaaaaagagagccaagtaatcttattgtccccttcccagaatgattagaggattaatgagctaaacaaaacactctcaagctcaggaggaacactggtctacaaacacggagcatggcacgctctgtggtctccaaggggtgacatctgcagatgaagagaaccgcaccccctgcagcgcctgatgctgctgccgccaactctgtcgggtccttggtcttggtccatccaaccggggccgagcgtgtgctcagtatgctgatgaagctgggacaccagaatttctaaattttaattagtatgtataaaaagcatcaaggggctgagtgtgaggaaaattagaactttactggaggcttacatttattttaaggtttggtattgtttttatttggaattacatgaatgggggcagggtggtgtgataatcatttccgtgcttagggcttctcaaggtcacaaactggttccaggcttactactcacttgaaaaaaaattcaccaaaaaattcaacaatttatttccacaggattatttctttccaagcaagctgtcttcatgaagtactaaattctttcaccagtacagatttatcagaacatcttggacagtgctacaaatctaagaagaaaattaaatatcatttagctagggagtagcctctgctttgagtcaagggctggtctgatgaggtctagatgaaattttcaggaccaccatattgataacttgcagataagctttggatcctagaatctgaggacacacaaacacacagaaagggccaggtctgtcaagggtccttggtgagctctgtgacccctgccactcgtcatttctaaatattcccgacttccttactcttgtgcccttgctgagatgtgtgtgtgcatacaaacaaaagctatatatttctaccctgagtttccacactttggaccccctccagacaccattctgaatatgacactctgctgcagggtactaaaaattgttctttcctcaaaataaaacctttaaagatcccttagtagctatttggggactggaattcaatttcagttctccaccctttggccagctatagattcaaaatgcttacataaaacattgagagtatgtacttcatggcaaatttgatttttcttctgcaatagaaatttatgctgtagttaccacaaactatatttttacttagaaaatacacaaagcaataatgcacctcaacaagagagaacagatcttttaaaattttattttataggtagcttcgataaaagcttcagatagacccacatactatacagagtttgtgaaatctacactttcaaatcataatattctctattttaggctattatatttagaagcatgacatctcaaatccttttattacaagtagttcttgcacataaatgttatatcacaatagcaaaaaaatgtaaacttcttttgcaaactacataaatactataatatctaccttgaagttattctcattttaaatcagaatacactctaaatgttttacatagaaaactctcgttggtagcctgtgtgtatgaaacatcattttttctttcttaactacttgtctttcatgttgcctacttaggtctctgaaggagaaaaattcaaaatagaacccagatcaaaattcagttcacatgtaagccaggtaccagaaggatgccattaaccttgggaaaaataagagatgggaaattattctacatgctaaatccaacatgccaccagttggtatggaggtaactgaagataaggactggggtcaagctcatatttcattctatatggaagggattcagcctgctcttcaatacagcttttactctgatgtataaaaacatctgttctcaaatgaacacctctttctcttttcttgtacagcacaacagatcattgctacagctctagtcctagactggaaagtctaggtggcccgtgaattgatttcaccttcgctgtccttcgagtttttaaatgcaaagtgaagttgtttaaatatacacatgtgttccctgacattctctagtctttttttttttttttttttttttttgagacagagtcttgctctgtcacccagactagagtgcagtgctgcgatcttggctcactctgcaacctccacctcccgggttcaagtgattcttatgcctcagcttcccaagtacctggtattacaggcatgtgccaccatgcctggctagtttttgtatttttagtaaagatgcaatttcaccacattgcccaggctggtctcatactcctggcctcaagtgatccacctgcctcagcctcccaaagtgctgggattacaggcatgagccagcgtgcctgacctctctccttgattcttaacattgttctttggtcctcttattcctctgtccttttgctgggttttctctacctgctccttaaacgttggtgttctcttggcttcttttgctcttactaggcaagattatcagctggatgttccataggcacttcaaacttcacattctcttctccttgttttctgcataaaccctttactagctctccactgtttttcaccatcatgagggaaaatgagaactaatgtggactggcgggaggcagtctggggcggtaaccccgtatctgaaatactccagggatccatgtttctttcaatagtcagattaagcattccccaatccaatccccagatatctttgaacaaaatcaataaaaatcagtaaaaacaggaatatatatatatatatatatatatatatatatagacacacacacacacacacacacacatgcatatacacacacatgcatggaggaccatactaaggcctttttcaggtcaaaaagggttttcacattgaccttttttacttttaagtatttttcctcagaatgttccttcagttaaaaatcaggtttaatctggagctcttactgatttttctttgattcctactgaacacctagctactggccatggtttctttgaggaaaaaaacaccattgctgaagcatttctaaacatttttaatgcatgcagaaagaactacatagactctccaagcagctatataaggtggctcaagtaacattatgatttattttggtctaagccctttcataacgtccttttaaaatacaaagagaatggctacgaaatggtgccagaacccagaaggcccagctggactgacaggagctctgagcagttcataggacaagcagggacccgccgaacctctcccgtttctgtgctttctctaaatgcagcaggtcctctctttactgcccatgcttttaaactatgaaaaaaaattttttaaagaaatctagcagtgattaatggagacctcaaataacactgtacatgggctttgttagagacaggtaatcattcttaacagctcttttcccagaggaggcctgggtgggccgagaggcatccagagtttaggaagtgcttttattgcagactgcaccttggctaatactatcctctatgtactggctgcctgtgtcactcctgctgaggactgtggaggggatgcgagagggacgcctctctgggttctcctgagagaagcagcagatcatcttcttcatggtgccatacatgtcctcgtccttgtaggagtagatgatggggttcacgacggagttgagcagcgccagcagcaggaaccaccttttcacatgctgcacgccacactgcctgcagttcaggccgtcgaggagcagaaccaccaggcccggggtccagcataccacaaacgcccctgcaaggagagaagaggaggcaacagatgctcagaccttaggggacttattcaggttttcttctctcccagcctttagccagtggcatcaaggggccctcatgatttgttttgacaactgcaaggcaaacttccacctaccatctgagcatttgagacctacgcttggtacaggcaaataggtgggaacctccttgactatcaatcacatttcatttcactttcttttctgcttacccaggtcttgtgattatgagagactcacatttacattctgcttaggaggcagtgcacatgcatgatctccgttagttctctgaaccacactgggaggctttgttgcactcattatccacattggacagataagaaaaccaaggcccaattctagggggagatgagaggagaactctctgactccagggctcccatacttcaccctacattctgctgttacagaaatcagattttctaaatgtgctcttgaaaataagacacaatgagtctacggcattcttctagtagtttaaccaaatcacctgctcataaatttcattcttcataaattcatgtggatgcttagtaagcactatattctttttgacatattcacgggccatctgcataatcatctgctctacatttagattttttggtcagaaataaatctttcatgatgagatagttaaaaatctacttttcagactctgcaattgaatatgaaccgtagtctcttctgagtctctagccacagcatcatacttaccttatctctaaatttcatgatatttttctcccattaagacatgggtccactatttccctactattatcataacctcagatagcaataacgactcatctttatacagcacttactataagcgaggcactggtgcaaacgctttccttgattaactcacaggaccacactatgacattggcattattattatccccaggaaaccgaggcacaagagaagttaagtaacttgcctatgatcaaataactcttaagagacacgattttgaacagaggccgtctttctccacaggctgtgccctgggccactatatgacccgcctctgtagtatgatgtggttgctttcggcgaatgtccttgtcatttctaaatgcacttgcttgtccactcataaatattcatctgaagctaacaatgtgccaggagctgtactagacagtgagtgaggtgaaggccacgcactcagggagctaaaatactaacagagaagacgacaaacaagcaagtctatagatgatatcaccaactactctacttgttagaattagttctgcatagtatttctcttgttgctttatcttacttctaagagatataataccaagcagggaaagacaaggattataaagaggcagtgtaaggcagggaagagccacgaactttggggtcagacatgtatgcacagctcaacctatgagtgacccgaattatgggaattacttcacttttctcagcctccattccctcctttatacaataaagttaataaacccaactatgtgaggtggtagttgtgaggatcagaggtcatggaaagtggtacccaacactgtggtgggttcactgagcagcagttatcatgaggtgctctgtttccacaaaaaatatctatatgtttagtagctagcaggggggttgaattccttatttcataattacggttcagcagtggttcccttttttctccaccttgtattattattttcggtctggctgatatatgtgaataaagaactggacttggagataagagatcagagatttgggttctaattcttcacttactgtacaactctgggagacccatgtcattgcgctgggctcagcttcctcagctgtaaactgaggactgactttaggctaggtctgagtttttctagtggtgggtcagaacttgttagtgggtgtgcaatcaatgtgacagattcagactggttttttgttttattcagactggtttgaaacaagtgaaggaactggatgggcagccaagtttgcaactaccaacttgagaattcatattagtaagtttttagccataccacccgataattgtgtctgagaaacaaacaagtcaaatttgtttgagttttatggagagttaaaagccacagtttcacagaattcggcagtttcctacttggaaaagagttcagaagccgcttagcctgatctttcattcataggaaaaaggccttccctttgtacatctcagaacaatccaggcaaaggaaatgccctggtcaagggaggctcttcaactgctgaacaatggtttcttctcttaaataacttcatttaggctgggcgtggtggctcacatctataattccagcactttgggaggctgaggtgggtggatcacccaggtcaggagttcgagaccagcctggccaacatggtgaaaccctgtctctactaaaatgcaaaaaattagctgggcatggtggcaggcacctgtagtcccagctgcttggaagactgaggcaggaggattgtttgaacccaggaggcgaagttgcagtgaaccgagattgtgccactgcactccagcctgggcaatagagcaagactccatctccaaaaaagtaaaaagcaaaaaaatatataaatatcttcatttacttgaaaagaaggcttgcatccaaactctgcctgttgtactcttccatttgttttgtgtgatcctctgcaatagcccaggaaaagtctgtgctttctctatgtgatgcccttcaggtttttgaagacagttaacgctttctgtctttctttagccttttctccaggagacacatattgaattttatctactagttcccagatgcgtacctctggacactcattcatatttgttaatgctgagaattttttttttaaagtaatctgggcatcacacaaactcttctttgaaccctgctggttcccagcagtcatagtctgagcattgaggctaaatactcaaaagacattccttttagtttttttcttctggatttatgtagattggtaggcaactaagtgataaatattttccaggatctatcacacacacacacacacacacacacacacacccctcacttttaagaattagtccagttacctgtttgaatgttcctgacatctccacattctctatgaattctccaagactacagagcctagggtgtggaggtgcgtggggaggacttatgtttaactgctaacatagagcaaaccccctcaaagtatgaactgttagataaactgtgcatctcttctgagatgtgtttggagagagatcttggcctccaggtggaggaggcttggaacagctgtttcccagggtcactgccggggagcatctgcttaaggcaacatctctgaagtacctgttctctagtttagccacctagtatgtttgtgctgttctgtcgaagaacatttgccttttgttgttcattggaaacagcataaagatgagatcagcagatttttatttctcttctgacaccacggccagccaatcagccaatatttttgttggattcctttggattccttccctccttccatctctccctccctttcttcctttcctggccaaaaaaaaaaaaaaatctttcctttaacaaccaaagaatgatgtaattgtgatatatgtagctttatggtcagacatgacatactacggaggggcccttgaagtccagaggtaccctcctactcctccttcactctcttcagtagtaagatgctttacgggccacagctgagcagcctagcacaaagtcaggaacatggctctggtgccaggctgcctgggttccaatcctggctcttccactgatcggctgtgtgcctttgaccacatcacctaacttctctgtgctgtagttacctcaggcttaaaatgagggcaggattagtaccattcccaagggtttttataaaaattaaatggattaattcatatacaatgattaaaacagcatctgacacaagatcattgctcaataaaaagcttataaggttttaattgaatgaattattttatgtaattcaacgaaaagggaaactatataggaattatcgtattatgacaaaaagcatcaatgtgaagacttgtttggagtgttgggtcacaagattaattcaaaacagagttttgtgctggggagaaaactttcatgacaaaaaaatcacgtcattaaagaacaaaaaatcacattaaaaattcacatctaataatatgagagtggggctttaggaaaacattggcaatttatttttatccttttttgagtgtgtgtgcgatgcacgcatgccaggggggtgtattatattattcaaacaaaactacaaaaaatatagtgaactttaaaaaataatgcttaaaagaataaaaaaaataagaatacctgtctacttaccacccaacttaaagaacttaaagaaacttcaaagaacactatcgtatctttagagcttcctgggtgcccaccccaggagccctctctcctgttgagataaacgtatcatacattttgggctaatcatcttcttgctttttctcatggttttccaatatacggatgtaatgttagacatcatattgtttagattgatctgttttttaactgtaccgtgatttgcactgattttagttatcaatatattggaattcacttctagcatcttattttgttctttgtttcatttttttctatgtttcgcttttttccccctctcttttttcgtattgagatcttttattttttcatttcctttggtttcattttcccccttccactggtttggaagttgtagactctattaaatctcgacttacatgtttaacaaagtataaagttggccagtgtttgtccttccttcccgtcagcataaggaccttggaacactcccacctggattttttggaattatacaatttcatatagaaaggactcttcacatcaaagttggtagctatagcttttgatgtctggcttgtttagtttttctctcttgacaacacagtaaccctctcttgagaatagcagagagaataaaaatgttactgttatgggaaatacagatcactggagctgggtggggccttaaagattaccagtgtttttcaaacttttgaccaagccaaatgaaaattaaaggaacttttaaaataatgcatattctctggtcccacatcagacccaatagtcagaatctcgggtgggacacagaaatctgcaggactaaaaagttccctgggtgatcatgatgcacagccagttttgtaacctatttctccatgctgacccaaaatggtttaatcaagctgactccataagcaaaattatagatgccatatagacttagcaaaaagccatggaaaagagagagggagcacagttttttcaaatgagaaaataagcatctctagagatgaatatcttcaatttgcatttgggaaaatgtttgagcacatacgcaaaaataaatatacaaagagtggcagcaaaagtagtctacaggcaaggcatccacagtcctcctctgctgctctttggctcgccgtgccaggaatgccttctcacctcctaatctgaggtctgcttttctttctaagcttagtgcatactctgccttctccactggagctctcccatctcttccaccacagtgtccatttcctcctctcaactcctgtagcactttctacctatagcattcacgtggcactgggcacattacctgcttaattcctctctagcatttcctgagaactctgggtcaggcagtgtgctcagggctttacatgcacttcccctgtaaaactcacagccttacaaagttgctacttttattattatcctagactaacatacaataaatttgaagtttagagtagctcaacagtttgtcctaggtgcacaagccaaaaaatagaagttatcatttgaactcaggcctgacttccccatgcaaactcttgagcattgagctatactagaggtagtttttaatacatacgtcttgtgtctcaggtgtgttctaagctccctaagcaggtatgctgtgcctcatgtgtttgtattcttagaactaagtatctagcccacactcagtagcacaggagatgagccaggtgaatgtgactgaaatttattaatcacttcagggattgacagggacagaacctggacctgacgactctaactcctgtcaatgagggtctcagtcgaagtgacactcagttgagctggtgctgaagggcaagaatgactgtgcacaggtgagaaatagcgtgaagcatctgggtaattccaagtggttcaggatggttttaacccaggaagatgattgaggaagtaaggtaaagtctgagaggtgaacacagggctagattgagaagggccctgtgtgcaataatcaagagtttggatttattacagatcagacactaataagccttttttaaccaggagttcatgcagaaaattaagtctgaatgcccttaggcacccattgtatgtaatgaactaacttctcttctaagcatctagaatggtgtgagttatgtaccacccttgaaaagattaagaaaatctttctatgttccttggttcataaaggaaccccactgagaattgctagatcaaagtttttccagacacagtagcaattcagtgggttgtgaaatcaatttagtgagttgcaaccagcgattttttaaaaaaaatgaaatagaaacagaaaacatcagagtgcatcaagtaatagtaagggcatgttccataaaacttgtttcaattacacagaaaaataagtgtgtgaactgggctgtgatacaaaatgtacactatttcttactgtgggtactgctttttttttttttttaaagtttgaaatccacttcaatagatcagtggttttcaaaccatttcttttttttttaagtagaggaatacttttcccaaaggaaatatctcgttaaacttcaaaatcagagctgctctgactaaagaaagagacggaggagagggggtgttaactaaagccctatgtagcagaatgggctctcatcttcatactccaaacaccctctccccatacacgtccacacactgaggcccctctgagggactcttggcaactctactgaccactactttaaaaatactgttattgaatggtagttcttcgaagatttttaatcagggatgtgaacaaatcttatattttagagtaaatttttatctaagtgctcaggacggactagaggtatttgtggaactagaagtcaactccagtctgcatcaaaatcatctgggctgcctgcttaatattctgatttcttaaaacctagtcctgccaaatgagaaagtgaggaaggtgtgatctaggcatctccatgttagccatctccctagggaatgcttttgcgtggtaaaatttgagtactgctggcctgcaaagggagattcatctgaagactagctaaaatccaggtgaaactatcaggatctgaaaaaagcagtggttgtggagatggtcagagaagctgtaagggggaaggaaatgtgagacctgatgaatatttggatctaggaagtgaggggaggaaagactccagggtgagtgggtagcatgtggctatgataactaagcagggagacaggagggacaggtttaagaggagacagtgttcagttttaggcatcaggcacttagagtgtctgtggcttctccagttggagatgtgtagaaggcagccaggagcatgggtcagaactctgagagctccaaattgaaatgctgatttgggagtcatcagcagtaggtggtaactgaggcaaatgtccttctattaataaatatttactaagcaattacctaccatgtgctagtgaatgcctttatgaggactcagtttgtataacaaacctatttccttctgtggccaagtgacaggtcagttatattgataagaagcaatttttttttattttaatgatgttctacattccttcagtacctgtttaagagactcactaatagttcaattagactataaataagctttcctctagtaattaaataaactagtttgagagttgtactcaaaaatcaataacgtgagttcaatgttaatttttaaagttaagtgaatagcatgctagaatattcaattacagcactgagatgatatcttaatgactgcaatttaaggtaatcagaaacatcaaattaaggaatgtctaacactttggaaggtacaattatattggtgacaagcgaagtaaaagatcttgcaaagtacctagtcaacattattgtttacatactcgataacaacccccacacccaaatttggaagtttacaaaatacctcaaatagtaccttggtgaatacctcatctccacattataggaaataagaagggagaacaccctcccatctggagaagcacccttcactggaacgtatttaagatggttcagcattcctggggttttggtgatggataaggtctcagtttacacaaggcctgttcaacattcaaacttttctattccttctatttagacttgcagccatatttccatctgtttaaaaattcacacatgcaattaatcaaagaacgttgacatatgagtggcacacaaataaaacatccataatgataaaaacaatcacgtagaatactctcactttgccacatggactactaatttcatcacaagggaggatatattttaaatctgttcactgtcttaatctttgtttttagtccaggaaaaagcagcagggcacaagcaataatactaacctagtaagccgcagggccatctgatttactaaaatagaaaattataactctacataaaagtcaggtttgtggacctcaacctagggaggcattcttcttatttgaaaaggaatttttaaagtagaatttcaaagtaagcatctacttttggttagaagcattataatgtgtaagtcacacattaacagaatatttaagtgaaaatgctcttacgacattaaagaatttgtttaacaatttaaaaattaacactttcagatgtggtatgcagtcaaattcatattcatttagcatttcagaagtccaataactcagaaaatagattgtcaccgatgtgaaaggaatgaaaatatacacctttagtaaatctgatttatatttttactgtagaaaaaaggacaccaagatgcttcaaatagatgatgagcagttaaacattccataaatgattcatttaacactatcgttactagtgttgggtattttgactctaacaactggttttagatacttgttttaaacttgtggccagctttccagctttgaaaaactgaaaatcttgataccaagggcaataaaagataaaatttaaagcagaggcataccagctagaaccactgcctagacctaattctagtgtttaactacaggcaacagctggaagttataaaccatgtaagaaaacaccatctccacctccagattccactttaagtgttatgtgtactaaacagcaatgcctcaatacttcactagctattatatcaagggctctgtggcagagctacagagaaaaggtgtgagatcagctgtgtgtactgacagagtagcagctatttgcctggtataatcttaaagaatgacagatcccaactaaccttcccaaggattggacattcttcctgctgaagtcactcctttggattcagaagtcctctgttgcaacttacctagaaatgctaacatattaggctgtgggcatgtaatatttaatcacataaactgtcatgagcatagaacagtgccctgggggaatgtataagagatgtctctaatggggttgaaacattttgaaaggactacagcattgggcattgcacaagaaacttgacctacctaggacacaacattctggacataacagatggcataaaatatcattctgagctcagaggaaaggagtatgaatgaagtggcaggcactggggtagcggttgaaaccatgctgccttacagagagatgggcctggaagaactatagcatggtacagttcaggaatgacatggtcctgacacaggataccactttccatcctccactcatgattaagaaaccatgacactatttgtttctgggctcagatatgacctagaatctcttgcagcacaatgctccaagcagtctctggcaatcaaatagaatcagccttgaaatgaaacctacttatccccattatagtaaaatgagcataggcttgaaatcaagcagaccctgagttgaaatcctggttatgactaagggcaaatcagatcaccttcctgggcctccatttcttagctatggaaggagcatgatgatatgacccaacaggatttttgtgaaaatggaatgagataatatgtggaaagtgtccaacacagaaagcactcagagaatattagttgtgactacccagatagtgttggttacttcctctgctgtccttcttaggcaacttataagcagatctgggagagtatttcagttgctgctgtgtgcccacacatgtgtgcgcacacaatttctcacactctgccctgtttctgtatccatctggctgtcctgctagactgacaccctcaggggagatctcttttgtgccttattcaacttagattacccagtgcttagccaaatgctatacacctagtggtgtttaataaatgtttgctgaatgaaggagcaaggagtcttgattcaagttcagatcctggactagagtgtgagttttaaaaggccattctatttctctgctcccagtatctccatctatatgtcactgggattggatgagaatgccctgtaagggtcctgtctgctgttacatttgatggttgtggggttctctcatagcttcctttagtcacagccaacatgcagtgctaggaactgaggagaaagacaaacatggatgctctgcattgtgcaatgtgagagaatctcgtggtaaaatttaagacgcatgtcacctgactccagcaaaaactgggatcttgatggagtacaggaatgctctcagatattcaatatctaacatgcaatgggcatttgttaagtgtcaggcactgtggctcatcactgggaatagcaagataaggagacagaggagtaaatgattccaggcaagatatacccaagatgatgtaagggcacgctgcctaactgtcttcacaagggctgaatttaatgttctctgcaaggccaccatgttctgtgtttttaaatggacaggaatgttaagaatctctctggttgggcattataggaggcgatgcaaaggggctcactgaacatccgctccttctccaggtctccagtactgtactttatctctctgatcttctattctagtcacaaatccatgattgctacactatgtttataagctccctctgtttaaaaatgcacctctgtttaaaaatgttgccaggtttgatgatgacgctgaggttcctatctcaaacagagaaaggcccaggaggccgggcctactatcctgccttggtcatcagtacggtgcgcaaaccctgaggatctcaatccccgcttactgtgggtactcagaaaatctgataatgaataaaagaacaaatgtataaacaatattccaaagttacagagcaatcacactaagtagtaatagaacccttcaggctatttaagtgatgtgaaaaccagtataaaaactccatatggacatgactttcctgagtgtaaggtcttgctgggtgtgcactagagaatataatgataacggtgctttgcggagttgtgcaatgtgaagaaacgtcactacatcactactctagagctcgagttattttacatatatttttgaattatgtataatagcaacatataatatatacatattatatgtatatatatacatatatagtgctcaacagctatatcttaaaaaaagaataaatctgatttttacagatagtctgaagaatttcactcatttcatcatgctagtatttgtcatttttgatgaaatcatatcagaaaaattcaacaagaactttcagcttttaggtcacaaatactctgggaatactataggttttcaagattatttttcctttctagctgacattttctttgaatggttgacagaacttatttttttaatcttaaatttagtaaaccataaaatctttaagtctttacatttagtaaactcagctatatctaggaattttataatgcagctaacacccctgaaaatcatgattcatccaaacagtgacatactatacagctattgaaaataataatattgatatgaaagatgtttattatttattgtttttaaccaaaaaaaaaaacaggttacaaaacactatgcatagtatgattccattctgactacattaattcactaaataaactgattgataaattaagcaggcatctgtgcatatgtgtgcttaaaaaagatcctgaaacaaatatcccaaaatcctagcacatataatctataggcaacatgattcaaatgatttttacctcttccttacatcttttattgttctcttaattttttgccataagcatgtctttcttttaagtaatacatcttcactaaaactactcctgttgccattttgggaacaaatacctttgcatgcactagatttctacggcaagaaacactataagattgatacaagttaagaaactctaaagtcatgactgactttcccaattaatcttttaatggcagtttcacttaattttatctacagtttactaaatagaaaaatgcaccgcaatgcattttgtatgagggagtcattcaacggtaaaaccacaacataatctttgaagtggaaccaataaaaatcaattgtgtacaatgtgtgccttgttattgcagtattaatttaaaatttgttctattagttgtatattaaatcacaaaaagcacagggaaacatattgtactatacactgagccaaaagtcacaaatgatcattttccccttctctccaagagcacaactctggctggtccccattggaaaacaggggctgggggagatggaagtcactacagattatgtattatgggggtaggggttgttaaattctttcatttattatcagaggatgaaggtcaatgactccatcttccagataaccaaagcttaaaaacctttaaaatagaagcataccctcccttccttgagaagtggagcctactgctcacacctctgtcttttcttgaccaactgtcaccaccatgagcatgtcacccccagagtgggcgatatgactggagagctgcccttcacttgtgccctcatgatgcagccatacccgtggtccctgtgcccctaacaggcactgctgaccattcagtttgctaatttacagttgacttagaaagcagatgaccgcatctggtaagaactgcaactaaataaagtcaacagagctctgaagaatgacatcatgaataaagcacattgaaaggcttagagacaactatttgtgttcagaggacattttctaccatgggtgtaggtgctaaaagattgttttatagattaaataagtccagggacaccaagaacacacagttcatatccacatgggctaattttaagaattcattctttctcatgaaagatggacaatactccaccattgtgactactgaaaatcaaacaaacaaaaaacagctaaaccaaaagaagaagagggggtggaggggaggagggagaaataattatttagcaagtatttatagctcagttacaaagtttcatctgagatctggacactaccgggaaaacacattcatctctctctctctctcttttttttctattgcaggccctcactaaaagcaggctaagtgagcgatggacacacacacagatgtagagatatgctgctgtgagtgtaccctgataattcttaaatagtcagcttctccaatactgcattttgcttttttatgctttttgctgccaggaggggaaaaaattcgaatggcaatcatttatagttttaaattggcagcagtctgattcagagcagcattcaaattctattgaaatatcttccacttgtgacttctgatcatatctaacttttccctaagcttgttagaattggtatttattctaattttcttcaaagtgatgtaatataacactgtctttgttttctaaaggctttttaaaagtttactttgtaatatacaaagcaatgttagtaagagcacagtgctcaatcccaagaatatggcaataattactttttaccctttgaactggcaggtcataaggccagaggtgcgagcatggacttgttttcttcctctccttgttcctaagctccttggctgtcccatggccaccccctccaggcctcttttctcacatgttcttctttatacacttttcttcattttctctttttcctcaggaattctgcttcttgcagaatttcctcagatattctgtaaatattctatttgtgatagcaacctctcttaatttagtaacccctttgaacttcaagaacactccattgattccattgttcagattatgggtacgacattgctgtccaaggacttcatgcataatccaacaagtatttattaagcccccaccaggagccaacgttagtgctaatactcaggacacaggtaaacaagatggacatgagctcttccctagcacctgacttcctcagctccttttcatagtttaggtctcagctccaaggggatatctttggagaggtttttctttgtgccatgtaaattaatacccagcccagcagccattccctaaaatattattctgcttgatttccttgtatccctctctgcaattttttttttttttttttttttttttttgcttattggttgattggtggatggattgatttgctttttgtcattaccctagttggaaagtaaacttgaaagtgggaactttgcccatttaattcatctagaggtaacttccatgtataaggtgctgtctagttcccctctagagattctgattccatgagtctggaatggggcccaagaatttgaatgtctaccaaattctctgagggactcccatgctcaggtgaaagtgggaggtgctggagtttatacaaacccagatctctaactcatctgccaatccaaaagtttgatgaccatatctgcttccatcccactgtgggatccttctgctaggaaggaaaagatcttcaactgtgatacactctggaggctcttgggaaatgtcacttggtaataatgaatggcatgggcctataggaacttacaaaagatcacgtcagtcaggctcatgctcaagaaaaaaaaaatggtaaggcacaatttggttaataatgtactataatgacgaaaatatgcatccagaaaaagaaaaagaaacactctttggaaatgttttcttaatttgcactgagcaaactttcaaagtttgacagaaggaatatgagggaatgggagtagagtaaggaggaaagcagaaagcggccaagtaaggcagaggacataaatagaacatgtataagagacagcaagggaaggaaagcaaggacagacagggcaagcagtacagggcgatgccattaaggtatcccataaaaacccgaagagagaagaaaggctgctctttgagttaagccctcaaccaaagtcaccatacagagatattgtagtcccacacctgtaaaacctttactgaaatctgactgaaggcaatgacatctcagaagaaagaatgtcaccggagccagggatgtctagaaggaccctatgcaattcccagggagaaaagttcttggtcaaggtcaacctgttctcgtagctagttctgctagttctctctcgttctgattctcttcaaaaggcaacctgtttgtaactggacttgccaagtattgagtatctgaactccttggtaattatacttcctctgtccaaataaacacgcccccattccagttaattagatacataaacagactacccagagacagggcaagccaaagggaggagggaaagaggcaaattagctgggacttccatccctcattcatattcttcctcctgccactgttaatgcctggtgacctcctcctcattctttgaaagccagctcacttgtcacctgtgtgcgaatctttccccagtcactctcctctaggttgagtccaacgtttcccattccacagcacactcttacacacttattgtcaaatcagataccatcagtggattatccatctggccagctagactgagagcacctcaagggcagaaacactgccattttcagcttggattttcgacacctgatcagaccagacgcttagtaggtgttcaactttcagagaggcagcaaaggaaagctgaaatgtcagagaggaaacacagaggtaatggaatggaaaattaaatgtgctccctgccaggatttcatgtagaatggctcactccattctactgttttcagacggaacatttctcaagcaatcaaccctgatcacctttaccttacccccgggcaaatgcgaggctacagcaccacaggagacccactttatggatttactcaatagccaattctgttcccaagctttgcaagctgattgtttggaattcaaaagacactatcatgagcacactgatacatgtggctcatagggcacttaggaaagcctatttcacctatatatagttgattactttataggcaattccagacttagaacaatttaatttgtagtttaaaaaaaaattcttggccagttaaaccttttttacccttgctaatgtttagaagaagttccaaaagtctcctctcaaacagtgaacctcaccttgtgtgagaccctgccagttcctgcaaggagtagaactggtctgtctttggttttttggttatttcttcaagacccctcagtccttcccaccactcctgatatctcttacacctccgtatttgaaaataagctggcctggtgcagtggctcacaccgtagtcctagctacttaggaggctgaggtgagaggatggcttgagcccaggagtttgaagctgtaaggagctatgattgtgccactgcattcccatgtgggtgacatagcaggactccatctctaaaaaaataaaataagccaaattaaatcttaaaacatataactaccctctttacattgcattatatatatatcatcatatatcatatatatcatataacaatttacaaaatatttattgttgtttacacattttgacttactcatctcatttgactacttaaatagtacaagtaactttttaaatagaggattctttcaaactatgacataatgtggtttcaatatatctgatgtatccaaatgtggaaacccatggcctgtaagaagagcctcacactcttctgttctaggttataataaaacgttcaaaattagaggagaacccctagctgcccagccacctgtgataacagtttctttgggtaaactgtatcatatatatatatataatatacatatatcatacatatatgatatacatatatatatatacacacatatgcacatacacacacatactttaaagatacaggcttgctttatgttatatataggtaattcagagtcaataaaatagaatattggtaaaaactcccattagagaaatgttgaacattccagactcttgggtggaaacctagttccctattaagacattgctcctactgaaaatttgaccgaactgagtttctatcattttcttctggaaagcatgcagcaagctcaaatacaaggaccacctgcgctaacagtgctgtactgccgatccaccatgatcccccacgaaagggcagtcacagttacaatctgtgttgtcagccataaacaggccccctccccatctaggaacactgatataaaattctaatgtgcattttcttgtttcttcctacaatcatcaactcatttatgaatctctgtaataagtgtcgggaagtcaagatggtttgaaagacaatacctttcctccaagtgtttgccctctagtaagtcaaaatgggcacacacatagaaataactgtcataggcaataaatgacacatattgtataaatggaataggcgaatgagtcaggaacttagagaagatatcacaggttgaggtaattgaagacgacatgataaagaagatagggtgtaggggcagggtcatgaaggagttgcaggaattgaactattagggaaaaggagtattctcaatttgtccctctacccctctggccaaatatgtaacatataaatacaccaaacaccttcgagatcaggcaccatcccttggtgccgtagtaacaacaagctgggtcaccttccagtgcacgtttcacccaaagaaactgttatcacaggtggctgggcagctaggggttctcctctaattttgaacgttttattataacctagaacagaagagtgtgaggctcttcttacaggccatgggtttccacatttgggtacatcagatatattgaaaccacattatgtcacagtttgaaagaatcctctatttaaaaagttacttgtactattttagtagtcaaatgagatgagtaagtcaaaatgtgtaaacaaaaataaatattttgtaaattgttaatcagtgaagaaacttctaaaccacataaatataaaggctaagaaagattaacgcttaaatggttctttctttgaattagagatcgtctgctttggttcaggatacaggagaaatcaaacaccctaagttcagtaatgggaacgtggtataccatctctcttaaactgtggaactaaagatatcatgacactcaaataacaaaaagctcacattcatgtcctttagactttcctgctgccccctaggaaaaacattaaaacttcctgtttcaaaatattcctttttattttcctgaaacaaatgtgtttattattgtaaacaatgactcatttggcatttttacctaatgatatagacaaactgaaagatttactagttaggtaaacttgggtaatactccctaagccttgtttcctcatctgtaaaacagagacaataaatccccctcctgggattggtaaggactgagcgagagaatggatataagccctccagcattgggtcaccgtcatgatcattagcttgctttattactccaggaaaggcctcgtggggtctgatatttgaaaacctagaacagcatcggtcagaggggcaaatggcacagtgttttagcagcgtggcttctagagccagaccgctggattcaaatcccaaatctatcacttccttataggtaaccttaggcaaggtgtatttaacctgttagcccacctgtacctcattaccttatctgtcacacggggataataagaacacccagctgcaggggtggctgtaagggctaaatggcttatgatacctaaagtgtccagaacagtgcttggtgcagagtaagcctctatctgtcagccattcttgctgttgacactgctctccagctttaaagatggtcaaactcaaactcaagagtctgggaagagctggaaaaaatgcttagacacgagagctaagtgagatgcagaaactagctattcttttctaactaattctggaggggtgttgacttttcaaaaaataaatttagtcatttagaacaaagctgtccagatggagttaagtgaaaaagacctgcgtggtagaagtagtgtgctgagactgagccatgcagtgtgtctctattaaagcctagccatgctgcaaatattttttaaaaattttcatgtccactttctcaactagatcatataggtatcagggattgggactatatattggtaccatttactttcatacttccagtatgtagcacagtgcctgtcataaggcaggcatttaatcaatatttattaatgagtaaatgatcaaatgagtgcataaatgaacaatctgaagatacaggtagctatttccccaagtgcaagaagacctttaaatactaataagagtagaatttgacccttaggtaaccaggttggagacgatagcaaatgagaagatagatgagcagaagtgatgttactatacctggaaaatcaactttactgttcctatgggtccattttactgaacagaggttttattatgaatcaccttgtttgcttggcaattctagttagtccagccaaagcaaatgtatttcatggggcctttggcaagactgctttccttttctttgtatgtgtgtacaagatgattcataacacatacccatgtaattgaagtatttaatgtttgtgcctagctaaaatgagatcaggtcatcagcccattcttatacaaagtcttagcaataaatctcataaactgttttttggtagaatcacagactctgagacttgcaagaattcttacagggtgcctatctatcctcccactctatgaaggaatcccctaaatggcactacacacaagggtcatcaacatctacttaacacttcccacaaggacttcacctcactgcaccaggctgccaggtccactgcagaggagctccgatttttagaaaagtcttttgacaatgagttaaaatattctttctgtaacttctacttggtcctagttttaacttccagacctctgaaataaaattccttttccaggtaacaattcttaaaatgttttaagagaattgctatgtcatttcttctctggtgacactcccccaattccttcatctgttctggatccttcaaaactccagttaccttcctacaggtgcttactacactgactaaattcctcttaaaatgtgatggccagaattggccttaagatgcaccgtggactgatctgtttccaaagaaagcaaaacaatttgttctccaactctggattctacacctttgattaacgtgcctgcaactgcatgtccctttttggagaaccacgtgggcatgatgtaatctaccccacagcatttctggttcatagaaacccttaagtcttttgttttccttgaacatgcactgttatcaagaaggtcttactcatctttgtggagttgtgattcgcaaatgtgtgtacgtgtgtgtacgtgtgtgtacgtgtgtgtgttttatctaaacaatgagcatatctagtctcttaaaatgctgttcttgcttgttttggcataacatttgactctgttgatggctatttagatctggaacctcctacttaacctattagctattcttcccacatattttgccacttacaagcaatttttaaaatatcttctacaagtccaatattactattttgctcaaaaaatatagaccaagtacaaatttctctggcactccttgagattcttgctagattgacgtcaatcttgtcttaatcaccaaacttcaggtgtaactgttcagttattgatgaatctcctaactgttctagcaccctgcccacacttcttggtcaacagaatattgtgtccaattatcaaaggccttctggacatccatatactacatactttctagagcattttctttatttaactagcaaccttatcacgaaatgtaaactgagttaatttgtttaatttacctggtgttgtatgaatatgaatgcccccccaaccccggcctttttttttttttttttttttttttttacttagaaacccattctacatggctgggtgtggtggctcacacctgtaatcccagcactttgggaggccaaggcgggcaaactgcttgagcccaggagttcaagaccaacctgggcaacatggcaaaactctgtctctacaaaaaaatataaaaattggctgggcatggtggcacacgcctgtagttccagctactcaggaggctgagctgggaggattgcttgagcccaggaagtcatggcctcagtgagtcatcatcgtaacactgcactccagcctgggcgatacaatgagatcctgtctttaaaaaaaaaaaaaaaaaaacccattctgcaattttgctgagcatctgtcatcaatctgtcatcaaacattaaaatagttaaccaatataaattcatgtctaatataaaaccactcatgtataaaatatttccaatcttctgaatgtggttagaaaatgaaatttaaagttctactgtttaaaactgacatgttcctttcttctcaaatatacatacactatgtcctggggaaggataataacatttcattttcaatcaattagaataacttatttggaatttaatttagaaaattagaacaaaatcttaaaatcatagttctctctgaagctgagatggcctttcaggaagaccaaaacaaaacgaaatgacagttctcaaatttaacagttatttctgtcctttctacttgccttattttatagatgagaagactaaggctaagtaaatattagcaaataatataatgaaagctactcttatcctgcaaattaaaagccctatattatttatttttgttttaaatggatacattgaattgtacacatttactatttacaattggatgttttgatacatatatacattgtataatgatccaatcagtgtagttagtatacccaaaagccttatattcttaagaaaaaaataattctatcactaaaggaaaaaaccttactttatcaatttttttttttttttttgagacggagtctcgctctgttgcccaggctgaagtgcaatggtgcaatggctcactgcaacctccacctcctgcattcaagtgattctcctgccttagcctcctgagtagctgggactacaggcacgtgccaccacacccagctagttttttgcatttttagtagagacagggtttcaccatgttagccagggtggtctcgatctcccaaccttgtgatccactcacctcagcctcccaaagtgctgtgattacaggcgtaagccaccgctcctggctactttaatttttaaaaaccacacttgatataaatatcacactttaactatttaaagaaagaaaattcccctaggctaatcccacatagccagcaggtatgcttccctgcaggttctgagccagtctggcgccagcaagaatttggagtcttttcccactatagaaaaaaaacaagacaacatcacctctgagagagtcaacagaggagtgtatacactgccaaacttaaggcagaagtttctcattataaaacatggaaatacagtgcattagcgaagtctttattatatatgttattacacctacacacaaataatattcgtaagtttgttgacactgaaaagaaagtctgaaatgctaataatggtggtaatgagataaagaaacagaagggcagtaaggctagaagagtttctgcaggttgtaatcaaacttcactttcttttatataccacttcttttctggaccactgcaaaatcaaagggcatatggtttccatctctgaaaagaaatgtatgttcctatttgcacaaaaccagggtatctgttatttggagctagaagaaaaatgatacaattcagaaatggtatccttagattatacataattcatttctaggacatctacttgtgaaacatcctggggttgtttaactagatggctcctatggttcctactagtataaggtgatgtgattaaaacatctccttagaacactagagctctgcaaaacacagttctagcatgtattggggcataaagagcacaggccagctcctggagatacaagctgtactcacctcccacaaaagtagtccttgggagttggggacaagcaggggatccttgcggcaaaaggtatctgacggtgaggatcactgttgccaacagccctgtgccaatactctagccactagcctctgtgcatgaatgctaagaaaactgtgccagccagcattgacacggggatccatggtggattctttcacagatcaccctcttgcatggtatactccaccatcttctcatggtcccattctcaaagattacagactgcgctcatatatgggctacatgctttgagttacagtgaacagtatcactgtacacccagttgtccaggatagaaatttgggtgtcatccttgacttccctctccccatcccaacatgtgaaaaatcagtaagtaccattgactctgcctcctcagttatctccctaatccatccatttctttctaactattctatccctctgatggtgattacatcagaccactatcatctagagtctgaattagtttaatagccaaatggccttcttgcctccagtctcaacctctctaattcattctccatagtgtggtcaatcgtctttatattaaatataaggtaagtctgacaggactatctccttgcttcaaagtcttccagataagggccaaaggacacagccggacaggcaggtgttcatgacttctccccgactgacccgcccacctctctgctcctctgactaacctctcttttaaccccttgttcctgtcttgtcatttgcagtgccccggactggccctgccatctttcatttccgggctttgtccctgcagctacctttgccttcaacatgccttacaggtccacaatccagatcctcagacaccaccacaggtttcagtgctctgtttcatgaaaatggtaacttacacttattgtgcagggttccattcaaaccatttttatgcattctgccatttaaccctcacatcaaccctccgaggtaggtattatcatggtctcttttcatagattaagaaactggcaccatttagatagcatttggtgtagaaaccaagtgaatgatcttcaagtctggatcatatgcatcttctatgtgctcccagaactcccagtgtttattataaaagttagaattatgtgttttcataatgatctgttttcccaattttttgcaccacagactgtaggttcttaagggaaaagacatgtctgattttttatggttccctagattaagttcaataagtgtttgctgagttaataaatgtggactgggtacagtagctcatggctgtaatcccagcactttgtgaagccaaaggtggaggattacttgaggccagggattcaagaccagcctgggaaacataatgagacctgtctctgcaaaaagtagaaacaattagttgggcatggtgcacatctgtagtcctagctacttgagaagttgaggtgggaggatcacttgagcccagtagttcaaggttacagtgagctaggatcactgcactccagcctggatgacagagcaggaccctgtctctaaataaataaatacgtaaaataaaataaaataaaataaatgatgacaacactgtgcaatatgatgcaagggttaggtacacatcccaggaccaaagtgcactcaaatcttagctcttccaattactgtgtgacctggggtaacttatttaacttctctgcttagaataggaatggtgataatacatacttcatataaaaattaaataagtaaatatccatagagtgcttatttaagctcctggcaaatacaattatataagtgcttgcttctatttttaaacagggtgtcactctgtcgcccaggctgcccagtggcaaaatcacagctcactgcagccttgaactcctgggctcaggcactcctcccacctcagcctcccaattagctgggaccacaggtgtgtgccaccacacctggcttatttatttatttatttgtagagatgggggtctcactatgttgcccagctggtttcaaactcctgggctcaggcagttctcctgccttggcctcccaaaagtgttggaattacatgtatgagccgccatgcctgaccagtgcttgcttttattagcattagtgttaatgaagaaaccaaaagcacttgtaagactaaatgagtatcattaacgcaatttcacaggcaagaggaactgatcaagataaagtgacaattgtcaaatatgtgctggtcctagaattaaatatcatcaccccaaaatttgttacaaagcatcaaatatctagcttaaggattcctttaaaaaatcttatagaagacttttaacaataacaaaaaccaacaatggcagatgaatgagttggctccttgcaaaccctgaagaggaaacaatccagaagtatcagtcagagcccacttacttatacaaacaataaacttttatgcataaggaccaaatttataataaagttacaaggaaatgtttcctcagattttgagaatgtttaggaccaaagaaatgccattttatgaggaaacttttctgaacaatttagtcattgacattgaaaaaaaactgcatcctcagactttgacaggggattaagttgtatattcttcaaagtgaagctgatgcctctttaaaacaataattgtgtttaagaaaagatataatcaaaggagccaacattgtgccaggattttgtagtgtaattaagtattgcatcccttgtcagggacacagtcttttgctcaaagattactggaatagaaaccccatttcctgaaaacagtggccggtttttaccaaagaagatacagaaacacagaaaagttttattcactgtagaccttcttctgagcaagccaaagccttgatcctcatgtctacaacatattgaaaggctcactggaatttccttgtgaaacagttaccagaccttttacctcaagtggtaaccagtccttcagttttcaacagttatccaggctttggcaatgaaaataataagtattcactgagggatcctttctttctagatcacagatcaaaaatgaattcccgaaactccatttcccatttttgtgatacatattaaatcctacttaaaacacagcataatcatgaaaatttgtatttacttaagaggtttacaaggacaaccgacggccccttatgacaattaaggtttgctttactcattattaaaaacattttgaaacaaaaaaacccattacaactaaaaatctggacagtccctggattaggctgtggagtttgtcctttggaggaaaagaaaagtgaatgaaacccccatgagagtctaggaaattctcagtggttcctgtcagtctccaagcttctatgtctatactttcaggtcatttaatgttacaacttcatgttttgagattaaaatcgacaccttctattcaatgttataccagaaaaactaaaataaataaataaacaaaatagacatctacaagtcaaagattccctcttctatggtaactgcttctacctgcacacccctctcaatcaaactcccgtgtgtggctacacaaacacatatcctccattcatacggtaacacaggtgaggctcctgacaaatgtgatttcactcctgaccaaaattgttagcttcaaagcacctgaggcagagtggtctgctcataagtccttccctggaccccagctctggccagacttgaatgatataagggttggcatatgattccagtctggagcagcagagtccattcccagaaaatttgcaaaagaaagaaagagagaccttgatatacacacttaggagctactggctgccatgttcggtacaacataagcagaagaagcaggacagaaaaaaaaaagtttgtaggggaagaataaaattagcacatggagagaaactcagatgagaagtgaagagaaagaatttcctgaataacacagggctttccaacacctagttccaggatgttccttaggcatggtaatctccacacccttgggttgtatgagacactagtgttcctctcctttttcacttaagctgacgtgagttggttcttgtttttgcaatcagaagtatagttaatacattgaatggacttctacatttaagtatagggcaagaaattgaaacacacagttccttccagataagtcataaccaccactatcggatcaatcatttgctatagttctagagtcccaaacaaaagaaattcagtcactggtcaaaagccaaaaggtttccagggtttgaaacaaacctataacgtatggttatgcaagctgaattttaatcatgcaaatgaatgagcagaaatcattttccttacattgcctttagctccataagttataggtttgaaaagatgttttaaaagaaatgcacttaagtagattagttttcattttgataaaataaaaagtattagtgcaaattataaacttcatcagtctgcttattcatagcactcttaaaaattgtcttctgaaaaaatttatctgctaaagtacttacaagtaagcacattttttctttatgtaggcaaataagggtagacttgggagttcttttcagaagtagaagataatcataacagtcctatgtttgaatttcaagttcaagatcacatttggcatggatttcaaagtcttccaggggtgctgttttgttcacaaggaggtttttcttgtttgagctctcttgcataagactcttggaggagagcaaagaagaaaaaaaaagattccctacatgttgagacatggaagaattagattgcaggaaatgaaagccacccaataagcagtgcttcagtccctgtaagcattccgtcaaggcaatttcaatcctccccttaaaagatgaggtctgagagggggaggaccaagtactgaagagaaagtgagcttccgccttggtcttcatgctgcttaaaagtcaatcaagcctggggtggggacagggctgagccacaagtgcaacgcctgtggagggtctggcctgcagaaaatctaactcctgtcttcaccttcacatttaaaactccatttcttcttttgttcctgtcctcttttgccctccacacagctatgcctcatctcctgctctcaggccaatactggaatcctgagtagggggtagtagtgtactattcttagacatccaagaaacttcccaggcttggtaagtgaaagtttctctttgtgaccaccttccaacaaacctcttttttcaactgtgatttcttctctccaatggtattaaaacacatttaatgaactgggttcttacaaggcaaagcagcagaagaaggacttgccagtcatgaaagtgtgttggtctagacttttccaagctggaggtgcagtgggtctattctgcactggtataagtttcaacaaggacagtcttgagctagggagaggggttgcgtgaaacgccacacctgctgggtgttggcagagactcgctgatggattttactggttaaaatactaccctatgctaataacatcacttttctaaagagatctaagtgcttcacaagttcatttgcccaaacatggcattctataaagaaagtaagtagcccaattatcctctccggtaaatcaaaagtcagtgcagctttggggctattcctggaacccatcaagctggctcctttctcaggccttttgcatctgctgttgccagctctacctggatgggctctcccaggtggccagtgggctcagtctaccctgcatctgggtttctgtttaagaagtccatgaccacccagtctaaagcagcctccctacctgcatcctaccacccttatctctctccccactttcttaccagaggtcttaacaattcttgacattctgttctaatttatttgttgatggatcacctgcactagaatgtaagcttatgaagccagggactttgtcttgctcatcactgtgttcccagggcctaaacagggcctggcccattgcagacctcagcaaatgttatatgaatgaatgaataagaatggtggccaaatatctcaatttctagcttaacatgtgctcactgccctgtcagctttaatttactcttctatgcttcctgcccttggtttgctgacaggcactgacagacagctagatagttctggtcttttcaaatgtcttgtgctgcagcagaaatgtttcatttagatgtgtgtgaattataaaaacctgatgttgatggaaagcataaggagaaagatttactgcactgtttgtgggagtggagattgatgcaatctgttgaaggacaatttagagatagcttaacaaaattttaaacatgcattttcctgacctactaattcttgaataaatacaattcacaaaaatagacccaggaatgcttggagatgtatataaaacgaccctcattgcagggatattttaatggcaaaaaattagaaatagctcataaaatatcatcaatcagtatgtaatacaatgtagccttatatagccactgaagagaattagacatatgtttatacagacatgaaaaaatattcgtatgttgtcaagcataaaaagatggggaactattatgactattaagaacacatttctgtacaaaaatcattactctgtgagtactatacacacatacaaccccgaccccgccacagtcttttattatttgcagggaaagtgtctgcaagccagcatattaacctgttaacagtggttctaaaatctctaaagagagaactaagggggacttccactttctaaatcatatattctacaatgtgtacattttagaaacaagcaaattacatccacaataacaaaaacaattaagattttaaacttcatttaaattctagtgccaaagcacttcaatatttataaaactatttaaattctgagctctgggcccaatgttcacattaacaaatctggtaactcctccaggctttatttattcctgatccataaaatgaggctaaaagtgcttttccttctactgcttagggttattggatggctaaataaaatcaatgggaagaacattgaaaagcatttttaaatcactaaattaattccaagtggccattatatacattgtttaagcttcttgttagcattctacctgtatttcattgactcataagaatacactctaggagggatttgtgttacgacttttacagatgaggaaactgaggtgtagagaaaacgaatttctttcttggaaagcagaactagaatcaaacactcagactttatcccacactttattcctcttccatctcccacactactcagagcaggtaggtataaaggccctgtaaactataaatctgtcaaacatgaaagggactaggattatagtcaggagcagtaataagcaccttttgaactagaaaagaaaactgcagtgaaaaaattgtatgtttcttatcctgcactgtgttggtccatcattaccaaaaccaattaatctttttaattacgctcaaacctttttatgcactccaaattagaaatcagaacagtttaggaaaacctctccagaatatatattcaaggttttataaaaagaaaagaaaatgcaggctttgataaactcaacatgtatttacttgaggaaaaatgagatttttagaaaaaagtaggggcaagtgaattcaccaagctgtgaaaagtatactttatccactgggaagtttctgtgagtttgcttgttacaggaatactagcaatatatacaaacaaggtacacaaacacagcgacaggacacgttccaccaattccacacagccacaatcctaagtcattactcttagcaaagcctcatataagagggctcatttctaaataaggtgggtaggctccaattccctcagcttcaagtaagcaaattttggtctgatattacaaaatacaatcaatttcccggtaccacaggtccagtaagaaaataaataaattcaagattgtaagtttactgatcataaaatatgtcaaaaagactttccagacaaattctcatgttaaaaaaagccattttaaagatgtttcagctacataaagggatagtagagaactacgaatcacattgctccaattaaggttagaaatgctctaatttgtgtttccttgaaagttccagtcttattagagagtctcaaaacacaatattgcagaactgcatacaattttttattttcgtaatgctatagtgataggctcctgtgtccaattcagattggtgacatgctgcttgaaactagtaaaccttgtcatcaggctaattttacaagtcccttctcccctctcatttatagctacttatatttctctgcttttctttatgactttccacatgaagcattctctaaaatatttttgggcaaaacttcattccatgcttcctcaagagtgcagtaatattggaagcacagtttgcaggtcactgtaagaggtcagtgagaagtctcctggtgttaatagcttgagtaatattgttttctcctttagatcacaccattaaattgctttcattacccacaaaggggttatttgtgtcagagcaaataagatctcattcaaattcaaactggataatttcaacctaataaaatagtttatttctaataactagaagaacaagacaatgacaaaaaattgtaaagtctttttaagacatacaagcagaagagaagaaatgtattttttaaataggtcctacaagagttttaatgtgctatctggaaattttggagggggctaccctgtagtttattctcctagaaatgggagggtatgaggtatttcccaaaggttttacaagaaattatatcttatgttccctgggaatatcagagattccactttggacttttctatttcactgagtttcctccatttctgacccaccatcttctttgttcttttagtcatccaaatttaaaacactgaagctggattcatccttttgctactcccctcgggctcaatgtgtcactacctcctgaagtttctatcattttaatgtattttaaatccattcttccttttgttttttcactgctttcatagtaactcttgcttctgaaatgtttgtgcctggggtaagggccttcagaatacctcagttgtttcttcaaaacagggatgtcagggctgtactagtggatcactggattagaaaccagcatgtgtgtgtgggagtggagggagagctcatgcatacgctgggcacgttgccctggtgatgttgacacaaagcaccacaccacctcctgaaaccacatttctatgaagaattgtctgggccagccctgttctggcaaacttccaaacccaagtgcctggagccagttggagtccatcaacaagcccaggaagcaagtccagctcctatcagggaatctgaagacccccctgtcctcagctgtgcctgctgattgggacctgggtgtctgttttatatcctagctccactacttggggtctccagggtagcctgaatggtactctagctctgctgatgccagggtcctcctcaactcctgtcagtctttcagggacttaccatcactccagaggatgcatctacccttcctgattcccaacctggcctacagccatggccaggcctcattaactgctgccaggtttccctgacgctgacttctaactacagggcccaaagtggatttaagcacctgattgctaaaggaagtagcatctgtggtccccgaatctcctgcctaggtcccaccccttccttgttggctcctgggcactattctagggcccaggtttttgtgggaactgcagttttgccctgtcatctaggagctgccacttaacactggtctgtctgcagcactcccttaacaccacgttgaacagcaggcatgggcctttgtgagtctgcccagatctagccagttccttccctctactgaactgtccaacaagcctggccacagcctgccagtcacctaagccttccacccactgcagagctcagatagtggctgttggaagggacaagtgttgtccatctggatgtggccagccaccatcttatatagcttccttcaccttaaatgcaggtcccgccaagaaagccttcaacttaagaaccccagaatgcccctgctgggccctgaggctggccactttccctcccaaataacagaagtacagaatccagtggtcggttcttagcactgtccctgtggaccacattcacagagcctccctgagccaggaggccctgtgtgatcccttgtcatgcagaggccagcaaagaagaattgagaagccaaaatattctccaggctcacccaaaagctaccctccctgagctgcaagttgccttagaccagagacacaatatttcctttccaagttggaacaaatgaagaagggtccagttaacaccccataaatgagcattaacctcttgtaagacaatctctatgtccttctgagagtccactccatgcaactgagaagacacagttttagtttctaagctgcatgcaaactcaggtagagcctccagaacaacctgggtctgctgtgtcacctcagcatcttcactagttctcccagtcccagcagaaggcacagagctccactgtgagacagcattcgttaagtttgccacatgtcaggagtcacagagggatgtctaagcagtcacgcagatcctaggaactctgctacatgttttgcaacatatggaccctcagaagtaaactcagtacgtctctggagcatctttcaacagaacagtacaatgtctagagatccctcaatagaacatcaggcctaactgtaagatgccctagaaccaaggagcttggaacatatcctggggaggaaaacactgaccttccaagggaagagttatttaacttgtataaaaagttctggctgggcacagtggctcacgcctataatcctagcactttgggaggctgaggcgggcggatcacgaggtcaagagatccagaccatcctggccaacatggtaaaactccgtctctactaaaaatacaaaaattagccgggcgtggtggtgggcacctgtagtcccagctactcgggaggctgaggcaggagaatcgcttgaacctgggaggcagaggttgcagtaagccgagattgcgccactgcactctagcctggtgacagagtgagactcatctcaaaaaaaaaaaaaaaaaaaaagaaagaaagaaaagtcctgaactttggtctggggcctatttataggattctgaggctgtaaactgagtcatgaggaagactgttctggatataacacttttatcataagccttgtcatgggcccagataggcagactcagcacagatagagagcaggaacactgtctccctgactcattggtgagtccagttctgaaagcccaataatgtagaaactctaaggggagtccctgggatccaccagttgctaagataactggaagaaggtctctgccacgtagcaccagtgtccctcctgctagtgctcgagcctggtgataaggagtctcaccctggggaaagataccagccctagaaaagacaaagaggcctcaacgaaaatacttctcaaaaccaaggaggctgatcagaggcaaggtacacagctaaccctctaaccctcatgatcccaggagagctaatttaatgacatctaagtctcctgaagctccctggatcatagtagggttggtcctaggctagctaaggccaagcattccagggccggcctctcggatgggcggccctgtgtgatcacgcagatctgtgctcagaagggcctgcacttggttgacagctctgctgtcacgttcttgaaatcttcaacaattttctctttgaacttgtattttgtaagggagccagaggagcatgaggatgagcagaggagacaggcggaagaagggagagagctttatattttagtaccttcagtggcacatctcccctgccttttgaacaaaagacccacaaattatgtagcaggctgtcagcagtcctgatggaaccccctcccatgtaaccagccaccgcacaaaggagggagttaaagactaacaatcaagctgggagcactggctcacgcctgtaccccagcactttgggaggctgacgtgggagaatcgcttgagaccaggagactgagaccagcctgggcaacatggtgaaactctgtctctacaaaaaaaaaaaaaaaaaaaaaaaagaaaaagaaaaagaaaaaaaatagctggacatggtggtgtgcgcctgtactcccatctactcaggaggctgaggtgggaggatcgcttgaacctggtaggggcaaaggttgcagtgagccgagattgcactactgcactccagcctcggtgacagagccagatgttgccttgaaagggaaaaaagaaacaaaactaacaatcaccagggactctagagatcccccaacctctagtcccaaccctaaccaaagaaatctttcatgcctttgggtcactcacagaagtcaattccagacccaggctaactctgtaccacagatccccccggctcaggccaagataaccactggttagaaccaggacacaggaggcctgcattccaggaagcaattcatggctgatgcgcagagttagtaagaggggtcccaggtgacatagaacgagttcttgtagttacgatcagcacaaggacccaggctgagccagtctgggtggaccagcccagaaccactgtcacccaggctgcctctcccacccgctgtgggctggtgagatggtggctcccagcactgggaggagggtatgccctggggcagggggagcctttaccacaacttgatatatgacctggggcaggtttccatctctctgggcctccatttcctcagatttaaaataatggcagcatcaccttctaagaggattaaacagagtatgtataaatgcctggcacaaagtggtggtcaatttttaaaaatcccttttttctcaatagagttgttattagaaatgagctgttattagaaatgagacaattatccataaaaatgcctgacaattcaaagtgcttcataaatgtcgattctcttccacgttctccttcccagtccctcttacctttgttcttgtgaccagaccctccactaactgccagttcccaccccaggtcccacccaataagcatgtttgttggctcattatataaacatttactgagtgcctactgtgtgccaggcactgtacaagtgaaaacacacacacacagtcctgtccctgagaagctcacagtcgggtaagagaggcacttagcaaataaattttaatagagtgggttacttttatgagttaattcttttaatatataaatagtatactacagaagcactggataatcaactctgccttggggagtcagagaaaatatcatagagaaggcagactcttgagtcggatcttgaaagatggacaggagtttgccatgctacagaaaacttcgaggagcctcaggcagtcactgcacatgtgcaggacagtgagaagcttggcatgacagaagcaggggctgtgtgaggggagtgcatagaaaaggaggctgggaacaggactgggaaagcagccttgtaatcccaactaatttgggctttatccagtttggaagagtagacaagaaaagatcagagctaactgtgctttttaggaaaatgcctcagctggtggtgggggaaggcctggagcaagaaaatgctggaggagggaatccagacggagatgaccgttagcaacacacagcaagtcttggactaaaggcgtgtagtaggatctgagacaccactgaagtagatttggtgactaattttttttttttttttttgagttggagtctcgctctgtcaccagggtggaatgcagtggtgcaatcccagctcactgcaacttctgcctcctgggcccaagcgattttcctgcctcagcctcccgggcccaagcgattttcctgcctcagcctcccgagtagttgggactacaggtgtgcaccaccacgcctggctaatttttgtatttttagtagatggggtttcaccatgttggccaggatggtctcgatctcttgacctcgtgatctgccctcctcggcctcccaaagtgctgggattacaggcatgagccactatacccagccaatttggtgaataattttagatttggtgattaattggttataggtggtgagagagatggtactaccaagacttccagcttggaaggcaaggcagatgaaacccattgcagagatcctatttaacaggtagagcaggtctgcagggcagctgaagcttgtggtgcctccaggacatccaggtgtgcacgtgacagcagctggaaacagagattgggatctcctgaaaggctgaggatggagaggctgctttgagagacgttcacatggaggggttggttcaagctgcaggagtaaaatcacctggaaagaacttggggacccaaaggagaaggaacaaagggcatttcagagatggtcagaaatgggagagactggacaagcagcagagaaggaacagaaggaggaagacactatcaaagggagcatgaagcaagcaggcacataacaggaaggtcaaggtagatcactaaatctggcaactaggaagacaatggtggcttaatcaaacacagtagtattagagtagtataggaagaagctagcttactacggtttgaagtattaagaaaagaaaataaacaagagtaaaaaaatcagcggggcacactggctcgtgcctataatcccagtactttgggagactgaggcagaaggatcgcttgagctcaggagtttgagaccagcctgggcaacatagggagaccccatctctaaataagaaaagaaaagaaaaaaaaaaaaaaaccaagaacaaaagtctggtagtgaagggagggagagacagagcagtagttagaaggggagttaaggtcagggcttacatttttgaacgatcaagctcataggaaagcaagaataaggacaagagtaggctcgtggatcccccagctcctggctggaaggaatgagccctagtgaaaagctaggatggtaaggatgtgacctgtgcaggtggactcagatatgaaggaagggaaattaagggagttcatgccagatgaagaaagcaaagattgggaggtcagctggggaatgagacagggcaaagctcaaagaccttggggaaagtggcaaggcttgattaagtgttgctcttgcctgaccctgcctctgaattttagttcccatgatggatccctcttcctgcttcttctctctctgcctcctgccagatttccataagctcacgccccactggcctgcttctcttctcctcccctgcagccccgatgggccttctagctgctgctgacaaatgtgccttcctacaacatctaccatgatggaccagctctgcctctctctggcatctgagctacctcccatccccagatcctggggactctcctattgtctcctaagtgatctctccctctccaacccacctctcatctttctaaaaccctgctttgcattttgcaactcccaccttctcaacactcaagatcctacatgggctctttcttgccagatgaggcagttcagctgtgggctgaagactggccacaggcctatttaattgggcctgcatggtcttttaacaaaaaatgaaactgattgtctttacacagggcatgatctgtctagttagccacaggcaccacccctccctatttccttatatccactccagacccaattcatatacccatgttatctgcctagtctctcttagatatctgacaatgaagtccacaggaccctaggatccaaggccttccagtctctggctcccttatgtctctcaaaccagattgtcattactattcaaactccttattccagaaatcagtctgcccagtctcccctttctacccacggccctggcatggcctccctagacatatgtatacctgtctcccaccctgcctttcctcctatctgcaatgccttcccctttcctctccacctgttacactgaaatcaggcttatattctaccttctcaaagaggcctccatggaccatccaagcccacagcattttttcagcctaggccccctcattcagcccttatgtatatttctttgtgccttcagttatcttttttgagtacatttctcatttcctcaaataagcctggaaatagggttctctattagtcacacacaggaaaagccacacagaacaggtctgcctccatgtcatctatctctcatgtgacacaaccgttgactcataaatcttggtcatttcctgacaaccataaaccactagagcaagcacagattcacagtgccttcagggtagaggccatgtctcatagttagtacactgcctaaaacctagcaaggtagtcaataaatgtttatgatgagaaaatataaaatgcagaaaaaaacataaagaataaaataggttcaccactgagcagtaaattctctgacttgatgaaaacaacgcctgttgtgattcactgtcactcaggcatccaaggacaggtatattttgccaaggcaagaagttgggacccactagaagaagcaggaactagaaggtccagagctgcagccacaatgctgcagtaatttacaaagtgaacttggtcaaatctctcaacagtattgattctttgaggtaatgggatctttccgccacatactctgcagagttaacaacaatctggtggtgagggagagcaggtggctgggctggagggacaactgtcagtgcaggagggaagatgactcctgccaataactcttggttcccttaccccttatcccagcttctgtgttgatccctaggtccacgacagggcataattccagcaaacaccctttactcccagttcccacccaacatgtttgccatagatacacaatgaacatagtagtccccagctgaaattttcgaagtacaatgttaacatggaatttgataaaattctaccattggccagcacacaccatactattccagatgttgaattagcccagtgatatgacgcctgagtcacagacgatgaccacatttctcctttggcagaaatcaaagccctaagagagggtgttcctgagttctggaacatgaaaccttccaggaggctgggtgttggcaggagggttggatgtagttgggtactggaacctctccctataccttcttttcaaagaggtcaaatttgagaaatgtttctccaccttgcactcagaaaatattcaataattgtttgtttcagcttaagaggaaggtttcagttttctaaaaagaagaaaagccagaagttctgaagaagggggcatgagaggggaataaaagaagctgagtgcatttggtgtaatggaactgaaggggtctggaccagaggaaatggaagaagtaagagggcagggcagtggttacattggaaacaagaacactgatttgggaaaagcacttctaaactgactgccaagggaggtgtctgaaacagtggcgtggggggaaaagaaagaaccaagagccagacttgaggtaacaaatggctacatatggcagagacagaagaaagaagacagactcctggaaatgtggtgttggaagaggtgtcaagatggcatttgaacaagtgggatggagtgccatatgagggattttcttttttaatttgaagctgtcttccttccagcatcagacactgaggtcatctcagtccccacgttccccgtcagaacaggaagggatgtgtcaaacagcagcgtaggggcagcaactgagtggcaactgcatttttgcacccaccgattgacggcctgccctgaaaacaatgcctccctcccataggcctctgtagcaatgccatgaagcacacaggaaaatcatctgtgacaaaggtgctcctgggactagccatttcaagacaaaagtacgaacacccccggactcaatgtactgagtactggtgcctggatggcttgactctgaaaagaatcaccctccttctgatatgactctctgcacagcaacaagagagcccctgtgtgccaacaatctgttcatttcactcagcatttcttaaggcaaagctttaactgttttctttttttctattttaacagatatttgattactaaggcatgcaggcagtaaacattgaaagcaggcttctgtgttgcagaagcaactacaaggccacagaagctgaaaacaaatgtttcagaattcctcacgaacttaggcacatgtactttttttttctctctctctcttttttaatggagtaaggacagttcatcgatgaagcttatgaataataccaaaaggcctgtgttttggtcccaactcttttcagtcacagggcaaactttccaatcctagcaaaggtgataatagcagctgacgaactagctactctcgaaggatttgttagcaagagggggacagtttcttatgaggaccatcctataatagagctctatacacaagatgttggtgctgtatcacaggactcttgtcaagctaatgctttgtggccagggtctcatttataatgttttattcataaatgttgcaaaagtgaaatgaattattaatggaaagatcatctgtcagagacaggaatcattaacagaatttcgtaggggagagggtggtttatagggactagcaatgtaagcacagagcttttcagttctgtggtgaccatgtgttcagactgtcctgggtctccagtaacagagctggtaccatttgccatctgtcaaggcagcctctgcaaagcacacccggtcagcttcctcttggctacttgtccattttataaaatctgccatcatgatggcaccaacagtaggcttctagtccctgtgtccaggttacttggtgatagaactggacataaaagggcattctgcttgaatacagggcatggctctttagaatcaaactaaggtctaagagtagctaatatttacttagtacttactatgtaccaaacattatgctaggtgctttatgtgtattaactcattgaatcctcaacacctcaccatgccaaagatactattatccctttcttacagatgaaaaaactaaggcacagacaggtgagatgaattgctcaaggtcacacaacttggaattgacaaagctaggatttaaatccagttccccccgccgactccaaagcccctattcttaccaatgattttaataagcataaagtttgaagagtatagagctgtcattttccaggagatgttttcatagctgtcactagcatgctgcaaaacatttggatcaagggcgagctaaatgttgaaagagcatgtgactttacagaaatgaactttatagaaaccaagggagatacaagttataaacttcatgacttgggtccaatcgttccagccccctcacttccaagagactattaactgactctgaaaagtagagtatggagccagtctcctggggttggaatctcagctctgctactaaccttgagcaagacattgaaccttttcgggcctcagtttcctcatctggtaataacagaacttccctcaagggttgtcatgaatgctaaatgaaataaaacatataagttactcagaaccatgtataccccacaatgaatattaactattaataattttatcaatacgggtgtgtgggcaagaggctaagtccactcgaatctccttgtcttaaaaacagatctgcatagagttgttatgagggttaagtgaaataaaatcctaaaagcctggaacacgctgacctcatcataagaagcattcaaaaaatgctcatttcttttctccttcccaagataatactatcgcttaaccttcagagacctcggcttctcatattataaaattataagataaaacaagggccgggcatggtggttcatgcctgcaatcccagcactttgggaggccgagatgggcagatcacttgaggccaggagtttcagaccagcctgggcaacatggcgaaactctatctctactaaaaacataagaaaagtagctgggcatggtgccacatgcctataatcccaactattcaggaggctgaggcacaagaatcacttgaacccaggaggcggaggttgcagtgagcggagatcacaccactgaaactccagccttgggcgacagggcgagactgtctcaaaaaaaaaaaaaaaaaaaaacctaaaaaacacgattcttacctatttccctcccttgtctacctgacaggcatgtctcagccagagcccatctaaggccaagatggaagtgaggaaacctgggttctgcttttagctccagcatttgaaaagccacttaccttcccctcagcctcaatttcctcatttattcattgtagtacatctcaacaagtgtgtgccagatagggtgctagctgagagtactagctgttagatatgtagagacagataaataaggtacagtccctgacttcgaagggtgtatactctagtgcaaaataaaggcatgtaaacaattaagtacgttgattgttgtatggacaagactgacaggcagcccaagggaggcagtaatcagatttactccagtagggcaaaggaagattcaaagaagatagacctttgagttaggtcttacaaggtgaatgggagtttcccaggcagaactaggggaaaggtatcccaacatctgcaaaggcttaaagagacaaaatgggggaagcgcaaataattcattatagcttgagtataggatacatctaggggagttgcaggaaaatcggataataataccttaactacttgcttggcaggatttccatgagaccaaagagaacagtgtattaaaactgaaaaagacacagtactgcagaaacatcatgtgtgattattattagtactctggcaaggctctttatggtacttaattttcacccatttcctcctagcatgagaacttgagctatcgtttcgttgcttactgctactttgccttcttcctctctcccctaagagacaaaagaggatgatttagcatcaatctaagtggagaggagggaggaagaagtgagaagaaaaacaaccagctccctgttttaattaccacaagccctaagtcccttaacaacgataatgtttcatattttaaaagagttcagtgctttctggcagaaaaataaaccttgaccctcaagatcatggtttttcaaacgttcttgacgataactcatgataggaaatacattttatatcacaacccagcacacacacaggcacgcaaagaaaggttataaaacaatattgatacctgttaaatgcaacacactctgacattttctcttctttttatgtcattttaaaaagtgttgcttacaatctcatcagtgcatcaaaacttacagtttgaaaaacatcactaaaggacaggagggttcatggaagacttcaaaagaatggtttgcaagtcccttccctctttcttttctcttgtattttaagacactgcaaaataaagcaaagtccagcccattttctgggaaataacaaaacatttctgtgtgcacagttcacatggtgtgttgtttgacaataaattagacgtttccatgtggggtttcttgtgtgtttggttgctgtagctgattaggcttgttgacaagtaagatttcaaaaccctttcttaggcagggccttggtgctctttggaaagcaggatcgtatgtctccgatgtcttttcaatgagaacattcaataagcaacttttttcacataaagggccccatcacacattctaacccagaagtgagcaagcattttgcctcagggctgctgaaacgggaacatgatgccttgatgcctttccaatcatgcacacacagattgaaaactcacatcaccatcatcactaccaccactaccctcaaggaaagagtctgaatccccatgctgttagcttttgtgttcaaccaaaatcccaaagctggaaaggaacacaaaggtcatctggtctactctccttccaaagaggatagccaactaaactttgctggttcacaggtgagctatttttccaccgcaccacagcaagtatttgtactctgtggggccttcctcatggtaatgcacaagctttaaatgtttctatcatcacacttctgagtatgccatttctccctcttagaatgtgtcttcctccagcccatgcaaatcccacctatccttccagattacatcccagcccattaagaagccgtctccacactcaacagcccctgtccatcctttcctcttctgaaataagattaagctcactgaattcatgcaaccatgtacctcttagatactgtttaatagacagttaatatgtacttagagactgactttctaatatgtaaaagaagagggttcgtaagaaactttaggatttaattttttttttttttttttttttttgatacggagtctcactgtcacccaggctggagtgcgggggcgccatcttggctcactgcaacctccacctcctgggttcaaccaattctcctgcctcagcctcctgagtagctggaattacaggtgcctaccatcaaacccagctaatttttgtatttttagtagagacggggtttcaccatgttggccaggatggtctcaaactcctgacctcaagtgatccgcccgcctcggcctcccagagtgctagaattataggcgtgagccaccacacctggatggatttaatcttaaatgaatctttcctacaaaatatgtatcaaggagtaaatggaaatgtttagcattttatcataaagacatttaaatcctccaattattaaaaacatgagtattaagctattcatctccacataatcagaaccagtgattagatgatggttaatgccagcactgttgatttttctaatatactatcatttgggagatgcttgtttcaggcaattgaattcttacatgtagtatgtagggaactgggggctttctccctaggaagatactgtggtaggtgctgctgtcaaggaaagaggctctgtgcttggatccacagaaatgtttggtgctgccccacaagattcatattctctctctcaatctctctctccctctctctctctccactcttccttttcattcccacctttggttactaactgtcataaaggataattgaactttgtaacttgtaaagaacttaaagatggtctatgccacctgatgagggaatctaaccaagaaaagatgagctgatgtgctgcagatcacccttgtagaaaatgaaagaattgggggtaaaacccaaatctttctgttatctagagaaatcaggagctggaagtcttcagccttacaccacctagctcttgagtttcatttccctcgtccctgaacttcctgtcttccaccaggttcctctgtcttaccattaaggaacttctgaggtccttgacaccaaactgtctttcttccattaaccaattccccaatgttgtcttatctcaattgcatgacttctcttatcctacttggaaatttaattgttcattctggtttttctcttagtcaataccacacctgccaaaacctcccagctcctttcttttaaccccttccgtaactgttgcagacaaaattacatacaaaactgaagtttgtgaccatgactgtctcacaaagggtcctgttctctccacctaggattttggaatccttgtctctatcatgctgtatactatattataatatgatgagaaaagaaagttttctttttaagcaggcgggtaatttctcaagacacatagccaagcaaatgattatgcctacaagttaagcagggacagcagcacagttcattgacactatctgtaaataccaaagttcattctttatcaaaaacatcaatatcttctccagctcgaggggaaatgccgattaatgtgaaccctctttttcttgttcttgtccattttcttatcaatgtgtcaacggtgtcaaagcagaagacaggacaaaaagatgagcgtaaaaagtccagataaatcacaagtagccacagagtatggtggtaaatatgtgaactctagaggccagctgcgcagtgagtcttggttaacagctgagtgactggacacactgcttaaactctcagtttctccatctggtaaatgggtataatagtagcacctatctcacagggtttccatgagaattaaataagttaatgtttgtaaaaacacttaggacaatgcttggcacatattaagcactatataaatatttgttaaataaatcctcagtttgaaattattttaacaatcacactctgtgtctgctgacccccaaatcttactagcagtttcaggacctagaggcattgtgagggtttctataccacaccacacatactgtatcctccactatgaactgctacctgataattcattttataattccttctcataaggagtagacagaaatgtactcctgaatctctctcagcaacagtccccattgctgcagccacacacacagtgagaaacggcctctctgccttacaagacaagttctgtgaaaccacaaaagttcttgtctgcccacacattacaaattctacctgtaacccagaattagaactggggaggtggggcaataggccacctacttcagagaaaataaaacaaagggaaaattctacgaaaccacatgtcttcttggtacagggctcacaacctttctctcctccctttttttttttttggttttgtttttgtttcttaagacaggctcttactctgttgttcaggctggagtgccgtggtgtgatcacagctcactcaacctcaacctcccgggttcaagcggttctcccacctcagccacccaagtagctgggactacaggtatgcaccaccatggccagctaattttagtatttttcatagagatggggtttcaccatgttgcccaggctcttcctttctttctcaattttactccaatcaggctcttggctataccaaatgtgatgatctcaagatcagcacaagtccaccactttggtaaggccagcaacacctggtcttacaccacctctcaggggtaccaacactgctaatgcttcctctcctcgattgccttcttctctttcttctagttccccagagtctcctgggttttccatcccttctagggctcctttgctggctgccccttacctcctgacctccttacactggagggcctgccctacggctccatccttggtcctcctctccttcatatccacattcacgttcatggtgagctcacgcagtcctgtgatttaaaataccagtttccccccaggactctcaaatgtacatctccagcccagacctaaatcttgaattcctgagtcaaacatccaactgtccactcaataaaattgccacaccccttggatgtctaataggttcctaaatttagcttgtccaaaaccaaatcttcccccaaaacctcctcctcttcagtcttcctcatcttggttaatgacattccccaccttctcctccacctctcatcttcccctctaccttacccatcagtaaatcctttaaaaaatatctggaatctggccaggtgcagtggctcacacctgtaatcccagtactgtgggaggccgaggcaggcggatggcttcagctcaggagttcgagagtagcctgggcaacatggtgaaaccctgtctctaaaaaaattacaaaaattagccgggcctggtggcacaggcctgtaatcccagctacttgggaggctgaggtagaaggatcacttgaggccaggaggtggaggttgcagtgagctgagattgcaccactgcactatagcctagatgacagagccaggtcctgtctcaaaaaaaaaaaaacaaaaaacaaaaaaacagaatctgaccatcaccttcaactaccatctggccatggtgatctctcccgagtactgaaatactctattaacccatttatgccaggggttgcaaatttcttttgtgaaaaatcagaacttgtcaatgaccttgagcagtaggatataaataactcccacaagcttagcattccaataatggaacactaggcataaataggttaaacaattttcctgtttttgctattgcctcattacagcagtgtcttaaaacagtagccagagagataccattaaaatataagtcagatcatgtcactcccctgtttaaaaccttcccatagcttctcatctcacttgagactggcccagccaacatggagaaaccccatctctactaaaaatacaaaaattagctgggcatggtggtgcgctgcctgtaatcccagcaacttgggacgctgaggcaggagaattgcttgaactcgggaggtggaggttgcagtgagctgagacggcaccactgcactccagcctgggtgacagagtgagtgaggctccggcaaaaaaagaaaaaagaaaaaaaaatgaaaagctgaagtccttataaccacatgaccctacattatctgagtagcccatcccctaccccaccagctccctgacctcatcttctcctactccctctgctcgatccatgcagccatagtggcttcctggctggtcagggctcctgtgcttaccgcttctcccacctggaacacccttccccagacaccagtatggttcactccctgactgccttcacacctctgctcaaaagtcatcttccaggcatccctcacaacacttttttaaagtgcaaacgatacctgcttagcttagcactctccagctcccttccctgctttatttttccttccttccctgattgatttttccacaggagactcatcttatttcacttaatttgtttacccccattagaatacttattttatctttccttattagagtgtaagctccaggtgggtggcgatttatgtccgttcttgttcactgctgcattcttactgcctagtaagtgcctggtacaccacagatgctccgtaaagatttgctgaatgaatgggaatgatggcttgcttgggtcctcttacctacctaagacagtcatcaccgtcttcattagcttcatgggtgtcctccggcggctgatggacccacttgtatgcggagacaagacgttggttttcctcttgacgtacacgtagatccgcaggtacaccacaaccatgatgaggaaggccatgaggttggacactgtccagaaaacaaggtaactcctgctgtaaatgggggccagggaagagcaggcagagatgttgcagaggcaattccagcccagtgtggggaccgcccccataaaaatggcgatggcccagacaagcaaaatgagcagtgtcaccctctttttggtcaggttgctatggacccgcatcctcatgattgacatgtgcctctccacggcgataaccagcaagttggtgagggaagcagtcaagctactgtccagaagcccctgacggagaaaccagcggttgacagtcaaagtttttgaaactgggcctgtgttaaacatcaggaatacataggcaattccagcgaagaaatcggcagcagctaaattagccaacaggtagtagaaggggaaatgaaattttctgtttttgatcactgccgcgatgaccagagaattagaaaaaaaaataaacaggcagaaaaacgtcccaacacacaaaacaatcacaagctttgttcctgtccagtcatcgacagtatcagtgttgctcctattataaaaaaagtccatgtgcttgtcatagtgacactcattcattgtggagaagtgaacatcctagaaagaaatttaaagaagaaacaaatatcatttgtaaaatcagtcactaagccatcaattgctgtttctaagcccgttctggctaactcccatcaagggagttgaagacctgaagtgtcaggtctcagtgcaaatgtcctttggtccaggacatagcccctgacctcctaccacagcatttagcgcacattttaattgtttgtttcccaggctaggccgctcaggttaggagggtgtatctctattttgttcaccattacaaccctaggattcagttgctctgtctgcctcatggtgggtaattattggtaggttggctggctggctgaatgaatgaatgaattctcatggaggcatcaacagggcaaatgtgctgagccctgcaatatccactctgcactggtaacacaatgacaacacattatgttaatgcctcctcctggctcccagttcattagttatttatggatatgttcattaatcaacggcaggttggtaatttcaggtacattcttcccaagataataggagttgaattaccattcacataaccaaacagataccccaagagaccagttttctatgacttctgattccactcctgatcctccttttgccatcttttggtttcaacaaacaactctgatattcacatattaggtatatgatgcagggatggagactttggtcccaatatctcccttccttaccttttgttcacttcttccttatagtctcctaacccaaactgtaccaatgtgaacctgctcactggattttccagcattcctcaacacggcaggtggaggaggatcgggcttccacaggcaagactgagatttggaattggggcagatctccaactcaatgtggatgtgagaacatatctattaagtgagggcatgttcttcagacacttgtctgaaagaagaccccaaactgggatatcaggcagacagggaagacactaatcctctcagtaaaagatctcttgaatcccaaaagcgagggatcttggccaaggaagggctgggcagaagccccacggatgcccatctgtctacacgtggtggggaaaaccaagtgttctgcctcacagtggtctggccacagccatgaacggtcctacggaagaagattgggcttagggtcagggttctagcttcttggaagaatgaccatctgctccctcactgagaatgaggctgcagcttattccctggagaaccagagattcagtcggcagagggactgagcagccctctgggagctgtgacagtaaaagctcagtaaaagcccccagattttaaagttcctgaaaattctgaaatctaataccacaaccagaatcaagaagaccagataactattaagtagtacaaaatagaaatgtatctcagtcttttttttaatttatattttaatggtataatgatacttttacatgaattagatattgctttttggccatagcaaatgggaggtaaatatcattttatatgcttaaaaaaaactgggagtagtctcaagagacaaatggttccagtatctttcaattacaagaaaggaagactcaattttcataatgacaaaataaaaattactctctttggcagacagtcaccaatatttaactgtaaatatcaaataaattcatgataatatcatatatttacactatatcataatttccccaaattaaaaatacaggtagtataattttaatagcttcacaatattctattatatgaataggccacacctgacttaactaatcctaaatactggacattagggttgcttcctgtatttcacttttataagcaaggctgcattcttgttcattaatctttatatatctagccaattgtttctttaggaataacccatagatttcaaattgaagtaaaggatataaatctatttaagggtttctgatacatcttgtgaaactccacttaagagagatagcatttttttttttccaagatggagtcttgctctgtcgcccaggctggagtgcagtggtgcaatcttggctcactgcaacctctgcctcctgggttcaagtgattctcctgtctcagcctcctgagtagctgggaccacaggcgcatgccagcacgcccggctaatttttgtgtttttagtagagacggggtttcaccatgttggccaggatggtctcgaactcctgatctcaggtgatccgcccaccttggcctcccaaagtgctgagattacaagcatgagccatcacacccagcctgagagatcatatttttaattctaccagcagcatatgagagttaaatacaaggtgctaatctagtgatactcaatttaaatatttaaagagaaatacagctttcaaccatgttgaaagtatacagaaattcaagacaaacaatccgagaatcacttgctatggtctgaatgtttgtgtgcctccaaaattcatgttgacacctaaccctaactgcagtgatattaataggtggggactttgggaagtgaatgggattagtgcccttattgaagaggcctgagagaactcgtgagaccctttttgccacactgccattcaaggacacagcatttgcccccttctggaagcagagaccaggccctcaccagacaccaaatctactgatgctttgatcttggacctcctagcttccagaatagtgagcaataaatttctgttatttattaattacctaaagtatttttattattgcaacaggaatagactaagacaccacatgggaaaatttaataatacaattattatgtgtcttttctaattaaaaataatgtatatattttactttgtttcatgctctatacatctaagagaaacatttctaatttaaaagttatattatctttgactaatttattagaaatataaagatgaatatgtcacaaagacattggaattaagacactacaaaaatactactcaaattttcctaattttattttgaaggatcttaacattttagttttatttcttacatgtggtcgaatttttaattatatcaagcactaacacctcaatgatttttacttcaaaaatcttcaaattcaactgtcccttgtcaaaaccaaaacagtttaagacatgtttttagcaaaaattgccctgagactgcaaagcaattttgtctgacaaagttgagacatcacagaaaaactatgattagccagaactcccactaagcagcactgtaccctggttccagatcctacttttgagagaaacaggtaatgagagaaaaaaaacttcgcataggaaattggtgaaaaagattgcacaggatggaatactatacagtccatgaaaaacatactcactatgaagttgcggtaatacaagaaaaagcccatgtcattgctttaatatacaatacacataacaaaaatttatttgtgttgactatatagaaaaagataatgaaaaaaaatctcaaaatgtaaatagttaagaatggtggaactgtgagtcattttttaaaaattctttctaattttttccatctaccacattttctgtaataagtaaatcaagacttttaattagaagcatatattctacttaatgtattctatcttctacaattatggctttgaaaaatcaaaattaatgttcaaaggaaaagcctcaaagatttgcatatgttcagtttattcttacaagcacagcacacttcagggtttttcagtgacaacaaaaataaaatagttttctacttaatcttcacataaccaaaacttgacttgcaaaaccctgaccacacaaggatgtagctttcaccaattctcctataaaacattgcctaatgccatcaccacagatctccccagtacacgttatctacagattatcatactgtcttagctagaattaccaaaaatttttagcaagcttataacaaatgactgatttattattatctcttggcctcccttaacccttaaaatatgattctgtgattttgaacaaattaatcagttacttcagtcctagtctcaatgtcccctccacaaagatacttttctgactaattcaagatagctccacagctctcattctcagagagcccttggtttacctccatcagagctacccagttgcttgtgacccagtattttcttttgttgcttaagaatttattgtccatctcccacccctagaccgttccactccagcaaagcagggaacctgcctattatgctcatatctacaggatcagtatttgttgaatgaatgaatgaatctctgtcttacactatctttttccatgtctaaaatgaaaaggttctgtgaaatgcctttgctgacttatacatcaatcactaagtatgacaagtagcgagctctgtcacctattaactaagtgttttcaggtacattacttaatatctctactttattattactatttttcattattaatatttgagtgcttatctgtgccaggtgctgaactaagcattttacatggattatctcatggtatcctcccaacaatgatgtagatactattattacacccattatgcatttgagaaaactgaagcacccttgcctaaggttacacagctaggagtgggagaccctggattctattcaggcagcctcgttctacagcctgcattcttatctgcaacactatactttatctccacaggcatgtgaaacgccagacagaaccaaggactatatttatacttacaagagttacagaattaccaaaatagaatgatctgatcaaatcacattaaaagactgccccatgctataaaaaatagagggcattctaaatagcctttggcctttttttttcttaaccctgagaagacacttttctgaaaatatgttttcaacttttatggtaagtaggatacaatatggtcaatttcaggaccaggttaacattgctcaactttacttctgtcaaatcccaagctgttttttgtttgtttgtttttatactaaaggtttagagggtctgatagttctaacctagaaaaaaaagatgctaaactttggagcaattaccacaacttcaaacttcagtaatttaagacttcataaaatgatggtttagaaagtctatatgtggaatccaaatgaaaacttcatgagcaaagctttcatttagactcttccaaacttgcttccctgaaaaaatgtccagccagcccagaatgtggaaacaattatgagaattaagacatttgaaaaccactcaagcagcttttatttctagctacatcttatgagacaagttgctgcctggctttttagctggctttcaataacaatctctccttcctcctagaaagaagtatggtacatcaaagacatggtcagtcaatactgagcatatcttctttctctgtggttcacaaatgtagaccagtcctctcctcttaggaaactctatccagatgggagttggatgttaggttagttggtactctagcaaccaatcctgggtcagcaatcacgtctgttcactgaattccttttaataattcatgttaatggcaaaatcaggatagcatggaagatttaaatccacatgaaatcccagaggttcattttagccatagtttcaaggcctttgcacttgccattccctctgcccagaagacttttccccaagatacccagggggctcatttctctacctcattcctgctcaaattcatttcctcagagatcctttccctgccactctctaaagagcaccccaagcctccacccgctgctgcacttaagccatttaccctgctttatttttctccacagcatttctccatacctcaactatctacttgggctacggtctatctccccaacttctatttagtcattatgtctccttaggctcctcttggctgtgacagtttttcagattttccttgtttttgatgaagttatgcttaggaaggcagagaacgtatgttgttatggtgcctgcaacaatgcccagcacacattaggcactcagtaaatacttgttaaatgtagaattaaatgaagtaatgcttgtgcactcatgtctacatgctccctaacctttacccaaattcagcattattactttatgcttcttctgcatattctctaatttgggtctcacaacccatttattcctctggggagacttggctccaagtcctgcaagctgagaggtataaggagtgggttccctacctccagaaaagcagctcacctgagcagaccagtcagggtcgttctgaaggacagtctcacaatagagacctctctctattagtatgaacaccagaaacaaagattcctctttgaataatacttcaaaagagggacccaatggccaaagctacaacaatccaggcaacaaaataaagtagtactggattataacccgaagtataaacatccatgagtccatactgacataaataaattattgaaaaaaataataaatggaaagatgagacaaatctcccaggcagaagaataccaaataaataacatagatattccgctgtaaaggagggggagcatagctcctttatatgtaggctgtacacagggacctccttccaaagagcacaatatggaaatggggcgggcggtgggggcagttagtgacgtctcagcagagaaacttgacaaacactacttcagccagatgatcaaggtcaacatcaacagtgataagtcatattgctagtctgtaatcttgataagatgtattacttcatgatgaagatcagagagtaaatcacagtttactgtgatcttcctcccaaaaacccataaccccaggctaatcatgagaaaaacatcagctaaatcgcagttggggaacattctacaacatttctgaccagtactcctcaaaactggtactcatcaaaaacaaagaaaacctgaaaaacggtcacagccaagaggagcctaaggagacataatggctaaatagaataaggatcctgggtgggatcccggaacaccgaaaggataggggtaagaactaaggaaatctaaacaaagtacagattttagttaacgttaacatatccctatcagttcattaactgcaacaaatataccacagtaatgtaagatttaataataagggatactgtgtgtgggaggggttataacataggaactctctgtactatccgttcaatttttctgtatatagaagactgctctgtaaataaacaaatattaaaaataacttttaaagaggaggcatgttgttgactctactacactaattttaaaataaataaagcccctgtctttcataagcagttactttactctttgatatggtaaaataaacagaggagtggcaatttgttcaaaattaaatttaaacagacattgtaactgagaatgagatgcctctgatattcttggataaagcgaatatgtttattagaggggtgcttgttaagggtagggttacaattcggtttctgtatcttcatactctagatcatttctcttgagaaagctaaaccctcagtgttgctaaagtttgggtttggttactctgcttcttttgaacagttttttttgtttgttttgcttgtttgttttttttttttgagacgagtctctgctctgtcacccaggctggagtgcagtggcacaatctctgctcactgcagcctccgcctcccgggttcaagtgattctcctgcttcagcctctggagtagctggcattacaggcgcccgccaccatgctcagctaattcttgtattattagtagagacggggtttcacggtgttggccagactggtctagaactcctgacctcaagtgatctgccagcctcagcctcccaaagtgctgggattacaggcatgagccatggtgcccagcctctttagaacaaatcttaaactcagacacctaaaattgctctgatctggatcctgtttcacgtatcaacaaagtctccataatactggtcagtagaggttccaagaggagaagccacagagaggcaagcgtacaatgggtgtgcttgggaaaatacttaatacaaacgcaaagcttaagcatctcaggtcatcttcagctcagagatggtgacacgcagggaaaactgcagcctgagctcagcagaataaacaggttcttgtgtcagtgcaagttttggagacctttaggcagggaggacagcccatggcacgtcagggggctcacctactgttctctcccaatcaagtggggtttacagaaggtcttggtatatacacacagcttctaccctaggacttgtttaacaaacaactagaatcaaagatattgttccccagatgttcctgatggccaaagactgtcttaagcatattcattaaacaggaaagcaaacatgaaaacatacagaattgaactaaataaaagaggtgacagatgaattttatgggatcagcaaattccttgacttagtttatccaaacataacacaaatctttacttgtgtttgctttatataaaattttaatatttgtctaactcattaggctagaaagatgactaatacatcttgtcccttgactcataaaaggacagaaaaagtaaaagatgctaatcaaaatgcttaaaattaatattatttacacataatataactggacatggtctattatacagcaaataagccttagaccattgtataatcacatttcagtagctttactgtttgaaggggttgagaatgtcaattttttttttttttttttgagatggagtctagctctgtcacccaggctggagtgcagtggtacgatcttggctcactgcaacctccaccttcctggttcaagcgattctcctgcttcagcctcctgagtggctgggactacaggcccaagccaccatgcccggctagtttttgtatttttagtagagacggggtttcaccatgttggccaggctggtctcaaactcctgatctcagatgatccgcctgtgttggtctcccaaagtgctgagatgacagacgtgagccatcatgcttggccgagaatgtcaaattttaaagtgtgaacattcacagctgaaagagatattcttcttatacaaagtaccttgtcatatgcaaaaatatattttgagacatttcaaagtgcttgtttataccagtgacttctgctatggtataattatgccccccagagttcatgtgttggaaacttaatccccagtgcagcagtgctgagaggtaggacttttaagaggtggattaatggattaacactgttactgagagagtggatttgttatcacaggagtgggctcctgataaaaaagaatgagtttggccagatttcctctctgtctcgcatgctcgcctctcccttccacccctccaccatgggatggcccttgccagatgccagtgccaagctcttggacttccctgtctccagactctgagaaatacatttattttctttataaattacccagtctctggtattctcttttatagcatcagaaaatgaactaaggcaaattcccatgaaaaggaaattctatttctttacattgtaaaattcacaacagacaaaattttggtttaaagtatctgtcctaatccaactgtggtaccatattccctttctcattccatttttcataacctgtctcctgtctcctatcttgagaaggatagtcaggagtctcttgctccatatggtttgttccaaataatcctgttgccagtaacaggttaacagtgacctacagcaactccttcttgcttctggagatcatacacacccaggttagtgcctgtctgaatcctcaaactctacataggaaggaaaataatatttttaaagcatgcagctgtagcgggaaacagttattctaatcaaggcttcaaagatactaaagaagagcactgttactgctaaacaaacaagccagaggggctcctcgagaatgctatgccttggttaggaagcagcatccatcactggagaggaaggctcatatctcatacccctcctctcctgcctgcctccctctcctaccccgtgttctgtctggtagtaaaggtagccaggtcgtgtaaatgaatataacgcacatttgaatgtggtgcctaatctcatcacatgcatcttccagctcccctccctaccctgtatcctacagggctggcccttagggactgcttccttgctttccagcttctgccaatgagaggaacagcaagagattggaaggcagggaggatgaggttgagatactgatttctcctgcctcctcccctccaggttgctgtaggttggctgggttaaccactatcaggcatccctctatataaaggtagcctcccctccctcctctagctttcaggttgagaggtgttaaccactccttgctgcttctagctcggggacactgtaccatctcttgttggtttctacgatctctgccctcactctgtaaatggtatcccctccccgccgctccggttaccaggttgactatatcacctcttgcctgtggaactctacagttgtctttcaaagtacattgtaataacaacaaaaactgttatttgaaaagtcatacatgttatggattttcttaaatattttagaatgatctagtacacttttcctaattataacaactctcagagaaagaaaggggaatatatcacattcccaagggcatggaccagtagcacaattcttttgatgtcctcaatgtccccgcacaaataccaaaaccctagtaaatttctctgcagatagtaagtgattcaataaatgagtgatctacccatggtttactgcatactggaatctacctcacaaatgtccttcaatgtcattcagaatcagttccaactctaactgtattccagccttgtgcaccatggaaatttcatacatgatatggatttacattttaattctaaggattagccacatttgaatttagacactacagagaaggaagaaatagacttttcttatgatgtctggcaaggggtaaggtaatgacaacctgagccaaggggaagctgcagccagatgcaaggcaaaagcaatgcaaatgtagctacagagctgcacttaggtgtgcactatggttcatcctacacagtggtgtttccagtgactggccagccatgggggatgctgggtaagtgttgctctcagaaaagctctcttgcctgcagccttagtggaactactatcacggcagatgatctttagactctggggacataagtcagacacagtccccaagtagacaaagcagcttgggggctcagagcacagagaagggggctcaggaataagctcttccatattccacagcctcatctcactgtagcattcttaacctctgttccttcacctactcctcccaatctgaatacaaatatgcttggggaagatcagaggcaatcctcaacttttgaacctctataatccgtacaactggaatttttatacatgttacattgatgctcctaaaatggatttttatttactagattcggactctcagtcaggaggtggggtggggagtcccctgacattgcactgtatatgcattcttcacctacgtgtcagcctttaccaccagaccatgagcttcttaaggaaaagaacagtttctgactcatgattgtgcccctcatgtccagtacagtggcatgtagtaagtagatgcacaacaaatctctggtcgatgtgttagttagttggttactttcagttagttggttataaggggatttggaaacctgatgacaattgtgttgaacaatgttaggatgatacagcagaagaaagcaagtatagggtattcttgaaaaaaaaaaaggctgagaaatacttgtgacctcacatgacattcaacatattttattaaatatttgacttaacctcacttctaaatttgttaggagcagggctggtatccttctctctctgatttttgaaccacaaacagaatctgacataaattttttttaaagtattcaatttgattgaataattcccaaatcttctgtttacagtccttattttctttggtttcactgtggaagctgacaatagttattcccttcttcaaactcccctcctgccgcctcagtgacttgacgctcctgttttttcccaatctcctcagtattcctgtctcctgtttttccaccattcttgaattgcagacacttccagacttggttctcagccctctcttcttttccctttaaattctcttctaccaaaaatattattgcttaagttatttcctctatgtggatgaccccaaataattaccacaagccccgacacctctcacgccttctctttcatgctaagctaccacttgcatgtcaggaacccaatgtgccttggagctaaaagaagaagaaaggcaccatgagggcagcatgtatgcactctcaaatgaattttcaatctacctcagctcagctgttggaagatagtggggccaccataaggaaaaaagtttcaactttaaacaccaggattttaacacagaggataaaatcatggtgacttcaggaccccagggttgtttgtaatgaagcattggcaagttggcaggatggtttggaactggaaagcctccgtccaaactacactggctaggacccttcactctccctctctctggtgttttccttgggctcagggtagactgctgaagccactttacctgaggcctagtcctgactactatagtgttccctgcctttgaatctgctcctgaccaattactctggacatagctttgtgaattcaaactcagctccaaacctaggaatctggtttctgaactttcccactgagaatgcttcttagcctcttctcacttgaactttgcatggttaacctctagcctcgaccctcaggctacattaaagaagctgcagaaccccaggctccatttctaaaaagtcatgcaatgggtggtatgacactaaactcacagctgttctaactcatttgcccataattgcatattgccctgtgacttcttttgtaattatttctttgtattattatttagctttatgttctgtaggacagactgctaaatcacattttccttttctttcttttcttttcttttttctttttttttttttgagatggaatctcgctgtgtcgcccaggctggaggacagtggcgcgatctaggctcactgcaagctctgcctcccaggttcatgccattctcctgcctcagcctcccgagtagctgggactacaggtgcccaccaccatgctcagctacttttttgtatttttggtagagacagggtttcaccgtgttagccaggatggtcttaatctcctggcctcgtgatccacccacctcggcctcccaaagtgatgggattataagcgtgagccaccacgcccagcccacgttttccttttcttacagagtaatgggcttatagctgggcaccaggacgcccaactgtacactcggttttccagcctcctggtacctccttgcagctagggtggctgcgtgactaagttcttaccactagaatgtaagcataaatgaagtgtgctgctgccaggtcagccccaaaacaatgaaggtgccctcctccatgctcctttccctacctgtaagttggaacataaacaggcctgtgatccactttgaacacccagcagggaaaagcctttgggcagcctaaatccacgtagtccatggactagtttctatcaacaagaaaataagtatagaaattgaaaataaacactcagaaatgtttatagcaatttaattactctgatctgatcaatctgatcactatatagtacatgtatcaaaacatcacaatgtgctgggtgtggtggctcatgcctgtaatcccagcactttgggaggccaaggtgggaggattgcctgaggtcgggagttcgagaccagcctgaccaacatggagaaaccccatctctactaaaaagtacaaaattagctgggcgtggtggcacatgcctgtaatgccagctactcgggaggctgaggcaggagaactgcttgaacagaaccagaacatgagcttgttttggctgctccttgcagcttttagcaagcgagacaagaaagagatgagctcaggcaagactttttgcaagtacgtaagcaaaggtggaaaggaatggacagtgtccagaaacggagggccttggagaatcagaaaagtcaattgcccgtgtagctccaaagagtagaaaatagtattaccacttgcagcctatctcaaagacctctcagtaaactgttgcaagggacaatgccaggcaggtctgtagtaatgatcagagtatgggtgcatcttcccatccaagtccatgctgcagaggacctcagagtacacactactgaagagaggcagagagatgagccaagcatgcaagctggaaaataagtcatgcttaagagcttgacccagagtgggatttggatgcggtaactgacctgtggaactgactagcagtctatcaagtttataaggaattgtagtaccagggaagccacagtttggcccagaaaggcccacgttcattctcccccaaggagtacacactttccacacccttcaaatgtggccacagagggtacagaagaaggaaggacttcccaggggacaaagacaaagtcaaggcttctgggaggccccacccagagaggggaagcatggaccaaccatggaactgactccactgccagggcagggaggtcttaataattcctgcccagcagggtttcgtcatttttaggcccctgttacttgtcttcaattcttctgaatgggaagttttatggtggttttcttgtttctacttgtccactgaatagtggatgtttgtcagaacaaagaacagaaaggacattttagagtgagtatttaaaacagaggttagagaagggatagccagacctgtggagttctggggtcacctgcacgctgaaggaaagcatggcaggttgtgaggcatggtaggggcaggatggtgaggggagggaaggggaggggaagcttcagaatcagctggacctgggtcagatgcaggcgcatcacttttagcagtggctctcacctggcacactgctgatctggccagaaccttttccttctctaaaactggcataatcatgacaactgtgtaggattgttggatggactaaattaaagcaattatttctatagtgcttaaggaaatgcttagtacacaggatgcactcaataaatggcagacagcacttcccaagaaggttagataactcaaaatttctaaaaagtttggtgaaacatacaactggcattctgggagattaactgttcatgctctaacacctcaatttaacaaggaatggtgacaaaatcatcctgtaactacactaaaataactacagtccaagaaagaatgtccccctgcctgagtatgggctcagtgctgcagtgactaagcttaagacagtaccacattcactctgctgtagcttgaaacaaagcagggaggcaggattggaaagggggaagaggagggagaggagaagagaggcaatgcagtacagcagaagaacacaggatttaggtccaaacactagcagataagcaggtgagccgagtatttaaagagcatggcccccacagctaacatcatactcaatggtgaaaaactgaaagcttttgctccaagatgaggaacaaagcaaggatgcccactcttatcactgctattcgacatagtattggaagtcccagccacagcaattaggcaagaaaaataaataaaagtcatacagattggaaacaaagaagtaaaattatctccgttcatcaacaacatgatcttatatgaagaaatcaccaaagatgccaccaaaacacccattagaactaataaactaattcagtaaagttgcaggatacaaaatgcacatacaaaaatcagttgcatttatttctatgcactaacaacaaacaatccaaaaaaggaaattatgaaaacaattaaattcacaatagtattaaaaagaataaaaccctgacaaataaacttaatcagaaaggcaaaagacttatacactgaaaactataaaacactgataaggaaatttttaaagacacaaatagaggtaaatacatttcatgttcatgaatcagaagacttaatactgtgaaaatgtccatactacccaaagcaatctatagattcaatgcaatccctacaaaaatctgaatggcattttttacagaaatattaaaaaatcctaaaattcatctggaactacaaaggaccctgaatagctaaaacaatcataagaaagaagaacaaagctggaggcctcacatttcctgattttaaaacatactacaaagctatgtatggtagtatggtactggcataaagtccaacatatagaccagtggaaaagactagagagcccaaaaataaacccacacatacataatcaacggatctttgacaagggtgccaagaattcacaatggagaaaagatagtctcttcaacaaatggtgctatacatatgtaacaaacctgcacgttgtgcacatgtaccctagaacttaaagtataataataaaaaaaaatggtgctagaaaaaaatagatactcacatgcaaaagggcatggccctggagatagccagactgagtttaaagccttgcttaccaacaagttagttatcttctctatcttaatttcctcatctacaaaacggggataataaaggtaacttcctcctaaggctgttaggagatttaaaggtgcttagactagcccctaacaaacagttctaatttaattattgttattatcagtgggatctgagaaatggagcctcgatttccttttttgtaaaagggagataagatctaacttgtcaggttagtgggacaaagtgaatgacgtagcaaatgtaaagccccagtccacttcaaggtctagaggagtcagagaaagtccactgagctccacggtgagcttgttcccaaaaggctggggaaaagggaccccaacagagaatattgggaagaggagaccaaaggaagaatcctttccctcacactgggtgggtcaccacaataacaccctaaagccaaagccttctctcttctaccaatctagtcagagagtcactagctggtgtttttcattaccttttagtcccagagtcccagatgaatgtgtacaatcaggaaagaggggtttagccagctgggttgaaaacctaatgtttaacattcttactatgttaccatacttcctctaaaccactccttcaggatcttggagtaatccaccaaaacacattcactgatatactagtgaacaaatttcaaagtttacatctctttccccatttgatcccacagtgagatgggcagttcagcattctccattttacagagaagaaatgtagaaattggggactgattcaccctgaccagccctcatccttctggcccagggatttttttgttttttttttttttaaacaatactgaccactggagcctctttttggaagcagtctctgccacctgacccccagagaaatgtaagacgtagatttgttctccataatgacattaatgccttttgcaaacatttactgaatctagaagaaatataattgcagaaagtaaaaagtttcctcttcaaagtttcccttcttgttaaataataaatcataaatgttagaaataatagtttcttttaaaatttttcttcaagcctccttgctttgtgctaataactctttgttaagcatgtagctgttggacatgctcacaggcatgttccagctcacagcctatgcccctttcttatttggaaatgttattacttctttaaatttttcaaaagcaacttcctcttttcctttgttctcccttgcctttacctatctaaaaaagttttaggctcttagcaaatcgggtatcagtttagactgtgaggttcggctccagccagtggatgcaggacacagcagtgaggacaacccaaatgtgtaagggataaatatgtctgcttttcctttgtttggtgtactctcgtggcaagactgctggtgagtataccctttccgcagaaagtaaaaattgccttgctgagagaattaaatttatgttcaagcgctatttctttgtggcaccggggaacaagcattttgcatttctaacataatgattgtggtaaatgtcaataaaaatcttgaagcacatctctccttagagtttttggtaagagtttatggaggaaaatctatataatcaaatgaaaatatcacagtaaaactctaaatgcatcatagaaattagcaaccattagtcagtttgcctgtttcagagaaagctcagaagaaactcagtttacctctacaatgttaaatgatgttaacaccttctcctaaagcattttactttccccatcaacaaaacagagtatatcagctgaaataggccacagacctcattgtctgtctgtacgaaactggggcaaaaatgaactcagaaagacaagtaataacctggtagcaatccatggaaagttaaccttgctgacattcctcttcacttccctctgttggatgttcctggaatttgcatttgtggaaagttgcatacttgcagtgaacaagttccactggtcctgttgtagtggattccacctaaccttttattcctctcatccctgtccagctaacgttctctcactgttcagcatatgtacgtcaaagacagaagtgcatgaagacatgtgtaaagatgcaaaattcccccaggaaactcattatctagagcagccagggccaatcctctcctcctcccagggattcctagcaatatctggagacatctgcatcagtcatgacttgggggaggggggtactattggcatctaccgggcagaggccaggaatgctgctgcacacgctacaatgcacaggccagctctccacaacagagaagtatccggtccaaaatgtcagtggtgctaaggttgagaaatcctgacctagagggtgagatgagacatataatacagggttaagtgtggcagagctgtaatagagctaaaactggagtgctatcagattgataacatttaaacaagcggctattacttgccaacaagtgttggcaagaatgtggggaaaatagtaccctcataacatgttggtgagaatgtaaactgatagaactttgggggaaggcaatttggcaatatctaatgagactttaaaatatatacactattcctctttgctttccttccattcctattttctttcttcctttcccttctcttttcttccttccccagaacacagcaatcagcatgtagctgggaatgcaacgtgaggctggggagtttggggaggtacatagagacatgagctatggctgggaagagctgtgagctagagggactggagactgatgattaagctacatagagacacaggctagcaggcctggcagccgaggacaagaggcagtggcaaaggtggtggacacagaggaggcaggatgaccttcacatttgtaagactggttactgtatgcaaataagcaaaaatattgaagataatgagagtcaggttttctaactgccagagaagatatgtacaaacatataaagggggaagaacagaaagctctttgggtgttagattgaaattgtaggtataagtatgaatcatgattttataatacacagcctaatatagaaaaatttataaatgtgtgtacacatatacacatatatttcctagctctgtcctctgagagatctagaagcaataataccccagtaacaatgggcacatcaacctcctatgtattggtgtctaaatacaattctcatattgcatattagatctcaagacttattcatcctacataactgcaacttcgtaccttttaatctacatcttctgtttttccctgtttccactaatgtacaacacaaggactacagttactaatactgtattgaggctgagcatggtagctcatacctgtaatcccagcacctgggatgccaaggcaggaggatgattcaaggctggagttggaggccagcctgggcaacacagcaagacccctcctctaaaaaatattttttaaattagccgggaatggtggtgagcacctggagtcctagctacttgggaggctgagataggaggactgctcaaacctaggagttagaggctgcagtgaactatgatcacgccactgcactccagcctgtagtacagagcaagaccctgtctctaaaaaaattaaaattaataaatattgtattctgctaatttgccaagagagtagattttaggtactcttatcacaaacacaagaaaggtaactatgatgggcatgtcaatttgcttgactgtagtaattacttcattacatctatgtttatcaagataaatacatgaaaatatcatgttgtatgccttaaatatataaaatataaataagacaaaagtaccattctctactaaaagggaggcctaactaggtcaaggaaagtagaagatgagtccagatgatctggtggagccagaaaataaagaaatgctcaatgaataatagggatgtgttaaaaggacacaggaggcagctccaaggggtccccattggccaaattgagcacaatttgagcattaaaataaaaaacaatcgtgagacttcaacttattgaatacataaggaatccatgaacagttcttagtaaaaacataacagaaaaataaagttcttccttatagtagtatgccaactaacaaatgtagaaagagtgacggtgataaagaatcatcacttgaggctgggtgcaggggctcatgcctgtaatcccagcactttgggaggccaaggcaggtggatcacttgagctcaggatttcgagaccagcttgggcaccatggtgaaaccaactccatctctacaaaaaatacaaaaaaaaaaaaataagccaggtgtggtagtgtgcacttgtagttccagcaacttggggggctgaggcaggaggatcacttgagcccaggaggttggggctgcagtgagccaagatcatgccactgcactccagcatggcaacagagtgagaccttgtcttaaaaaaaaaaaaaaagaatcaccatttggcaacattcatagaggtggctgattcaggcagacgtcatcaataaatggtagtttctgtaggtacaggtttaatgaggaacaggctatttgcataaccctagaatagttccccacaaacactagtacaaaggtgttttcaaacacctttggggaaacaaagggaaacgaaggaaaaatggcgaatttaaggtgaagaaatctggcaaacaccaacataaccaggtgattgaggtcaatatcccagcagtgggatgggttggcaccatgtgccttctgttgtaagaagctaagaagagctgagtttcatttctgaaggattcctgccaagaatgcatgacctcagtcaggctgtgaagaaatacccaatacagccaggttgggagtcatcctacagcatgtaggacctatacaactgcaaacactttaggaacagggaaagtctgaggaaccgttccagaagagacatggtaactaaatgtaacatgaatcctagatcagacaggtagaagagacatttgggggataactgacgaaataggaatgggctctgtggattggatgatagtgttttgtatcaatgtccatttcctgatttgatgggtgtacgctggttatataggaggacagagtgcttgcttttttttttatgctggagtgttttcaagagtgatggagaataatgtctatgacttcctctcagaataaagactgatgatgtatattttatatatatatatatacatacatacacacacacacacacacacacacacacagagagaggcagagacagagagaaggagggagggagagagagggagagattgagatttcaaacctaatgccatggagacatagaaaaagattatactacttattttctcttcaccagacccatgtgatagtttttgtccagagaaaggccttccttacccccattcgacgaactgacttactaaaaatcaaacagggcaggaggtaaatgattcactgatgtgctcccaataaattctatacttgatcccttgctttggttttctataactagtcactgccaatggctttgagtcttaactctggctttctacctccttagggagtgaatgctgctgatagactccgctgcctatctttgaattacatggtctgagtctgtctgggggcagctccagaatttctacagaggatgtgcttcgggatagcttggcttaaaaggggagaccaggggcttgccttaaagctgcatttataaagcaaatacactgcttttatttagaccgcatgtttgcttggaaggcctttggaccaaatagtgcacttatggaggggctaatgtgccctccaacccagccctgccacctgccaagccatcccttgataactggtcaatctgcacatgggtgagtcaaggccagggctagtagaagctccagcttaatgtcccagggaacaatgtagacacaggactagctgatgagtaattagaggggttgatgaacatcctcaggaaggggtggggcaggctgtgctgggcaggttgctttccacagtgacacccagtctggcccagcctgaggtgtacaaatgattcacatctgaagaggggtgacagaatcatgggagtagggcagtatcaggggtcatgggcaagggaggagttcaaggttgtagatacacaggacaagaggccagccaaggaagaggaataaagaggaggacataagactgggggtgatgaagagaggggtgggtataacccaggatgtcagaaccttcccctcaatggtactaaatcccctcccccaccctccagctggcttgccaggacaggtagagagcaacaaatatctttcagactgaattaagtaattagcttaatttgggggtgggggagcaatgcctttggtcagtttagaactttgcagagtaaactagagacccaagtcagcaagaaggcacaggggagtgaggatggtataggtggacccaatacattgtccaacattgccatcagcaccctcctcctgacctgtgggatgggtggtggccagctgtttgtgtttgtccactaagaactgagatgcgcagacagtacaggtaattccaacacgaaattaaagcttctttggaactttgccctatgccttcgatcatgtagtgttgggtaacctcagtcctgaaatttaacttcctctcatattccccacagagcagtttctcaacctttgatgctatttcctcctcgaagtccagtatgatgtcagaggacgggagagaggaatatggaagaactgcagcagtgcccccttagcactcaaaacatgcttgtggagatactgccaacccccaatagccagagctgagtgggcctgcctggggtggcccacatctggatgtcctgcctctttaattccaatgtttatgcactcttcacagggtacaaagctctttcacgtacataagttaatggaactcattaacaatccatgtagacaggtagaaaagtaattattatccccactatataaatgaaaaaaacttaaacatgacaatctattcagggtcacaagaactcacaaaagtgggactaggattcaaagacagaaccctgtgctccaagtacctctagtccaccgtttgtaaaagcacaaagtctctgcacttatgcagatagctccccagccccatcaccacctctgccatccacagcaggactgagttccaggtgactcctccacaaatacagaatccaggatgaggaacaaaggatcatcaaggccggaaagggggaggctcagtacctgcaggaggaatgacgaagggaggaacaaaaggcccatggccaggaaaagagaaagcaagtaagaaaagtgtgtataacatctctaagtcatctaaggcttagaaatctttgcacttttaccagaatatacatttgcacccatgtttacacaagtgttaatacttaaatttttatctaggaggaaaagagggcaaccagcatttaaggagtacttcctgtatatgagagaccatgctcagtgctttctcttttaatcttgggagatggatataatcttcatttttacagatgaggaaattaagacttagagaggtgaagctatgtgcccaaggtcacaaagcttggactggaacaaaagctggtctgactgcaaagccttggtcttccatttatactgcattaataatgccttgggcctggtctctgccatctagaatcctgcaaacagacttaaccactctgttgggtataatcacaggccagaaagcatttgaactaatgtatactccaaggagaatggctaatgggtaatctgaggtacagtaattcccatttcagttatagtgattccccttgccccagcccaaagaaataagaggcgggtcttaagttatcacgcactgctgctcctcagcagcaggctgagaaacttgggggagaagcagccagccttaggcatgtgtgtataagtgatgttgagagtgtgtgtctgggtgctgcctggctacaatgctgtgtgtgcatttcttccactgtgcacgtgtgtttctgaaaaatgagatggagagttaacatgctgtagtttcttaaacagattccggtgaacacacatgaaaaacaatctcatactttaatgttttaaattcagtctccattcatagaaaacatatgcaggcctgttctaacaaatatcttgcagaacagcaagatatctaaaataggtctgatctgataaaaaaaaaaagagtggtagttgataaatgcaattgaaaggtttagacaagaggagtgtcatatgtaattaaatcaaaacctcaaagtttcaaattctaaagacaaagaaaaaatttttgccaaaatgacctattttcttagttatatgatagtgacaatcaatgtaagtgttgtccaaatagttagacgtccagatctccacaggataactagttccttgctgtctcaaggcacaagagacaactctggaagcttatctcaagtacacaactctgactggcagggtttgctcgctcgtctttttagtatagtccagtttgtttagacaagcctggggttaacagagccaaggtgtgtgtttctaaccgtatcacttctgtcccaaaaagaggaaaactctgtttactggactcaggccactaaatatcagatccactgcccatggaaagcagggttagcaactgttgatggatcaatggaaaatccagcaactcttctcagcgatacaaaagtccatgcattaatgaaacgttgtgcggtacatggaatttgtaaagaggagattgattgtctgtctgtaattgacatttactttattctctgatacagactaagttggaaccgtgagaaagccctttatttctaaacggcatctcaagaccaggtaatgctactttcggaggaaaaggaggaagaaaagcgttgtaatgacaataacaaattacgggggaaacatttcgtggaaattactcagtttaaaaaactgacctagccgggcgcagtggctcacacctgtaatcccagcactttgggatgctgaggagggtggatcacgaggtcaagcgttcgagatcagcctggccaacacagtggaaccccgtctctactaaaaatacaaaaaattagcctagcgtggtggtgggcgcctgcaatcccagctactagggaggctgaggcaggagaatcgctcgaacctgggaggcggaggttgcagtgagccgagatcgcgccactgcactccagcccggatgatagtgcgagactgtgtctcaaaaataaataaataaataaataaataaataaataaataaataaataaaaactaacctacaaatgcttttcagggccattttaatgattaccttaataagactaaattgtttccaatattcacagtcactcctcaaattacatgcgtgcggaatttctaagcaattttgtgtagctgcaacttgttgagggaaagcaataaagtaactctgctacagaacaaaagcacttttgtctcgtggtggtgagggggcataccctgaacaaacaaccccgacagtgttgctagttactagttcccgaatctctagaagcctgcacatggttcaagctgttccccagcggacacagcacagtaccagatgtaactggaggctgaaaaatgttatatccctaggcttcacgagagaaccccagtttcctaatcaccatcgatggcaatgagactgagtttggaaagaaccacgtgtgcaaaggcagacgcaacccgtgcggcgctctcctggcctctgcgcccagcccgccagccctcagcagcggacgcaacgccgattttgcatctagattgctttttgctcctagcggggaaaaaggtgggaaaagagcaagttgtgccatacacccgccgggagagtcttgtcccggggtttggagtgggtctggagcccaggcttgcacgccaggcaaccccgaaaagccgcaggctagagccctgcaggcgccgctgcgccccggcctccccacgacgcacgccctggtgactgcggctcggggtaccctccctgcgcccggaccctcactcaccgctcacgttcacccgcgccgccgagcccgggagcgggggcccctgcggctgccgcatgccctcggggtcgagcgcgacggggcgaccgggcgccgggctccagccgggcgcggagaagcagcggaggacgcggcgggcgggcggagcgcctcctctccagcgacccctgcgacgcgtccagagccaaaggaaagtttggcggtgcgagggagggacctagggacagcggcccctccctgccccgccccgccccgccgggtgcgttcgacgttcccactggagagcgtccccaacctgcaaggccgcgagctgcgctcaaaggggcccgtgcgagccgcgggagggcagcgctcttgcagacgcgttcctgcctgggatcgtccccaggtgggtggtcggccggccccgagagggaaaagcgcccactaaaggaccgctagtacccacaagcctcacggagccatacctcggagctccgtattagaacgcagtccctctgcccctctgtcctcagagatttgtttgaagtggctgcgggaagtgcagcccacacccaccacccccgtgggaggcaggctctactccaagcccgacctaacgctggaaacctcaaccccaaagctacccgagggtgcggacagcccccagaggcaaccaacaatatttaaggttcttgtaagaggtttcttggcctcctggggcaaatagtcctggatactttgtttttcaaagctgaaatataaaacctccactgacccacctttagtaaagaagaaagatgcaaagtaaaacaaatgtcatgaaggcattgttctctctgaattctgcaaagcaataacgaagtcacagaaatgttcaaagttgtgctttcctggtgaccttacaaaaaggaaatactgtgaggtgaagtccttcccactcagacttcaggcccttaggaagcaatgagagttgtgtgcccagatgtcttcctgtgaccctttgccatccatccatccgttcattcattcatcttgcattcaccattaatactgcgcccttctgtgtgccagctaggaacctcatccttgcaaacaacctgttagataatctgtcccctaccatcaaagagattctgttttctctgcagaggatgttttaataaggttacgtcccttactccgtgggtcttatcctatagaccataatagcctaatgtgcctcaaacctccccggggctacagctaagttttcatcagcatgtgaaaattattgtttcatctaagtgttcagaaaattattgcggtgtcttgcagttgaactgtgtagagagaagtacaacttgcgaagctagggctaaagaaagatcatgtgtttacttttacaagcagaagctttgcatatgataaaaaagctcggtggcaaacatggtgaaaacccgtctctactaaaaatacaaaaagccgggcgtggtggcacgcacctgtaatcccagctactctggaggctgaggcaggagaatcgtttgaacctgggaggcggaggttgcagtgagccgagatcgcgccactgcactccagcctgggcgacagagcaagactccgtctcggaggggcgggggtcggaaagagctctctctgtcaagggagagaacagctcagctcaaacatcacggtgctgaagggcaacctggtaaacacagaaatactcaaccaccagcatttactgaatacttgacgcaacaaaggtgtagtatgttgagtaagatgttgcaggctagactgtaaacaccactaagagccttcttttgctgggaaaatctgttctgaatccaaacaacttactaacaaaggcacttgggaaacacattatgttgcattatgttgtaccttgggaacttcctgaactcgaggtaattgcaaagcagaacagggatcccacagagttgaatctgaatccttaaaaaaggaggaaagtgaagagggcatggggagctgtgttgcaaaaggaaagagactttccagatagatggtttttaacagctagatgggtcagatgtgaggggaaggccagaaggtgttacagagaaacagattcagagaggaaaagcagtgataaacaaacaaacaaacaaacacctatggggagaagcaggaaaagaaaagacgaggcaaacgacaactaaaaagaaagatgtggcccccaattcctagtttttagaaggtagcccagggattatccaccagaacctcctacaaatccttgtttggcctgtggtgtctcacttctctaccgaaatgtttttattagcaaagccaaattaaaattaacatcaaaatggcaaggatgaaggctgagggtgtattttgtcttagagatcactggctggaaagtcattcaaaactttcaacaaacatttgctagtcagcttcatgtatacaagtgttgtgttttgtgttcctggaaacacaaagagttataacgttgtttctataaggaggtaaaaggggcattccacagtgcttgatagaatgaaattgtgatggctgaaagaacaattgggggtggatgtggtggctcacgcctgtaatcccagatatttgggaggccaaggttggtggaccactttaaggccaggagttcaagactagcctggccaacatggtaaaatcccatctctacaaaaaatacaaaaaattagccaggcatggtggtgtgcacctgtaatcccaactacttagaaggctgaggccagagaatcgcttgaacccagaagacagaggttgcagtgagctgagatcacaccactgctctccagcctgggtgacagagtgagactctgtctcaaaaaacaaagtaagtttaaaaaacacaaaactgcctgcctccttccacagtgagaagcaatgtgggactcaggcaaggcttcctcctctctggatttatggaaagaggccatgttcctctgtccccagctcaccttggggcttcaatcatatgggcaggaattcacagatgtgttgttcttaactttgggaagtatctgaactgaatctctgctgaattttgctcatctatactaattagcaatgaggatgcctacagcaggtggatagtgtgagaaagtggaatgggagctgtaatgtgagagatgaaagtggtacctgaaataacagttctgagaaaagactgagcaaacagttaactccatagaaactactggcaaagagagtacaagaatggtaggtggccctgtggagtatctctcagtagtatatgagtgacttcaattgaaagtcatggaaatagtccataaataaaaaaatcaaaaataaaaaccaacatgttgaaaaaacagaatctaaggtaagctccctgttttactcggtttctggttcattgtaatttcatgtacattcacttgagtattactttagcatacgtgtgagcttggctagtgtgatactgtaggcaaatattgtaattctcaaggggaagtttcaagcagaaaataggaagctagcattgtaaatcttttacaaatcctttctaaagagcattggagattatgggatggaaagtgataatccaccactactacagtaagcatgctttagagcagtcactcaagacaaaacaccctaaagctcccatccaagcaggctttactttcacatctactttacctaccttccagttttgaggaaattctatctggagacaataattgaggttttcttttaataccattccttattgccctcatgactactcagctcactgaggcaagagaatctattttttctgagagcatttatcaagggtggacacaaaaacaacaaaacaaccaccaaaaaaaaacaacaaatttttaaaagaaaaaacaaagcggacctggcatgcctataacctcagcattttgggaggccaaggtgggcagatcacttgagcccaggagttcaagaccagcctgggcaagaagacaaaaccccgtctctacaaaaaaaatacaaaagttagccaggcatggtgatgtgcacctgtggtcccagctactcaggaggctgaggtgggaggattgcttgagctcaggaggtagaggcttcagtgagccatgattgtaccactgcactgcagcctgggtgacagagcaagaccctatctcaaaaaaaaaaaaaaagtaagaaaagagaaagaataaaagaaatcaattctcagcttgtaaatagattttttaaaattcatagcagaaaaactaatcttaaacaccaaggtttgtgattttgcaaaagatgggttttctggagcttcaaagggctaagtgcagaaagaagtgaaacatgaatgttttgtccataaacagtcaattagaagagaacagatgaagaaccagaccaccctccctggaggttagatagggtttcctgacctggggaggagaatttgaattgaagaagagatagcactgaaagccatgagcatggtatttctgacctctcaccactcctcaggctaagttattagggacacttaggtctccgctcaagtttaggaacccaggaataaagtggtagattgcattattatttaaaaatatattggctcggtgcggtggctcatgcctgtaatcccagcactttgggaggcaggggtgggtggatcacaaggtcaggagatcaagaccatcctggctaacacggtgaaacctcatctctactaaaaatacaaaaaattagctgggcatggtggcaggcgcttgtagccccagctactcaggatgctgaggcaggagaatggcatgaacccgcaagtcggagcttgcagtgagccgagatcatgccactgcactccagcctgggcgacagagcaagactctgtctcaaaaaataaaaaataaaaaatatataagctgcccctggctggaagcagtggctcacgcctgtactcccaggactctgggaggctgaggcgggcagaccacgaggtcaggagatcaagaccatcctggctaacacggtgaaacctcatctctactaaaaaaaaaaataattagccaggcatggtggtggacgcctgtagtcccagttggttgggaggctgaggcaggagaatggcatgaacccgggaggcagagcttgcagtgagccaagattgcacccctgcactccagcctgggcgacacagcgagactccatctcaaaaaattaaaataaaaataaataaataatataagctgcccctttccagaggagaattcaacttctctgccttattgatgtcaggtttatccatttgacttgctttagccaataaaatgtgagcttttctagccagcacaaggttcattttattctctttttcctctaccctgatatcagcaatatcagctccaccagcctggatctaggagagcacaaggcatggagaaataccatggctgacccaggaaggccaggcgagtgaaaaataaaccttagtctttctaagccactgagatttggggagcatttgttaccacagcataacgcagatgaccctgactgatacaaatagagaagaggtccccaacctttttggcaccagggaccggttttgtggaagacaatttttccatggacaggggtgggggatggtttcaggatgattcaagcacattgcatttattatgcactttatttctattattattaccttgtaatatataatgaaataattatacatctcaccataatgtagaatcagtgggagccctgagcttcttttcctgcaactagacagtcctatctgggggtgatgagagactgtgacagatcatcaggcattagattctcataaggagccgcacctagatccctcgcacgtgcagttcacaatagggtttgtgctcctatgagactctataataatgtcactggtaaatctcacaggaggtggagctcaggcaataattcaagtgatgaggagtggctgttaatacagatggcgctttactcactggcccactgctcacctcctgctgtgtggtcctgtacctaacaggccaaggactggtactggtctgtggccccagggttagggacccctgaaatattgtactgtgccctgctttccatctgagacttggatagaaaatattaatggaagtgcttcataccaacctgatatggggagcagcagtactgaagtggtgacatggcagaaatagacacaggagggactgaatccacagtttcctgtgagccccagagtgatggagaatagcactcaagtcagttctttgctgctaaatacctaaaaggaaacctgggtggtgaatgcagcagggacagaggccagcatccaaagattaggagggagaatcacccccaaaggaatgtagtgagccaggtgtttaccacccacccactctaccccaacacctgaacaccttaaaatctctttagaacctagatgccacacggagaaaatgagaggggcagaagcctaaatataaacttaaaatgactgagactgttgcatttgcccaagtttacctggaaagccatacgactaaattattcagtcagtgataaaaatagtgggttcagccgggcacggtggctcatgcctgtaattctagcactttgggaggccaaggcaggcggatcacgaggtcaagaggtcaagagatcgagaccatcctggccaacatggtgaaaccccgtctctattaaaaatacaaaaattagctgggcgtgatggcaggtgcctgtagtcccagctacttgggaggctgaggcaggagaattgcttgaagctgggaggcagaggttgcagtgagccgcggtcgcatcactggactccagcctggcaacagagtgagactcggtcttggaaaaaaaagaaagaaagaaataggaggttcaagatagaattcagatccgcttttacaaaaatagttgtatgtttgtctgcctaagtttgcagcctgagatatgtatacacacttcaccaagataagagaacattatggagactccatgagttcaacaactgtggaatgctgagggtccacctaggcaaagatgaagtcatgtgtggacaatgatagcagcttgtatagtagactaccttcccccaagcctgatgtccatgctatgcctagatattggctttgctaaggcagccatcaaggatctgcttctagcaacacattcagctgcacaaatatttattctagtaaacctgaaaaaggaaatagttgtaaataaatcctgccagaattttcttcattctatgcactaaacttttttccttgttttgcaaaagaaagctgtaatatgacactaacattctcatctccgggattgattttttttcaattggatttgaggggcactggccagattaatatttaatgtttttgtgtaatttgaatactaacacagtagactaagataatgtgaatgcactataaaaaaaaatcagagctttaacctttagttcctctgaaatagagggctgatgcctttaaaatggaagatcaagggctaagaagttttcaggctttgatgtcatacagtttgaaataaaaaatatatacgattaaataggattctataatattatgacagaaacatattaaaacaagtaaatcacacaattttatacttcactttgaaagaatttagttattacttaccagcaagaaaatatgtcatgataaatgatcttgctataatagattttctaggaggttcaatattaggttttttaattacttggacatggcttactttcattatgctgtgttgtgatagaactagtatagcaaaggcgaataacaatgacgggtacaaagtataaatatgagtgaggaaaataatgaccaatgtgtgtagaaataagcatataagtaaaaagttgtgaaaaacaaaagaataaaactgaaacatgttataggacttaattaaagtgcccatgacttctaagattcgctgtcaagtttgaaaacttttttttttgagacggagtctcgctctgccaccaggctggagtccagtggcacaatctcggctcactgcaacctccacctcccggcttcaagcgattctcctgcctcagtctcctgagtagctaggactacaggcgtgcaccaccacacccagctaatttgtgtatttttagtagcgatggggtttcaccatgttggccaggatggtctcgatctcttgatctcatgatccacccacctcagcctcccaaagtgctgggattgcaggcctgagccaccgcacccagccttcaagtttgaaaacttttatacgttctaccatatttactagttaaaaaccttggccaatttcactcagtctctacaattataaatggagtaatagtacctaccaccaaatgcagtggaaattaaaaagataaaatatattgtggtaattttttaaatgtgcttattacctggaaaaaaacaattatttcatgatgataaaatgatcaactcatcaaataatgaaccttcaaactatatgaaataaaaattatcagagccaaagggagaaatagacaaatccctaattatagttggagattctaacacttctcaatagttgataggacaggtagacaaaaaaataaggttatagaagatttgaacaaccccatcaactaacttacctgattggtgtttataaacgttaacacccatcaactacacaatatgtgttttcaagtacacatgtaatattcaccaagataggctatgtattttttaaattttttatttccatagtttttggggaacaggtggtatttggttgcatgagtaagttcttgagtggtgatttgtgagattttggtgcacctttctctcgagcagtatgcactgaacccaatttctagtcttttatccctcacccccttcccaccctttccccttgagtcccccaaagatagaccatattttgaatcataaaacaagtttcaataaatctaaaataattgaaattattctctggccaaaatgatagtaaattagatgccaacaacaaaaagatatctttaaaatccacaaatatttggaaattaggtgacacacatataaataacccatggatcaaagaaggaatcacaagagaatttagaaattttgaacagaataataatgaaaacattacatatcaaaatttatgtgttgcagccaaagcagtacttaaaaagatgtttatagttttaattggttatacagatgcttctctacttatgatgaggttatgtacagatagaccaattttaaagtaaaaaaaaaaatcataagtcaagccataggtgccacctgtattagaaaaaaataaagtgaaaaaattaacgatgtaaacatctgccttaaaaggctagaaaaaagaagagcaaaatcaacccaaagaaagtagaaaatggaaataaaagaacaagaatggaaagcaattaaagagaaaacaaacagtagggaaaaccaagagttgttctgttgaagagattgataaaactgatattctcatagtagattggtcaagataaggaagaaaaccccacaaattgtcaaatcagtaatgaaaggggaacatcactattgttcctacacacatcaaaaagttcaaaaataatattagataaatttgacaagttgatgaaaaggacaaattcctttaaaaacattgagaggtgaagccagctgagcttctgggtcaggtgaagacttggaaaactttcgtgtctagctaaaggattgtaaatgcaccaatcagcactctgtgtctagctaaaggattgtaaacacaccaatcagcactctgtaaaaacgcaccaatcagtgttctgtgtctagctaaaggattgtgaatgcaccaatcagcactctgtaaaaacgcactaatcaacactctgtaaaatggaccaatgagcactctgtaaaatggaccaatcagtgcactgtaaaatggaccaatcagcaggatgtgggcggggccaaataagggaataaaagctgaccaccccagctagcagcggcaacctgctcacgtcaccttccacgctgtgggagctttgttcttttgctctttgcaataagtcttgctgttgctcactctttgggtctgcagtacctttatgagctataacactcaccgcaagggtgtgcagtttcattcctgaagtcagcaagacgatgaacccaccatgaggaacaaacaactccagactaaagaggtgtgacactcactgcgaaggtatgcggcttcactcctgaagtcagtgagaccacaaacccactggaaggaagaaactctggacacatctgaacatgtgaaggaagaaactccggacacaccatctttaacagctgtaacattcactgcgagggtccaccgcttcattcttgaagtgagaccaagaacccactggaaggaataaattccagacacaacatgacttaccaaaactgatagaaaaagcaataagatgtctggctagcattatgcttatcaaagaaattgaatacgtaatggaaaacctcatgaacagaactctaggtccagaaggcttcgctcatgaattgtatcaaatatttaagaagaaaataataattatcttataaaaactttctgaggaaatataggaaggaaaatttctctacctatttcatgaggcccgcatagctttaatagcaaaacctgacaagaagattatgaaagaggaaaattatagagtaataccatttatgaagatagaatacaaattctccaaaaaattagcaaataaaatgtagcaacatatgcagataatatagcatgactgagatttaactcattaatgtatggttgtttcaacattttaaaaatcaaagttcagtaattcaccagattaataaaataagcattaaaattatatcataatttcaatttatgacaaaatacagttggcaaaagctagcacctgtggattattgttttttgatttgttttgttttgttttggtttttgagactgagtctgactgtgtcacccacaatggagtgcaacggcagatcttggctcactgcaacctgtgcctcccaggctcaagtgattctctgcctcagcctcctgagtagctgggatgacaggcgcccaccactatgtgtggctaatttttgtatttttagtagagacggggtttcaccatgttggccaggcttgtcctgaactcctgacctcaggtgatccacctgcctcagcctcccaaagtgctgggattacaggcgtgagccacctcacctggccccattttttgatttaaaaaaaaaaataccagcaggacatggtagctcacacctataatcccaacactctgggaggctgaggtggtgaattgcttgagtccagatgttcaagaccagcctgggcaatgtggcaagaccccatctctacaaaacatacagaaaattagcagggtgtggtgtggtggcacatgcctatagtcccagctactcaggagggtaaggtaggaggatcacttgggttgaggaagtggaggttgcagtgagccaagatcacgccactgcattccagcttgggcaactgagcaagaccctgtctcaaaaaagtaaaaaataaaacttagcaaagtagaagtagaaggaaatttttctcagtttgataaaaggcatctatgaaagacctactgctaacagcatggctaatggcaaaatattgaacactttatatgtaagatcaggaacaaagccaagatgtttattttcactcctcctatttgacattctacaggaaattctacctgtgtaaaaaagcagttaaatgaaataaaaagtcatccagattggcaatacataaagagctacaccatgttgatgggttaagattttaattctccccaattcaatctgtagaatcaacgctatctaatcagaactccaccaggcctttttgcagaaattgacaaaccgattctaattttatataagaaagcaaaggaccttttggatgaagctggaaaccatcatcctcagcaaactaacacaagaacagaaaaccaaacacctcatgttctcactcataagtgggagttgaaccatgagaacacatggacacagggaggggaacatcacacacaggggcctgttgggggttaggggaagaggagggagagcattaggacaaatacctaatgcacgtgggggttaaaacctagatgacaggttgataggttcagcaaaccacaatggcacatgtatacctatgtaacaaacctgtacattcagcacatttatcccagaacttaaagtaaaatttaaaaataataagtttaaataaaataatttttaaaaagcttctttattccatggttttctctcgaaaggaaggaagagagagagagggagagagagagaaagaaagaaagaaagaaaaagaaaggaaggaaaggacctaaaatgaccaaaaaaattttgaaaaagaaatcaaagttggaggatttatactacttgatttcaaggccataaaattacagtaatcaagacagtgtgatattgaggcagggttagttaagtagatcgctgggacagaatagagtccaagaatagtcttccacatatatagtcaattgattttcaacaaaggagccaaggtaattcaatagcgaaagcatagtctttcaacaaatggtaccaaaacaactaggtatctatgtggaaaaattagatgaacctccacctcaatttcataccaaaaattaattagagataaatcatagacctatgcataaaatgtaaaattataaaatttctagaagaaaggttataggacactataatgagagaggcaaaaatttatgagacaagaaacaacactaaaagaaaaaaattaataaatcagacttcaaaattataaacgtctggtcttcaaaagataccatcaaaaaaatgaaaatgcaatccatagactgggaaaaaatatttcttctacacgtgtttgataaaggatttgtatctggaatacacagagatctcctaaaaattaataataaaaagataacccaatttaaaagtgagcaaaatacttgaactggcactttgcaaaaagaatgtaaatgaatggctaatagacccacagaaagattatcaaaaggcaccagggaaataaaaattaaaacttccatgagatatcactttgcatatactataatgactaaaattgaaaagactaaaaatgtcaaatgttggtgaaaagtaaaccaactaggagtctcatacattgtcaatgggagtaaaaaatggtacaaccattttgaaaacctatttggcagtttcttacaaatttaacctactaagtcctactctatgacttagtaactctactcataattgtttactcaagggaaatgaaaacacatgttcataaaaagacttgtatagtaacattcatagcagctctatttgtaataggtaaaaactggaaacaacacaaatgtccatcaacaggggaacggataaataaattatacatctacacaatggaatgctactctattaaaaaagaagcaatggactatggataccacaatagctgggacaagtatcaaaagcattaggatgaataaaagaagacagacataaaagagtgcatagtgtgttattctattatatgaagttctagaacaaacaaaactaaagtatagtgagagaaatcagagtaacggattcactgaaaagagtcacaagacaacttctgggggtgatggaaatgttctatattatgattttttttcaaaatcattgatcttcccactaaaaattggtatttgttatgattctctctactttggggtatatttttcatttctgtaataacattttatggaaattataaaatataaaatgattctagttagtgattttaatggctttttttccatttatattgtggatgaagtcccaaaggcctagaataaaatagatagcaggattctgtattcttaaatgacctgatagaccccacttgtgcaagtataataaatgattgtaaaactatttctttcagcactggcaatctgtcccctccagtctataaaagaatgcaagtggaagaggtcaagcaaggggatttctttgaaaaatataaatgaaataggtgctttatctcccccactcccaagcaaaagagaagtgtgtgtgcttcccctagatctcaagcaaatgagaacaacataacattcaataaacctgacatatatgctccagagccttgctactcaaagcgtggtgcatggagcagcagcataggcatcacctagttgcttgttagaaatgcagaatctcagtccccaacctagacttgctgaatcagaatctgcattttaacaatattccccaggtgactggtataggcattaaagttcgagaggcactgccctagagtttaggtgagcataaggatcagaatgaggagctgtgccaagttgccctgagctggctgagcagagaggagaaaaaggccacattgggagcaagccgcactttcattcatggcagcacagaggctgttcgtgttttcatgagccaaaaggtattcacacagtgtgccatcagcctgaggctggatttaaggggaatttgctgcagaggcctccttgagagcaacgtgattcatagggggaaatacaagaggctagggtcaagactggagaagtgtggaactaactacaagtaaggcatttctgactcatgggaatttattctaattgtcgggggagggaaggagtgttatctctgagaaacccagaaaagcatcctatgagaaaaagagacagcaattgagtccctgtaccgacggacagtatcagccttagaatatgccctttttcctgttcctctaactacctgggttagaacatggagagattcgaaactaaggctactgactagagggacacagacaaggagaagaaaatgaaagacaaccagactcccctcttccatttcagtttcttgacttgaaaaacgcaaaccttggaaggagagaaggtttaattttgaatgaaattcagaaatttaattattataccaggtaggtcattatagttactgaaacaagactgttctttgtctgaaaataatcacaagatgcctagttatctaataacaattagaatatttatgagacctgtccaagatttcacccaaaagataggtaaaaggctagactatatattaggtttaaatgggtaatttgggaaatactgtatttatcttctgttcacatgtgagttcatcctgttaaaaaaaaaaaaactaaaaatataggaagacactttaaaaagaaaatatgtcagtataaaaacagaactcctattcagtaaatggcactgggaaaactggctagccatatgcagaaaactgaaactggaccccttctttacaccttacacaaaacttaactcaagatggattaaagacttaagtgtaaaacccaaaaccataaaaaccctagaagaaaacctaggcaataccatccaggatataggcatgggcaaagacttcaagacaaaaacgccaaaagcgattgcaacaaaagccaaaattgacaaatgggatctaattaaactaaagagcttctgcacagcaaaagaaactatcgtcacagtgaacaggcaacctacagaatgggagaaaagttttgcaatctacccacctgacaaaggtctaatatccagaatttacaaggaacttaaacacatttacaagaaaaatacaaacaaccccatcaagaagtggggaaaggatatgaacagacaagtcacaaaggaagacatttatgcagccaacgaacatattttaaaaagctcaatatcactcctcatcagagaaatgcaaatcaaaaccacaatgaaataccatctcatgccagtcagaaaggcaattattaaaaagtcaagaaacaatagttgctggtgaggctgcaaagaaataggaatgctcttacactcttggtgggaatgtaaataagttcaactactgtggaagacaatatggtgattcctcaaggatctagagccagaaataccatttgacccagcaatcccattactggctatatacccaaaggaatataaatcattctgctataaagacacatgcacacgtatgtttattgcaggactgtttatgatagcaaagtcatggaaccaacccaaatgtccatcaatgatggactggatatagaaaatgtggtacatatataccatggaatactatgcagccacaaaaaggaatgagatcatgttctttgcagggacatggatgaagctggaagccatcatcctcagcaaactaacacaggaacagaaaaccaaacaccgcatgttctcactcataagtgggagttgaacattaataacacatggacacagagaggggaacaacacacaccagggcctgtcgaggggttggggggtgaggggagggaacttagaggacaggtcagtagatgcagcaaatcaccatggcacacgtatacctgtgtaacaaacttgcacgttctgttcatgtatcccatttttttagaagaagtaaagaaaacaaaaagaaatgaaaagaactagaaataaaaaattgagtaactgaaattttttaaaaaacttaaaactttaaaaacagccaaaacagagagttaatgaactgaaatataaatctaaagaaattcatgtgactggagagaaaaagggatgaaaaatgtgaaagagagatgaagagatatggaaaagataaagagaaggtcaacatgtttcagaaagggagacaagagagaatgggccaaaagaaatatttttctgaaacaaatgactcggtatttttccgaattgaagaaagacatgaatgtttagattcaagaagcacaactacagtatctcaaactattaaatttaacacacacatacactgaagaataagtaagccttcaaagcaaccagtaagaaaaggcaaattacttagactcataacagacttctcaagagagaccaggtagaatatggaatatcattaccaaagagttgaaggaaaatattggggaaactagaacttaattttcagctaaagaattattgaaaactgaaggttaagtgaggattttgagatgaagactaagcctcaaagagctactaaagaaagaataacatcaaacccaaaaagaaatagtgtgtgcaaaaagcatttttcctcttgcaaatggtaccaacatgagtaaattaaggttttaaaattttcgcttttataagctataaaagacgtaaattcgaataatcattgtctataccagacaataagtaaaaataacaattaatcagggaagaacatgaaaaaaggaactaaaatactaggcaagaaaaacataaagagagagtgaacagagattggggatgggctaaggcataaagtctagagttcctatgttattgaagagtagcatagagactttttattaattctggatttttctaagtcaggtaaaaagtaaagaggttaagagtaaataccaaataaaaaggaatagaaggaaataaactccattaatccaatagaaggaaaggacgggggaaaacaaataagaaaaacagcatggtttatgcaaaacacaaattaggattatagaaataaatccaaatatatcagtaatcacaataaatgtaagcaaaataaacaattgggttcaaatagagatattgcaattaaaccaacaaatccagctacatgctacttgaatgagatacgtttagatcatcataataaaaaaaatatactgaaaaaatactaactaaaagaaagcctgtgtaactctattaatatccatcaaaagaggccttaagaaaaaatgtgttatttggacaaagagggtcaccacaaatagaataattcttcaaaaagttactttgctaaaaagcaagattttgtccataaaaccattttctcacaactttcattgcaacctttagacaagtgtttttactagggaaaaaaataacaacaccttcttatcccacctcccaagtaaatcatatctaaaattactaagttttgttctcgtctttctttttaaattaaccccatggcaatctaaaagctgcttaaaatgttcagtaatgtcaaaggaaaaggattcatattcagtacttgtgttattttatttattaaatcctgattgcaaagagcagcaaaaggaattacagatttaagtgagggttctctgtaggttgagaacactgattctcgtgtattagcaattacattaaatattataaaagaaaaatgtccaggcttaagagtaggtagtttcagaaacagagtaggtagtttcagaaacagagtaggtatttcttatgccagatttcaaatacgtattttataatccacaggcatttcgattagctttctttctttctttactttttctgtttgtgaaataatatgattgtgccatacataaagtagggataacaatacctgctctacctagcatggggctattgtgaggataaaactaaataatatacgtgaaagcccttcacacaccttttagtactatgtaaacatatggtgttattcttattttgaacccatgctcctatggtggattgttagtattaaaagttttacccgccacttcttaaacatgcctgtaatatctcacttatctgttattgtacactttgtctaacctttaagagtaaaactaccatcatttatacatttacataagtaaatggtaacggtaaaagagttcacaccattcacctttctatcactgaacatgctacatatatatccaaaatgaagaaaaactagtgttaagtgtttagtgtaaaaaatgatttttcttagtaatgggttttggagctcttgcaagcatgagaccagaatgtcttgccatgccttgctatggttttagacagggtctcattctgttgcccaggctggagtgcagtggcgcaatctcagctcactgcagcctctacttccccggctcaagccatcctagcacctcagcccccaggtagctgggactacaggcatgcatcaccacagttggctaatttttgtatttttaatagagacggggttttgccctgttgcccaggctcgtctaaaaccccagagctcaagcaatcctcccacctcagcctcccaaagttctgggattacaggcatgagccactgcaccgggccttattctgaattcttgagatggctgacatgagttagaaaatacaaaacaaacaaaaaataataataaaagaaagtaattgggacactaatagagtcattggccagaagtcagtgggaagcgtggtccccatgcagatggagtctgagtgcatcagccaggacagcgtatcaattatgctcctcacaacaggagatcagggcggtgcatttctataaccaccacagcaatggagaagccggacaacaccgtgactgggatgaaaataaatgtcactaatgagaggcagaccaatgcgtggatctctggatataatatgacaccacactgcttctgtggtattcctgccgaaaatgcataccctgaatctaataatgaggaaacaccaatccagattaaggggctatccgtaaaataatgaccagtattcttccaaaatctcagtcatgaaagacaaagaaaggctgagggactgttccagattaaaggaaacaagaggtgcgacaactaaattcaacagtgaccctggattggatcctgtgtgagaggggaaagaatgctataaagagaattgttgggacaattgatgagctggattatggactgcagatttgatgaaagcattgcatcaatattaaagttcctgaatttgaacactgtgttgtgattacataagagattattcttgttcttaggaaatatgcactgaagttgcatatttatgcaacttttatgccctttatgccttataatatttgtattatacccctttcataatagtatatgcaatcttctcttgaatagtttagtaaaataaattctgtaaatcagagagagaatatgaagggcatcttctgaaaggtacagtaattgagatgcatgtccaactgctgatttcaccaatgatcaaatactgcatcaaggcatgaaaagtacatgagtggtattaaaacacattattaacacggactctcttggcttctagccagtgaaatgaaagaggtgctgagtccagattttatgaggtaactatcttttaaaaatcatgatttggtgattcattattgcacatgccagaaactccaccccagtggatgcaattatctttttttaaaaaagctagttagataagattataattgtgggcaagctgacttggattcattaaccaatactgccacactggtttactgtaaagggggcagaaaggaggggataatcggctactagtgtatattttcagctatagaaatttaaaaatagatagtaggtcaagaagaacacaccaagacatttgagatgttcatatcaaactaattttcataattcttgcacaaaaaacaggcttattactttaagttttctctccattcacccaatgtgtccagtttatccttttcaaagcttgttcacgttcatttactcctagatattacatcagccttgtgaactacccagctgtaaagacaagctgcccactcaggcggttactactgtgtaaccttggacaaattacgtaacctttctgcactctcagttttattatccctgtattacagataaggattctgagacttggagcagcttaacaacttgtctaaatcactaagcaatttagtgttagagctgggaacttctatggggctttcgactcccccaccaaggtaaaaattattttccattgaacaccagcattatttgagttcaaggaatgttgcttaacaaggtgttgtttgaaaatagaagtcacatttctcattaagtaggctaaacatttttttctgccattcaattctattcaataagcattcatttggaaggcaggcagcggaaagggaaaaatggagaaggctttggagtcagaagctttggatttgaatccaggttctctacttactctgtgttcaattttctttttggtaaaatggagatcctgttatgtaatctgtatgtttgctgagatgagtggcaacaatagatggacatagtgtgcattcaaccaaatatagctttttaaaaatatgttatttgttgatagcctgctattcaccaggaactttactaggcacatgaaacacagagacagaaaacagtccttatggagggggctccaagaattagtaacggttctttctttttttctttttttcaagacagagtcttgctctgtcacctaggctggagtgcagtggcacgatctcggctcactgcaacctccacctcccaggttcaagcaattctcctgcctcagcctcccaagtagctgagattacaggtgtccaccaccacacccggctaattgttatatttttagtagagaaggggtttcaccatgttggccaggctggtctcgaactcctgacctcgtgatctgcccgcctcggcctcccaaactctgggattacaggcgtgagccaccgtgtttggcctagtaatacagtaagcatactaagccagccatatatgctgcaatggttttttccttggtgtgctttttggttgtatgtatgtatttattttaagagacgaaatctcaccctgtcacccaggctggagttcagtggcacggtcacagttctcagtagctgagattacaggtgtgggccacaatgcctggctaatttctattttattttttgtagagaaggggcctcaccatctcgcccagggtggtctcgaactcatgagttcaagtgatcctcctgcctcagcctcccaaagtgctaggattacaggcatgaaatactatacccagcctctcaatgtgctttttaaattgtgtttacgttcttacttttctaaaatgttttgtttttatataataaaatatatttggttattttatggttttgtgcagctttttttttttttttttttttggagatggagtctcccccatcccccaggctggagtgcagtggagagatctcggctcactgcaacctctgcctccctggttcatgcaattctcctgcctcaccgtcccgagtatctgggattataggctcccgccatcatgcccagctaacttttttgtatttttagtagagacagggtttcgccatgttggccaggctggtctcgaactcttgacctcaggtgatccacctgcctcagcctcccaaagtgctgggattacaggcatgagccaccatgtccagcctgtgcagctttaaactcagaaagtccttcttgacttctgaaatcacatcaatatttatttgtattttttcctagtccttttataggcttaatttttcacatttaaatctgtaatctatccagaatttatttggctacatggtcataaggtgctgaatagttatgtggatgacactggttgatgttactgtttcagttggcttttacccatttttgtcccaataacttgaccttctaagctgcctgctgtgaaaattgattgccatttttgaaaaggccaatggggaagaaatatatatctgtgagttttatcccatttagttgcttcagttttaatgtaggataataaatgttggctcttgtctcaatcacataaatgtggaaactttgacaagagtattttgcgtaaaggctaaaggtcagaacctccctcatcctggagaaaagtgggaggagggtggagtcatgtcgttgcctgttaactccccacctccaaacttatctgcccatcacctaggttaaaaccctatctgcctctgccatctcttctccttacacttaccttttccaggtggaccatggggccatttatgcaagggagataaaagtctagtagaaggatcatcactgatccactcaccccttcctccaactgttactatggttccttaaaagctgttcaagaaacttggctgtcaagggataagatacaggaagcagtctttatgttattctggcttgaggttgaaatgcattttccccagagatcaaaccaggactttgtggctcattgttcagaaatgactttggacaatgttgatatcccctcatagtgcctcactggtcgtgcagggtcactgtgctggagtggatcaccttaaggctgtggcttagccctctgagcacactgtcaagagctgaaccttacggggtctatgccagtctgccttttgtgcccctcagggctggagatgggtgtcctgcttcatagtaagcctgcagggtggcgagagttctccctcaacgccaacgtccagcctggctcccctgacctggcttggagaaatgaggaaattcctgatgggttttttctgtccttgcaccccatatgttccgtacattaaacctacttatgcctagtgttccattattggaacactaagtatgtgggagttatttatatcctactgttcaaggtcattgccaaggtctgatttttcactcatgcaaaaattcaaaaagttgcaacctccggcatacatgggttttaattaaggaaatgttaggagcttaccacctgtaatcctcatggggtgcagtcgctggggctgggagagtcggaaggagcatcactgggactggtctcaacacaaactgctgaccatctctgcagggtctggatggaaaaaggcagatcagtaccacatgcactcaggcatttttacaacttcattttttcttcttgtgagatgggggccatgccactctccttgctctgttcccccagtctcaggctaccttggtccagaaacattcctccaacatgactgtatttactaccaccttccaaatgaaggcagtcgtaggagtgggcacaaagcaatcctgtctcagcgtccctcccatcagttcactctcccttcccctccccttcagtcttctcacgcccacccccacacaccgccctagcctaagggaagcagaggcaaagcacctcctggcatttacttgcaagaccctcctttcccaggcagcctcattaggctctaaacctttgtgatcccactcccaaatcttgattgtggtcacaggtgggaggctgagggtaggatggagtccttataaagtccctatgcagtttgtaagcatcagaatacagaatacagattttattagtggttacaccaagtcttgacaccttaatagacacaaaactgctgctggccaaggtcagagcatctcagagtgtgtgggtataggggtaatggggaagggatgatgcagaaacggaaagtcttggatatgcttcttttcttaaaattgtgagaagaggcaatatgcatgtgatggaaatatgcattcaacccattcatcctaacaaatgtatatttctcaataatagaagctatgaaaggagaccctcccctccaaatgcatagttcaaaagcattagcccttaagaaaatgacagggtaattagcagaaaagtcttgtgagaaacaaaaatatacagttgagaaacaaaaatatacagttgatcctccagatccatgggttccttatctgtggattcacccaacagaagaaatgtatggttgcatctctaccaaacatgtacagactttttttccttgtcattagtccctgaatacagtataacaactatttacttagcatttacattatattaggtattataagtcatctagagatggtttaaagtatatgagaaaatatgtgtaggttaggtgcaaatattttacattagggacttaaatattcatggattttggtttccacaggggtcctggaatcaatcctccatggatatcaggggataacagtatatacagatagataaaacatatatgtatatacacacacacacgtatatatacacacacatatacaatacatacacatatgttatataatacatattttatatatatatatacatgcacacacgccaatctagtgtatttctgagagataattttaaggcaaatttctcgttatgtttgtgattgtgtttaattacagggtaatggcatttctctctctctctttaatctggatggctgcagcagctttgtgactgatttccctgcttgcctccctccacctcaacccatcctccacagttctgccctctctggtcatgcagttctcaggtctaaagccctccctctcatggcatacatactcctgtggccttgccttgtcccttctctagtcctgtcttctgtcattttccctgtatacagcctatacgctgaccacgccaaagcatcgttttcctaactgaccaggttctctctctgatgtccaggcctttgccattgttaccctcatccatcccacgccatggccatcccatgccatggccatcccacgccatggccatcccacgccatggccatctggtcaaatacaacatattcttcaaatctaagctccagcattgtctagtctcctcaacaggcaggcagaagctatctccattctgctctcatgtagtaccttgggctgaccttgtattatctttgtttttttctgtgattctctctcccactggacaccaaacttggtgagggcaggaatcttctcactcattccttgcatccttagtacttatcacagtagtggaaatcaacaaaaatatgctgagttaatggtctttgatagcatcatcattctccttctacatatcatgtagttacctagtgtttcccaaaactaatgatgcttatcacttcccttgtttaacttgtcacctaggaaacttccatgcttattagctaagtctatctttcaaaccatgcctccctgccccccaaccagccagacgaaattaattattgatagcagcactctgattttcccccaaaggcaaaccaagagctaagactcaacccactgtcctgctatcataaataacacatgtaggagggcacaaacacagtgctatgtccgaaaggcgtgattaatacctgctccctctgtagacctagcatagtgggctcacaagtgaggatgtaaattcactttttcagagcaaatgttcctcttgggggacatccactcaacctcgaggacagagtaatgaccacagcccataggccgtgggagatgagtaatttactgctgctaggcaattagtggtgctagaaaaaaaattactttcatttaaaattctctttaagccatatgtatcatggctcatgggataatttatgtatcattagaaactaagaaacatacatcaccctaataaattgtctcccccattcaccatagccagtagctccagatgtctttaagaagtcaaagttttgctgtccttgttgtgtaaggtggtgtggaaatgcttgtctgtaactcgtttagcttcatattcactccctggttctctggcagagacagatggcaagagaagcatttgccatctttttcatgcactggtttgcagtagcacttgctgtaaatgagcccatagtaaaacaatcacgagttgtattgtttttcctaacaaggctggaggtcatatggcaactgggcaaacatgcttgagttcagaatgtgaatcactctaaaccaagtctcagttaagggtaaaacattaaatggaaagacagaaaatgaggcttttcactgatggagggtggggcatgggacaaaggaaagcagctcggcacccagcctgcaggcacaatgtgggaaccttgatcaatatcaccaaacacagaagtctgatctccatctttgtaaggcaaaaagtggcgccacagccacttatttgtgaggacagaggaaaatggtgtacccaaatgcctgttaaaaagcaaatccatgaaaagacgtggcagaaacttaaatgtatatcactaagtgaaagaagccactctggagaggcgacatactataggatttcaaccttatgacattctggaaaaggaaaaactatggggacagtaaaaagaccagtggttgccaggagttcaggtatggggtggtggtgagggaggaatggctaggcagaggagaggatttttagggcagtgaagctactctctatgacacgataatggtggatacatgttatacatttgtccaaatccagagtgtgcaacaccaagaatgaccacaatgtaaactatggactttgggtggtaatgatgtgccagtgcagcattcattggttggattgtagctaatataccactctggtgtgggatgttgataatggcagaggctgtgcacatgtgtgggcaggagggatatgagaactctctgtacctgcctctcaattttgctgtaaatcaaaaattgctctaaaaaaagtctgttttttaaaaaagcaatgccaactcagattcatgcttttcttttattaaatttattaaatttaaaagtacattcctgggttcctaggcttttctttaaaaaccatgctttaatcactgagttatataatcctatcatcaagattcactgcataacttgtagggcccactgaaaaatgaaaatgtggggtcccttgttcaagaaatattaagaatttcaagactgatggaggaccattaagccaagcacaaggttctttgagaatgcacggattacgcagccacaaagctggccctgcatgtcagcagtattcagagcctggaacatctcaactgtaggaaggaaaagcagaggtgctcagtcagcacctgcatcaagacacaggaccagcagtttcttgttcctgtgcctattgtccttcctcaagtgcctgataccagaatgctgtgtttagggtttagcctgtaaggtcctcattactcttcatgcaagagctacttcatgcatgctttacaaactgtgtgaaattctagatatttggtagagaaagactcaacctcattgcaatatagtaggctacccttatgcactttctgtggtttcagttactagagatcaaccgtggtctgaaaatattgaatggaaaattccagaaataaatacttgataagctttaaattgcttgccattcggagtggtgtgatgaaatctcctgctgtcccatcccatccatcctggcacgtgcatcctccctttgcccaatgtgtccatgctgagatgctcctcatccattagtcatcaacatcgtctgctcctgacatctaaccattgacatcaccatggctcaatgatctgggacccccttctgatgtatcattggaaggtcagtagtggcctatcgttacgtcacaatgcctgtgtcactcacctcacttcatcacatacacattttatcatttcacatcataagaagggtgaatacagtatagtaagatattttgtgagaccacatccttataacttttattacagtatagtgttataattgttctattttattaatatagtatattgttattataattgttctattttattatcattgttaatacagtatgttattgtaattgttctattttttgttattgttgttaatctcttactgtgcctaatttataaattacactttatcataggtatgtatgtataggaaaaaacataatatataaaggttgagtatcccttatccaaaatgcttgggaacagaagtgtttcagcttttggattttttcagcttttggaatattaacatatacataatgagatatcttgggggtgggatcccagtctaaacatgaaattcatttatgtttcatatataccttatatacatagcttaaaggtaatttcatacaatattttaaataattttgtgtatgaaacaaagttttgactgtgacccatcacatgaggtcagctgtgaagctttccacttgtggagtcatgtcagcaaaagtttcagattttggagcatttcagcttttggattttcgaattagggttgctcaacctgtatgggattcagtactgtttagggtttcaggcctgtactgggggtcctgaaacatattctctgtgaacaaggagggactacatggttaaaatgttcaaacttcaagtgaagcaaagcaaaaataaaatttgcccaagttacaagaaaataaaaatggagctgattagcagtaaaatgaggtctattcgtctaatgttactgcaatatgtggctgtcacaagtgaattgttcaggtatctggaatcgtacctgtaagcatcacagctcttgatattgtcaagaaacaactctgtggccaagaccatggtggcagtttattgaatatacgtttccaatgactttagaaaggcccctgaacatcaatacagtgctgggctatatatacatatgtgtgtgtgtgtatatatatatatatatatatatattttttttttttttttttttttttttttttgagatggagtcttgctctgtcacccaggctggagtgtagtggcacgatctcggctcactgcaagctccgcctcctgggttcacaccattctcctgcttcagcctcccgagtagctgggactacaggtgcccaccaccacgcccggctaatttttttgtatttttagtagagacggggtttcactgtgttagccaggatagtctcgatctcctgaccttgtgatccatgcgcctcggcctcccaaagtgctgggattacaggcgtgagccaccacacccggccagtgctgggccatttttacatgaaggtccacagggacaagagggcgactggctacccctagatcaaaaggctgggctattgtgcttttcataaacccatgattccaagcgtggtcttccactggatcagtgtaccctttttacaattgttggagtgtaggtcctcagcaggagtgggggacagtgcctcgaatcgcacgaagagcttttcctaactaccctctctcactcttttgcattcaccactttgagtcagcaatgggttgagaaggaagtgggcctgaattttatacattctgacaagtttggttaagggggtagtcctagtagaggactgagggtctcacccagggtgaaggactgaggctttgtgacagcttgtgcacctcctggaccttttctcttccatcaggactgacagctgtgccccagccatttaggctgcttctccttgctgctcctctatggctaggtgtgagcttcttagggctgaactgatcattgcctccaggacaggactggatgggggacttttgcacacttaaagttctaactagaacaaagtccaccagaagtgtgtggtgagtgcattataaaataaaaatcttcctggctggcccagatgaacagatttgtacatttgtagaccatgttagtaagacatgttttttgaagagctaatagtcattgagcacttaggagtcacgccctattctatgcactttacgtttgactcattcaatcctcataatcccattttatggatgaggaaatctatgcatggcatgacctgtccaaggagactcaggtagcagtaggaagaggacagctgaggcagacaggttgcagaagcaaagtcgtgtctgcattattccatggtcccatggaaactattgcaaacatgttagagaatcaaagggaaataacagctcaggaatgaattcaataccaggctctgcataaattatgtgacttaagtgccagtcttggttgaggtttatcatcacttagaggaagaaagtaacttgttcagggccttaaagttaggttaagctggaattttaactcaagtctgtctagatggctcttatgcccacactctctcctaccagctcaagtgaaaaagctttaagatgttgtatatggttttgactgtgtcaccacaagccaaggagttaaattcaagggttggagatcccagaatgaaaccagcaggcagaaagaatgtgtctcctaactttcacagggaaccctctaagtggaggcctatgataagagagaaaatgatttatcccagatgcatctattagcagaattatgagacaacattgttcaataaaatccaaataacaatacagttgataaagtgacaattgtttaacattattaaaaagggagaaaacaatgtttctatagatgtgagctaaccctgaaaaacatttttctttctaaaactgttttgtccagctggagggaaaataaataaaagaaaacatgaaagccaatagaagaataatatgagcatgaaaacccatcattaatcttctattcaaatggcagtcacagctgcagaacaaatgaaagcttttttttttttttttttttgagatggagtctcactttgtcacccagactagagtgcagtggccggatcttggctcgctgcaacctccgcctcccggattcaagcgattctcctgcctcagcctcctgagtatctgggactacaggcgcctgccaccacacccagctaatttttgtatttttagtagatacagggtttcaccatgttaatagcaattcttgggttgggcgtggtggctcacgcctataatcccaacactttggcaggccaaggcgggcgtacacgaggtcaggagatcaagaccatcctggccaatatggtgaaaccctatctctactaaaaaaatacaaaaaattagccaggtgtggcggtgcatgtctgtagtcccagctactcaggaggctgaggcaggggactcgcttgaacctggggggcaaaggatgcagtgagccaagatcatgacactgcactctagcctggcaacagggcaagactctgtttaaaaaaaaaaaaaaagagagaaagaaaaaaaatagcagttcttttcagagacaaaactaagtatatgacaatatactcagaagttaacaagtggtccaattacgtatctgattcttgggtcaggcaaatgaccccagaaccaccagtttaatggtgtcttagtttaaaaatcaaacataactcttcacatatcttgtaaaaaagaaagtttaaaataattttagcaaagtactctgtgtgtagacatgagtcatctactctcttatatactttaatggtattaactgcatgattttccctgcctatagttggtgcaggcatatgaagatggggtcagagcaaggagggggaaggtgacatgagaaggaaaattgggtaggggcttgtggggagggcgactgaggccaaggagaaagaggaagagccctggaaggagggtcctgcttaattcaaattctcctcttcaccaataactttaaatagttggccactgagatagctcaggtatgaaataagtctatgcatgaagtgatcttcatctctcaagctatcatcataaatatttattgaataacttctatatcttagcccctgtatatccttcactgcttttaagaaattgggaaatcccttttggagaccaagtggttaagagagatgtgatctgaatgtttcattaggtagttgtttagagacaatgcataaaatagtaagaatgccatatggaatgatgaaaataaatttatttagagaaaatatatcatatttcttttctagacaaaggtaaatacccaacccagcagagttcaattgttaaaatgagtgaccgctgctacaggtcacttccacatgtcatgtgtgtacaactgaccattagcacaagtgacgaggcagccaaatgattccatttcttatttatcccactggctatgccaacagttgcttcatatcatgctgaagaaaacccacaggaaaacaggccaagaaatgtccactgcatgagcatgaggtctttttgttgatttaagggtgatttttttttttttttgagacaggatctcactctgtcacccaggctggagtgtagtggcacgatcatggctcatggcagcctccacctccagagctcaggtgatcctcccacttcagcttcccaagtagctgggactacagatgcctgccatcacgcccgactaatttttgtactttttgtagaggtgggtttttgccatgttgcccaggctggtctcaagctcctgagctcagtctgcctgcctaggcctcccaaagtgctgggattacaggtgtgaaccactgtgccaggccaagggtgatctttaaacagcttaatagttcaccagcttggactctctagattggtattgcaaccagcttcatttctgtacagaccatgaattaacaaatgtcttcaaacccaagaatcacctttaaaacaaatccttatttgacaataaacacacatatttaattacatggttaaagactattatttcgcacactctgaaatgatctttttccattccgagatcatgtcataaattaacagactaatagagaattttattatcgctgttatattgcactaatgcccagtagtagcccatggtctattctttatcattcaagtttataaaaagtaaagctggaacttcagtcatggtcagctggctaactgtgagtcctctttcccactccacaattaaataagagagtcattttggaactgcttgtccaagtcatttggggttcctctgctcagccgctggataaggatgcctgaactttaatcatctttagcagaactttagctaataggtatcaagtgatcatcacttcttttcctgtaacagaaagggaaagaagaaaagaggaaagatacaatactttaacatctttgaggagcaataggaatactctatattctaggcccgtagattatagacatgttgagtgaaacatagaagaggaagaaaaattaagacaggcaaggtattctgattatttaccaacattcagaaaaaataagtaaataaataaataaaggcaatgtacactgtttgaggtttgagcagatgcttttggaaacactgtgaggagtcacctgtctcttaagaacctccatgcccccagggaggggaacatcgcacacggggaaatgttggggggtagggggaaaggggagggagagcattaggacaaatacttaatgcatgcagagctgaacctagatgatgcgttgataggtgcagcaaaccaccatggcgcatgtgtacctatgtaacctgcacgttcagcacatgtatcccagaatttaaagtaaaattaaaaaaaaaaaaagaaaaatatatgttacatttaggttttactcaataaatacattggtttgtttctggaaaaaaaaaaagaatctctgtgtcccttcgctaacaaggccttataaattactagaacagccaattttcctccttcactgcaatagaggaaggtaaaggttaactctgcatctgttcaaccaagcatctctctccaaagaaccacatcgctttagaactggaagaggtttcagaggtcatctggtccatctaagaggtttaggagaggtcacaggacacacttggttaatggcagtgtccaaaatgaaaacccaggtgttctgatgctcaggctagaggctctgtcaaaaactcaaaggagaatcaaatgtgtgctggttgttggactgctttgttgaagagtgaccacagccgtgctctgcaggaagcagcactgggatagcaggtgtcatctgtcatggtcaccagacagggggcacaaaaaccaatctttgcagagatgaatctttatgttcatctttagcctccattcacagccttcctcaattttagtccattcttctgtccctagcttttattttattttttaagaggcggggtctcactacattgcccacgctgatctcaaaatcctgggctcaagcaatccttctgccctggcctcccaaagtgctgggattacaggcacgagccaccataaccagccccattcctagcttttaaacacatcaagctatacttaattttagatggagtcaaagccatcacttgttctcaaggccccattacaatccatttccttccatcacagcctaggcccttcattcactctgcagggtccatgcaagccccctgggatctaggctttggtctgatgattccactgaaattgctatagctgacttcactcaggaccatcgtttggccaaacatagttacagctacctgtctttgttttttgatatcctctttttcaaaactttcatcatcctagttcttcagttgatctccttggtgggctctcttgttccctcaaattctttcactcttcatgaggggcagaccctccgtctcaccatgcatcttctcaacaaccctcagcacactttagggcaaatggtctgctgctgttgctccttgcgtctcaccactcagacccaatcttacccaaacgtcttggggtccacgccttaaatctttcacttgttccatagggctgcatgacaaaacatttaacaacctcccaggactttgtgtggcacaaaccaaggtccaaacaccaaagacctatcgtttactttttagaattcatgactacatttttcaatgaagtttatcccccttatagtaaaaaagagattttgagagactttccttatacaaggtacctcttaggaggcagctgcctattaagaaaattaatttcctttatcccagctttcacagcaacaatttaatgctctgagaaaaaaaggtgtgattctgaaaacaactcttctcagatctcattttctatttaccagacattctctggatctgctcagtcatatcattgtaagtcccaagatgctgtatgaattgattaacagaaaaatgcatcctgtggttttaaatagcaattatgttctcatagcttccttcaggaatttgggttacagagtccttccaaaaagaaaaaacatatgtagggtatacttttagttacaaactggcacccctgacttcagatgaaagcaaacataggcacattaaaaaaaaaattgtcttcacctgaccccattctagtccacaaatcactatgtaatatgctttgtccactgaggtctagaccatttctctacatgtcctgacgaacaacaggcaaagcacagctaggcaaggaagagctactggtgtgcacggataagcaagcacttggacagcctcttcgcaaggaagtttcctgctctcatcaagaaagattgcttgtaccacatactgtgaaaagggaaaacacctctgacactcccagagtttcacctctaaaaataagagctttgacctcttacttgggccacttaagagttcagcctcttgactttaaggacataatttatgccttctcttaagagtcttatagtatttctaagagattccaatcacatcgtgtagctttctacataaccctgttttagaagaaataattcatttctaaagccaatttcagtgggaggaaagaaaagaaaggtgaattatttcccatgataagctggtctctgaatgtaatggtaatcttggaggggctctttcttaagacaacagaacagcccatctcaggagcatggagaataaacatgatactgacctcctccgacagcagatgcaggacaggaaggctgaggactctttctgatactcttctttgctactgcattccttcaggaattc

SEQ ID NO: 75 - DNA, 161874 bp, Homo sapiens
gaattccttgaagctatggttctggatgtgattctgccaaacagatctactttggaaggcctaccagtctgtggtatgcagtggcagaacagttatttaaattatcacttgtaggccaggcatggtggttcatgcctgtaatcccagcactttgggaggccgaggagggtggatcacctgaggtcaggaatttgagaccagcctggccaacatgctgaaaccccgtctctactaaaaatacaaaaattagccaggagtggttgcagatgcctgtaatcccagctactcaggaggctgaggcaggagaatctctcgaacccaggagccagaagttgcagtgagccaagatcgcaccattgcactccagcctgggcaagaagagtgaaaatccatctcaaaataaatacattgtcacttgtagtcacctgggagaaaaagtatccatggaaatcaaaacgctggaaggccaagtggctatggtaataaatcttcatggcaagagtgaataattcaaagatagtggggttggctagcttcttgaattcttatgaacataaagaaagaaaaacataagcatggagtgacctgtagcatcccagatctggtaccaaattctgtgtcaattaggattaggcacagcagcaagggacagatactcagaataacagtggcttgaccaagttatggaaacaccaggggttcagtctaggtactgacgcacagaaagccaatcactgagacaataagtattgccaaggaagaaggctttaatcgggtgctgcagccaagttatgagagctcagtctcaaatccatctccctgactgactaaatctaggggcttacatagcagggaagatatgtaacaatgtttaagaaaacaggaactagggaggggcaaggaggcatctggtgtcagttctcttgatacttttttgagaggcctgaaggtcctttcctgaggagggaactcagataaaacaaatgcaaatttcaagctaggggccatttctatgtttatcccaaaacaactgtttatggaactgttgggcccatttcatttctcacagaaagttccagaggtaggtactcaggctgtggcagttctgctccatagtaccttccagcttgctgcctctccttcccttgggtgtgatcctcatgttcatagtccaagatggtagccatcatgtctgtattccaggctataggatggagaaggcagcaaacaaaaagggagggcaaaggacatgtgtttcctccctcctgaaaaagttcttggaaactctcacatgatacttctgtttacattccactgtacagaactttgtcacctggccacatctaactgcaaaagagaggacatgtaatcagcaatcactattttaatcaggaagatgaagagaatgtaaaattgggaggcaatcataggatgcatggtagagagtatcagaggaggtagctgggatgatgggcaccagatgggaaaggacttgatatgacaagccaaggtgtttggactttatcctactggcaatgaagaatcatcagataggtttaaagagcagagagatataaactgagctgttccactgccatctctctgacagctatatgaaagggttctggcgcagtaataccaaaccccagagacctgttagaaagcagttaccccaaaatgacagtttcttcaataaatggtgctggggaagctggatatccacatgcagaagaatgaaactagacacctatttctcaccatatacaaaaatcaactcaaaatggaatgaagatgtaaacggaagacctaaaactataaaactactagagtacaacataggagaaatgcttcatgacattggtctgggcaagaattttttggaaaaaacctcgaaagcacaggcaacaaaagcaaaaatagacaaatgggattacattaaactgtaaagcttatgcacagcaaaggaaaccatcaacaaagaggcaacctacaaaattggaaaaaaatgtctgcaaactatgcactggtgtaatgggttaatattcagaatatgtaagaaattcaattctagcactttgggaggccgaggtgggtggatcacctgaggttaggagatcgagaccagcctgcccaatgtggtgaaaacccgtctctactaaaaatgcaaaaactaggtgggtatggtggtgggcacctgtaatcccagctacttgggaggctgaggtaggagaattgcttgaacccaggagacagaggttgcagtgagccaagatcacaccactgcactccagcctgggtgaaaagagtgagacttcatctcaaaaaaaaaaaagaaagaaaaaagaaacagaatatgtaagaaattcaaacaactcaatagcaaaagaaaaaaaaaagcccatataatccaatcgaaaatgggaataagacctgagtagacatttctcaaaagaagacatacatacatatatatatatatatatatgtatatgaaaaaatgctcaacatcagtaatcattagggaaatgcaaatgaaaaccacaatgagatatcactgcaccccagttagaatggcaaaaaaaaaaaaaaagacaaaaaataacaattactgttgaggatgtgaagaaaggggaactcatatgctgttggtgggaatgtaaattagcatagacactatggaaaacaatacggaagttcctcaaaaaattaaaaataggactgctgtatgattcagcaattccactactggatatatatccaaaggaatggaaatcaataagtcaaaagagatattggcactcccatgttcactgcaacactatagtaagggcttagcacaatagccaagagatgaaatcaagctaagtatccatcagtgcatgaatggataaagaaaatgtgagatatatatatatatatctccatatatatgcaatactattcagtcataaatagggacaaaatcctgtcatttgcaacagcgaggatgaacctggaggacatcatgttaagtgaaataagccaagcacagaaagacaaatgatctcactcacatgtggaatctataaaagctgatctcatagaagcagagggtagaacaatggtgaccaaaggctccggaggggatgttacagttagataggaaaactaatttctcgtattctgtacatagtagggtgactatagctaataacaataataactgctttgtacattgcaagatacctaggaaacacctttaaagttatcacaaaaaaatgataaaggcttgaagtgatggacaactattctgatttgatcattacataatatatacatgtattgaaacattacactgtacccacagacatgtatacttattatcaattataaataaaaatttttaatggaaacaagaaagcagttgccctagtccaggtgagaagtgatgagagcctgaaatagggcagtgacaatgggatggaaacaagagaatggaagggtgagatatgctagggtaggaggggacagactttggtgactattagacaatggaggtgaaagaagagtgtggagtttaggctgacaccagggtttttggctggagcagtttggtaaatgacactgctactaaccaaaataaaggaatcagagagtgaagaaggctgctgatagcaagcagaatgtgattagtttgatttggaatattttcagtttaaagtgcttgttgtgtggaagatgtttggcgagcagagaaatacatgtgtctggagcactgaagagaagtcagggctggaggtaccaattcaggaggtgtgcgactctaagtgacagctgcagccacaagtttgagatggcctgacctagaaaagaatgagggaacagagtcaaggatgaagcctacggaagcaccaatgttgtgtgagtcttctgcagagtcctttctgatggaaggtcctttaagaagcgcagttcaagaaatctgaggctgcaaatgcatgctgtttccccagacatccaggacctggatcagttttccatttcaagacaagataaaactgctaaagggtttttctttccctggttgaaatactttaacaccaactaatttcaagtttggaaagaaagtcatgtttaagattgaagttgttatttctactctgtaatacagtagagcctgtgcccagaaaacctcctgcctgtctcatcatccagggagcttccttgtgtttattctaccaggcctgcgggcaggacaatgtcagcaggttgagatatgagctacacgttgcaggcattgacagatcaggagagctctcctacaaactgcatgcccttcttaattgcttttaagcatgggaagatgaatgttgtcctagtatctgcttcagttctagaaaaggttaaaaaaagttgtttgtatatagtactcctttcatttcaattgattcttattgtgcttcccctcaactcatttaagttgttggctagtacaacccaccttcaaagcactgcttttttgaaattcaatgattataatttggaagagactttagaccaaagagtatgatatcaaaattctcagttctttgggtggtcactagcagagtgccttcaacagacaaaaatccaagtaaaaagaccttcaattataatacctagaaagtacagtaaaattcaacggaaacaaaaacaatctcatctaaaattaaagtaaatggtagtatacctgtctaaattagaaagtgtggttgcaggattagtataagatcccagaattagtatgaattcagccaaatatctaacatttctcacctcaatgttcttgatactgttcactgatactcagcatcatggccctaaaatgttaagactaggtcccatcaaataaagattcaattataatcactgggttgtagtgactaagccaggcaaatgggcaaaatgcaagttggtaacaatattttcattttggaaaaatgaaaaattaaggaaaatatgacaaaatattctataaggtgaatttcttttttaagagcctttgttctgagatcatgtccatttcttgtggtctacatgtctttcttttgtaaaaagagtagtgccagtaaatggcaggttcctaataatttcattcgacaaaccaaaagctggcataccattgccaattcctaaagttgttttggaattttacttggtgaaatgttaaagtctgagaatgtccctggagtaatggctccctgctgctgatcatactggctgatgaagtagatactctacaggaacttactagaaatggttgatccgcagggaatgaaaggcttacacagggctcttgtttgtttcctccctctgttaccaaaatgttaaccattttaatttacctttaaaattgtgattaaaaaatacatgtatttaaaataagtcacttacatgtacaaagtcaaaccagaacacccctgcccagcagcatgcccaaaaggggagtctctcaggctttgcacacacgcttctcacaaatgccccagtgcaggctttggtttagggttccatgtgctaagaatacagcatcaaaggcttttctgctgggaaggaaaggaagagacttgtaatgtctatatagctcccaaagacaaaaagactctaggttgattagaacaagcttcaaatcagaacttgggttttctgccttcaaaaatcaaagaaaattttaaaaattgcttttgaagattcaaaaagaaacaatgcggccgggcacagtggctcatgcctgtaattccggcattttgggaagccggggcgggcaggtcgcttgaggtcaggagtttgagaccagcctggctaacatggcgaaaccctgtctctactaaaaatagaaacattattagctgggcgttgtggtgggcgcctgtagtcccagctacttcggaggctgaggcaggagaatcgcttgaacccgggagaaggagtttgcacctagccgagatcggagatcatgctcctgcactccagcctgagcaacaaagcaagactccatctcaaaaaaacaaaaacaaaaaacaaaacaaaacagaaaaaaacaagacagaaagaatgcccctttgtaaaggtttttttaaattcacagagacttgatagcatcaccattgtgtttgttatttcccagaagccagcagggaacgttctctgctcctggagctggtaaaaatacaggaagtagccaagggcattataatcattagtcactgagatacaaaccttcagttctgttacccagggaacctaaagtgctgcttggtgtaggtgggagatgattaatctctccgtgcacgataaaaagacagagctgccacccggaattagtctgtttatgtagaatgaggacagccccaagagtagatgggatttaaaaatagtaacaattctcccccaaccccaaatacaccatttctgaatgttgtagaacattcaggaaacaagaatcattcataattctacccctagaagttaccaatgttaacattttgattaatactgtaaacagaaaaatcaaagtctgtaaaatatctgaaagagaggcttagtcaagccagtatgagtaacctccgcccccggaaaacaacccaagaagccttgagtaagtggtcccgaggcagccgcatgtgtttggttttatacatttcaggagggcaggagttacaggcgaagacagaaatcaatacagggcacatatacattagttcagcagaaaaggcaggctatcttgaagtagggggcttacagaggtaagcaggggttttatagatgataggcagattcagagatttttaaaatttgcattagaggagtaaggctctaaaacttggagtcagcagaaaggactgatttttaatttttatttatttatttatttatttatttatttatttatttatgacagagtcttgctctgttgccgggctggagtgcagtagcgcaatctcggctcactccaacctccgcctcccggattcaagtaattctcctgcctcggcctcccagacagctgggactacaggcgcttgccaccatgcccagctaatttttgtatttttagtacagacggggtttcaccatgttggccaggatggtctcaatctcttgacctcatgatccgtccgcctcggcctcccaaagtgctgggattacaggcgtgaaccacagctcccggccgaaagaactgattttttaaatacacgttatttgaatttttcacaactacatattattatgtattatctccctccctcccttccgtccttccttttttgcaaaaccaatgcaatcactcttggggtctcgggggcaatgggatcacgtcaggctcaggcgctcccctgggcgcacgctgggtgaacaagccgcctccgggcgagggtggagctccagcggggaggctctgggcgcaggaggcttaccaagaggagtccgcggcagcccgggcctgccccgcgggctgctctgggctactgggatctcaccccgcgctcggcgaggcgggcccgcggcgccctctgcagggaagcgggtggcgcacgcatgctgggcgctccagtatttgtggcggggtgggcttctggttagggtaacatctgcatctccgcttcacagcgtacaaggtgccttccactttgcgctggctctcccgcgaccctgggatgccttctgtcctccaccggagaggacgctgagaatcgccgttcctggcgaagggctagaactcaccagcgcccggctccatagcgccctctgccggggccgaggggcggggcacgcgggcggccgagcgggcgggcagggagggcctcagatccccctatccccgcgggaggggctgccagcctgggtcagccacgcgtggcttcctgagactgggttatggctatttcccacctccttgcctctccctccttatttccctccacctgtgtgtgtgtgtgtgtgtgtgtgtttctaaagcaaaaacaatttttttttctattctccaaagtaatgcgtattcattataaaaaaatttttttgggggggtagaaaacacagcataaaaaagaaaatgaaatacctttaatctcatcattcagagataaacacatgtttagggtattttctcctagtgtctttttctatacacaattatatatcatggtaagtatatatttaaaccaaccaggcaatgctgtcgaggagtcaggccccgtgtcgaactggcgccgttgaagagaacacagaacggccaaatggcagggagtaggggctccctggccttaaaaacggggccttgctgcttcttggtttgataaactgctctggttcccaagaaagcttgtcttttcctcctcagctgttggctgggggtaagtaggtggcggtggtcagtgggtcccgggaggaagaaaacttggtctcaaagttcactttcataactagaaggctcgggccggacgcggtggctcacgcctgtaatctcagcactttgggaagccgaggggggcagatcacttgaggtcagtagttcaagaccagcctggccaacatggtgaaaccccgtctttactaaaaatacgaaaaattatctgggcatgatggtgggcgcctgtaatcccagctactcgggaggctgaggcaggagaatcgcttgaacctgggaggcggaggctgcagtgagctgagatcgtgccatcacactccagtctgggcaacaagagtgaaacaacgtctcaaaataggaaaataaaaaactagaatgctcagagagtatttcatcatatgatggaacttcagcccccatcccaacccctggacccatgcttcttcctgctgagtttcactgactacatgcctccctcctaggctgtgagttcccgactgggggaacagtctgggcctttgcacctttttccttcacctggcagagtgctgaagtctctttggtcactgtctttgtcttttttttcctccacacaaacactctttcatatagtcatgtttctgatttgccaatgtcaccccagataagcacacaagctaaatgaaaacaatgtgtttgctttgcacatgcagtgtcaaaacaatgcacccccattccttccagctagattgggccccctaagtgacactcttccttatggaaattctgaacctgcccctctctgcaggatgtggttagagtttggattacagtcattgatttgggagtggtgtatctacttcactgtttacatgtagcatcctaggctctgcttctatctctctctcgctctctctctttctctctttctctttctctctctctctctttctctctctctctctctccccttcttttctccctgtctggtcatctgcagcctgatagaggctgaggcagagagaagagcctgtaggaaaaaaaccatctttggtggtgatgatgatgtggtgtgtggagatacaaagtcaaattctccaatgtttctatccccatgaaatgaagtctctagtgagatcaacattgctcagcaatgcttagtagagtatattttcctgtgtggaagcatgaggaaggggtgcattccccttctgcttggtaaaaataaaggcatcaggaagtattgggttggtgtaaacgtaattgcagtttttgccattaaaagtagtgaccaaaaccgcaattaattttacaccaacctaatacaagccagcacctgggtgacactggtaagactggtggaccatgcctggtctggccagtttgcgtttttaatagagtcagcgagtggggtagaaagtctgcagtattcagttaaaggcccaagttcttcttagtctgcttattagctatgtgcttctgagtaaattacctaacctcgcttaagcttagtttgctcatcccaaaaggaaataaaaatattacctgacagttatgtttcctgattgctgtgggattcaaatgagctagaaggagggaagttgttgtcttgaagcagcattagtagattttctaaacttggtagcattacacctccttacatttgattctcccaagcctgctgggtagcttgatggaggaaacatgacagaacttgactgcacgtagtggcagtaactcacacttgcccagattttgaactggaatcatctttattgcagttgaaaaactaggcttagagagtttgaacaacttgcccaaaggaacatatcttggccatgaaagggccagtaccagaatgtagcacctaagacttttagatggtacttccaccatctccagtagaagatgggaaaggagtgttccttgggattgcccagggcatgactgtccccttgcaagggacacagagaaatgggtggaagatgtcagattcttaagtgttcactagtgggagggtgagcccattattctctatgcacttagaatctttttctctttaataatgttcttcacatgccataacaaagctgaatatgcacttagaagtcttctgaaaattttatagagtgaaatttcaaaatagacaacttaataggctgctttaatgttaaatgagtcacttaagatacaagttttctctacatttctcagaactggtgggatgattatctctatcagggactgtttagagagagatactctgacctgaaccgctgtaactattaattgaccagtttgatgcgcaacactttctggtgcagctttatttaccagtttcaaagactaagctctgagctgagtggggacacagaagcagctgggtacttatacttgaccccatagaagatggttatctaattctgacctggctaagcaaccagtatgaatttttccattaagtcacatagtttacatcctgccttgttctttttttggggggtggggggtgggggggcggtggtttccctcttgttgcccaggctggagggcaatggcgcaatctcggctcaccacaacctccgcctcccaggttcaagcaattctcctgcctcagcctcctgagtagctgggattacaggcacccaccactacacctggctaagtttttatttttagcagagacagggtttctccatgttggtcaggctgatctcaaactcccgacctcaggtgatctgcctgccttggcctcccaaagagttgggattacaggcgtgagccaccgtgcccagccacatcttgccttattcttatttgtgcattttttggctgtttaaaaagtatacactcaaacataagagaattgcaaccctcttgttaccctaatttggccatgttatcctaaagggcaagggcagagtcaccccttctaggatcaaactggactgcaaggacacctatcctctgcccccacccccccacacccaaatttctcttgggatacacaatgagtaaagaaagataggccctccaagcttgaaaataagaagcaggaacatttagagatgacttttgaggacaggataaggtgaaatacctcacctaaagtcagaactttcacattaggatttattcgtctcttttgcccaggtgcagaggatgataaacagctttctcactgcccgtgctaagtgctcattgtgttcaggggtgagtcttgcagtctgtggctcctgtgactgtgagcactgctcaaggaccagtttggacacccagccaccgggaatagagctcaagccaccatgcagttaatcgctgtagctgaaccaatgtgtccagacaaaatgaactatctaagatgatgttcatgtgcacacaggcacacaccatgctgtccctgagggataacccttttgctgtaggcttctttgagaaccccttttccgagctacctttctcactgcagttggtgacagtgggggcacaaggacatcatgcacatgatcctgtcctcagggagagaagaaaatgaggctcctagagcaagccccgccaaactgagccagtgctagctccgtttacccagatattaagttaagccaattatatagtacaataattcatcttttgaaaattcactctcagcctttggggagctgtgaataggatttctgcaaaggttgttgtttaaggagagagccttcttctctccagtacatatgagcagagcaaaagataggtagggcctggaggcagcattttcagagcttctactatctctcctgccatcagcactactgcccccattcccctcactttcctttgtagtttattagggaaaaaaggggtttctcagaaggtggacgtacatgcacaggcagcttccagaaagtactcaatgcaaccctaatattctgatttggggtacctcatttctgaccaccctcccccagccagggtcaggcagcaatgggttaagctaactattttctgcaggaattccaggagaaacgctttagacaactccttccaaacctcaatgagaagaatatcctgtgacttcaatgcggaagtgatcaatttcaacctgcaggtaaaaagctgctatggtttgaatgtgtccgctaaaagttttgtgttggaaacctaatccctctgttctcataaattgattaatggtggctccgctctcatgaatgaatggatgtcaccatcgtggctttttttgtgaaagcaagctgtggctttcttgctctcttgccatgtcatgccctctgctatgttatgatgccgcaggaaggtcctcacggatgccagtgccatactcttggacttcccagtttccagaactgtgagctaaatatactttctttccttcataaattacccagtctgtggtattctgttatagcaacagaaaacggactaaaacaagagccatccagtttggagaaagccaacaccagcaatccatcagtagcctgtgatccagggatatgcgggatgtagagttacttcattgccattaccatggtctctgaggtggtgagttctgagctcctacagcactgctgcagtgggtcatttctgtttcttgttttttgtttttatttagtgggtcatttcttgatagcagtcttgcatctcaggtgagtgtttttttcctccagtcctcacatggcgatgtttatgtgcacagcacacatcctccatgctaatagttaaaccatacctatctctctcaaaaaaacacaacaacaacaacaacgaataaactgcaatcgtgtgggaataacagtaaggatacgattgaattgggcctaaattacgttagaaaaacaatgcattcacaagcattaatactgtatcgtagttaatttcctgccacatagctgtgggtgagaaccactggcctggtccatgggattgggtttctgctcagatgctgtgaggactagaacctgaacatcacctgaattcctgaccacttccattgccaactccatctcctggtggaatgaaccctttgccttgtatttccaaatgcaggttggcatcctacactgcagattgggtgggccacattgccaatgcactttcagccatttgttacagacctcaaagcaaatgcaatgaaaatttcatatttcaaagtccatttaacttataattaaagagcttcacctaacctccaattggaagtgattaatttggaatgtaatggcatcctaaatgacaaatattaagccaataatctaattctataaacaccttccaaacaataaatatgttcaattaaaatgatacgttcatggaaagatgttggtattaggtagaacctatctgtgtgaaaggacatttttaaggacaaaatatgtaaaatctcattgcaagttgacattaaccaattaagatttgcaattaattttgatggtagagaaaagtaactttaaaactgattactgctattttgttatgaatttcatcaataagaaaattgtggaaatttgttttctctcttattatgtaagtaactacattaatattctcgattttacctctcggttagcaaagcttaaaatatttattatctggctcttgagagaaaaagcttgctaacccagctgtagtctaatgtatcctatgtacctggaactgtgtctaacatatagtagacactctgtcaacatttattgtatgactctgttctgaaataaataataaaagagactaaacattaggaatcagaatgcttctttaacaattttaagtaaatgatattcttcttgtaacaatttttcaagaggtctagagttgtaatctaaacactgtcagtggcactagggttcactttatatattttattattttaagacataatcagttggacataaatcataaataacagcttttcagaaaaacaagccaagtatgtttaatgtatacattgagcataaaacatattccagtttcataaactttaaaatgttaaaatattcacacacacacacacatatatatatatatattagtgtgtgtatatgtatgtatgtatatacatgaacaaaaaattaggaagtcagatgatatttcacatgttccctgcagtttgggaataacctttaagtccaggtaaaataactatccccgagtcatctaaggacaggagctgcagtgtcaggagaataagagtttgtcttgtctcttatctaagccaaggaagaggctgtatattcgatgtgatcggagtcccctccacttcccagaacttggctggggaggacgtacttattaataaataagtatattatatattatgttagaaatgatcattacaataggaaaaaagataaagcagagaaaggtaaagggatatcaggaatgtcaggggtcggggggttggtttgcaatttgaagtagggtggtcaggataggcctcattgaaaagtagtaaagacttgaagtagaaaaaatataaatggctagtgaaaatgtgaaaaaaaatcttcaagttcagtagtaaaagaaaaaaaaagacaagaagaacaagagaatattttatttataaaaccagcaaaggtaacagcataaaaaatacccaatagttctatcgtgtagtgctagtggaaatgtgaattaataaacattctttctgaggatcatttgacaaaacataacaaaagccttaaaaatatgcgtatttcttggtttaacaattccaatttcaggaatttatcctaatcaaataaataagcaagtatgcaaagatatattctttaaaaatctttattgtctaactaggaaaaattaaacaattattaaccattcatgcagtggcccaccaagcaacaactaataatgatgtagatctatatgtattgacctaaaagatccccactaaacatgtgtgtgtgtgtgtgtgcgtgtgtgtgtgtgtgagaaaccccctggaaactctctggatacttgcagggtgatttgcctatatttttaaagttttcttcatggaatatggaaataccatgggtcgaaagcaaatgccatttggggataagactgccatgcaaaggaccttggacttcctgcaggagagaagagggtcattgctaggagactcccctcatggtgtccatgaacatggagccctgacaccatgttgtttctgaaaatgagccaacgttgacatggtcctggcccactgggtgttgttcactctgttgattacttttggaaattactttaggtaaatgccatgcttgacagttggtttttaattttaaacacaagctgccattgatttgctttgattattccacgatttcaatcactttcccaaaactttgtcttccttaattttcctgtatcaaccagatgaaggtgttcacagagggatactcagaacagtgtattaacaatagctctgtctacgagttggccgttagacacacttataagggatgctgatgttccagggaaggatcctgtgctaactgataggtgccaagcgttctggttttcactctgccttactgggcctctcaagttcacaagtgttctcagaacaaatccttcaagagccaatccttcaagatggatcccaagtacctaactgggccaaaattttaaagagagccaagtggccaggccatttgctgactagaactcatatactcggagtttccctggaaacccccaacctcagtttaacagtggggctttcagagctcacctaaagcagccaatcagagctcatctgaaagaaccaattagggctcagttctaaccactaatcagaatgcagctgcatcaaccaaacagaactaagcaaatttaaagccttcattttcataaaatggacctgattggcaacctgagcatgaacttttactataaaaccaggatcctccctttgttctctggaaagtaactggtttacacagaaagtttgtgaactgttcctgaatgaagtctttcttccaaatttcttttcagagaacttttgttcacagatccatgccagggcagctatgcttttattcgattcacccaatggggcacatgccagctaaattaggcccctcccccgaaatctagcccaagataatgaaatgtggagattaacttaaaattaattatggggcgggggcaggtgtggtggctcacacctgtaatcccagcactttgtgggatcccaaaggagcccaaggcaagcagattgcttgagcccaggagcttgagaccagcttgagcaacatagtgaaaccccctctctacaaagaatttttaaaaattagttgggcatagtggtttgcgccagtgatcccactggggtggtcccaggaagctgaggtgggaggatctcttgaacctgggctggttgaggttgcagtgagccaagatggcaccactgcactacagcttgagtgacagaatgagaccatgtctcaaaactaaaaataaaattaattatgggggtaaagatatcatcatatcaaacagtaaactccatgaaaagactgaaatcaacctgctcccctggcaaaactctaaatgacaggcaggaatagtggcgcggtttgtattttgtgagctctgtcctttctacttcaaaaaggatttccagtgacaatagatatgacttaaaataccaaaaggatcaatattctagagagttggcacatgaaatagagagggctgacttaagagggctgattctcgctccctaattagtccacaccctttgagtgggccaatagaatacagcaaaggtgatggaatggacgtggttatgtatgtgatggacatgtccatgattgcctgcacgggattgcatacatgagatggtaggatgtgtcttgttggagtctcttgttgctggctttggcaaaggaagcagaaatgcatggaccacctctgtggacatagtcaagtggcaaggaattgcaggtgacctctaggatctgagggcagctcccccaccccgccccacagcatagctagaaataaactgaagccctccattctacagctgcaaagaaccgaattttgcaaacaacctaggtgagcttggaagcagggtctttcccacggagcctcagtggagaccacagcctgggctgacatcttgattgaagccttgtgagatccccccaagcaggggacccaggtaagctgtgtacaggctgctgacccacaggaactgtgaaataataatgtgttactataagcctccaagtttgtggtaacttgttaatgttgcaatagaaaaggaatatagtgagctatggggaaatgaaagctccagaaaaggtataggtgcattgagataaacagatggttaattaagtcaacatcactgtgctatagggaaacacagttttgattttatcttggggtctttgactttcttctctgtgttcacatagcattttttaacatgctacttctcacatggtaactattttagtgtctgtttcaccaaactaagtttcttaataatagcaaccttagcatggaaaagaggatggaatttaatgacaacaaaaaaaatattcctataagtactactagaaaataagttgctttggcttaatggaactaaagtgttttccctttaaatattctttctgggtccactcgtagagctgtgaagtccattacgaaagcctacgtacctgcggctattgaggccttgaaatgtggctggtctgaactgagatgtgctgtaagtataaaatatacactggatttcaaagattgagtatgaaaaaaatgtaaaatcagttggtaattttacattgattatagtttgaaatgataatagtttagatagattgggttagataaaacctattattaaaatgaattccacctgtttaattttaccttttttaacatggctcataaaaagtggaaacttacctatgttgacagtgttgcgtgtctaacaacaggtgatctaaatggtcgggtcctggctgagccacaactacagtcacttgggcattgggacccagcattttccatggcaggtcaccatcatgccagaagagctgtttctgaagcgaagaagcatcaattcaatacaaatccagcaacagctgtccattcaacatcccaacctacatttttctctctcaaccttacatatgttctaccatggtttaggtggataccagagtcctgatctttcaggtgtatttctgatcttaaatatcaattttgccctatcattctgatgaaatacacatctgatgaaatttttgaataagaacatatatgcttacttttctatgtcgtagagcatattgggtttttaataatctataaatgagttaattctattttttctctctttttagctccaggcatttttttaaagttttaattttaaaaaggcacagagaaacctagattttggaggcccaattcatattgcatttcttgcagaaagcctttttatactagtataaccaggagatattacactcaagctgctgtgaacaattaactttctggcaggttacacatgaccattatcaccgtcctctaaggaccataatgtcaaaaacagtggacttcggccgccagcagaaacttgttctagatataacagctgcccagcactaccgattatgagacacaccaatcagagcgtggttactaaacagctgggtactgctggtggtctctccccaggctctccagggagcactacaggacttccccacaggcccacattcacccaacatggccttgagctgccgagggacaccaccaatgatggcagtacagactcatcattaggagtttgccaggggccagttttagttcttctcttcctaggataattcacccattatctagaactaacctgattaaaataatgctagtgcctctgtccattttcttgatattaataatggtagggatgaataaaccttcatgtcaattaaatgtagaaaacagaaatgaattcttcctgaggtccagcttagtcatgtgtatgacagtaaaagatttgccttctaataagggcaatatattgagtcctacaatgtatctcaactctgaaactaattttcaattaggatatacttcccaatttcctgaaaagcatgcatatgtcagaaaggttcccagtataaaagtgtattttcccagatggctcatgatggaccacatgctcagcttggagagaaagaggaaatttacaaaagcataaaacgtggttctgtttttctcagggaccttagttaaggcagaaaaataaactcatacagcaactgcaaatgaaagaacttcgtacccacacacccaaacaccaggattggtgcattagtctcctaagagcccttcttgcccccagatctgtttcccttaggtcattctcagaactgccaagtgaattattatttaaagtgtgagtcatctttttactcctctgtattacatccttcagtgtttccaggaaatgccttcaggataatgcccaagctccccttgagggatcagattccagactatcttgctggtctggtgtctggtcccctgctttgccttttatgctacccaaaaccccactgtgagtggtgccctggacatatccctcctggttcactcctacttatcctttaagatacagctcaggacacaaaaccatcctcccactctcatgaggtactgaggagttcccctctgctgcactctctccagggagatatccactcaagatacaatcaattacctgggtgtctccttttatactgagttcatgagggctcgggacacagcaggtactcaataaatattggttaaattaacttaggaaatgcagaggaaccctccttaaagttactaatgaccacaatactgccagcgtttttctatatattgttttctttataacatttgaacttccttggaattctctccttcctaagggtggcttttttttttttttttttgagacagggtcttgctctgtcacccaggctggagtgcagcggtgctatcaccactgcactgcagcgtcaacctgacctcctgggctcaagtgatccccgcttcagccttctgagtaactgggactacaagcacaccaccatgcctagttaatttttgtattttttatagagggagggtttcactatgttgcccaggcttgtctcaaactcctgggctcaagcaatccacctgcctccgcctcccaaagtgctgggattacagacaagaaccaccatgcctggccttgatatcttcttgatattgactctcaactctctgtctcttcactccataaaagagccttttcttccatatttgccttttcttttttctttttcttttctcttttttctttctgaagtagagacagggtctcactctgttggccaggctggagtgcagtggtgtgatcatagctcactgctgccttgaactcctgggctcaagcaaactttctgcctcagtttcccaagtagctgggactatatgcatgtgccaccatacctgcacatttgatttttgaatgccagtgatacccaagtctctaccttctgcttctcattctaccatctgtctcttttttgtgacctcatgtatgcccctagcttcaacagccacttatgtattggctctcagatctcaatatctatcccagacctctctgttgagctccaaacttatatatccaattgccaacagtaggcattcacatgggtaggcactgcatacctacctgaggaaccctaataaaaacccaagttcatccacacgaacttgaatggctcagagacccttaaattcaatatgtccagaacaattcattatccctgtgtcaggggtccctaagatcacccttaagcttgatgaactcacatgaactagaaagactcacaggactcagaaaagctgttatacttatggtcatgatttattaccgcaaaaggttacagattaaaatcagcaaaggggcaggcacctgagcaaagtcttggaaaaagcaagcacaaacttccaggtatcctctcccagtggagtcacagcaatatgtgacaatacatgtgaagtgttgccacagaagttcacccaagacttggtgctcaggatttttattgtttttattgggggtcatcaggtaggtatgcagtgcctacccaggtgactgatctcagctactcagactccagcccacaggcaaaaaaggcattcaccataaatcacattgttaggataaacttacctagtcacaccggtacagcatggcccgaggcctcaggcatgcaaaatcactcttagcaggcagaatgtgtaagactcagaggtcattttccagtcctgaagacagacctttgctgggttaacacacaggcaacccaggtctgctgactagactatttcctgctcaatcccctaaagctgttcttctgtaagccctttcatccaccgctatctgagccagagattgttttacttaacaccgacatccaatcagagtctacctgtaggaacatgcattcctctcaatcacttcttgcttggattactgcaacctggtatcatctccactttgctttcttttcagcagttctccatatggaattagaattgtgataaatgctatgacagaaggatatgcagttaaagcatttgtaataaatgctttaatagaggtatactcacaatgctatgacaaggagagagagggaacactctgggtcacagttgtgcttgaccaagcacatcactaagccttcagggtaagttcaaaacttcttgaatctgagacccttttaacctggctcctctctacccctcccactgttctcccacaccactttgttcttacaaagctatttgtaatttccctggaggtcatttggtttcatacctctgatcttgtatgttctgttccctcttcaatacttaactcaagcatcctctctgacctcctattccgcaggctaaacatgcttctccccctcttccctgcctcagagccctccaaaacctttattggagcacttactcaggtgccttaagtggcccattggcttgtttgccgcagtagtttgttagtttctgagggcaatggccaagtcaccttccatgttagaatcccagcacctagcatagcaatcctaataagtactcaataaacatttgctgaatgaataaaagggagaaagttcaattctgagagcagagttgtgactgcctccccacagagtcagaaaaagctttatagatgtaagaaccatttaagttgatattgaaggaaaataaaatttcatcaattttttatttgcacataaccaaaattgtattgaaaaacaccaaaataggagatcactgctgcataccttacaaaatcaaacacacttacttatcttggtagatgaaccagaattactgaacttatgataagcctttctgggacataacaaattcaggatgttgtgtggatcattagtgttgctttcttttaaatgaacactcttctgtgagcttggtgtttcatcctgtaggctggcacaacactgttgaagaacctacacaaagatccactgtctgagtgtaactgccaaatgggttcattttgcccactgcctatatagaaccaatttatcaagacagaggcactgcaacacagaaagagtttaattcacacagaggcagctgaacaggatactggagtcttatttttactcaaatcagcatccctgaaaatttggaggctagggtttttcaaggatggtttggcaggcaagggaatgggtgctgctgattggttgggggtgcaatcagaggggtgtgcagaatttgcttcttggtggggccacaggactggttggcaggtccaagtggagccatggtagtcagaaatacaaaagcctgaaaagacatctcagaagaccaatcttaggttctacaatagtgatgttatctgcaggagtaattgggggaagttgcaaatcttgtgacctccagaataatggcttgtaattgtttaggtctaccccttagcagagttcgtgctcctctcatccacctagcctggtggtctttcatttgctttacaaaggtggtttagttttggggaagggctgttatcatttaaactataaatttctcccaaagttagcttggcccaagcccaggaatgactaaggcagtccggaggttcaaggcaagatgggagttggttagatcagatagatccctttcactgtcattgttttttaattgttatgatttttgcaaagatggtttcatgggcatggctgaaaaacatggtaatcttgtggcaactaggacatgttatatccacaaagtaagaatttgaacttttcactggccatttcttttcttttccttttccaaggatggatgcagtaaatctctagccaaaggccatgttgatcatttctcaagctcagtccgtccagacctgtcgggcaacacccctagtcagcggcatgcaatcaggcacttgcaagttcatcagattcagtagaaaatatgctacaaaatgattcctggtgttcacatgtcctcttcaccatgtgttagctatgtggcgctgggcaagtttacctttctttgcatcagttttctcatctataaagtgagtataacagtagcttctgcacagagagttgttgggaaaagtcaaagaaatggcttattaaggcttagtatggtgcctgccacagcaagggcttgatgtatttttgatggttgtttttaatttttaaagtttctgtccctcaaataataatgttacagatgtatagaatcaggaaagctggcatggaattttgagaggctatcagcagtcagcatatgttaagtggagggacaaaaggtgatctttttcatcagctctgctttaacacaaatacatatatccctaaaaaccatgttttgcagaattacagtaaaaatcacaagacctatggggaaaatggagttaggtgcacagcattaaaaaatttcatcagggctgggcatggtggctcacgcctgtaatcccagcactttgggaggccgaggtgggtgaatcacgagatcaggagatcaagaccatcctggataacacggtgaaaccctgtctctactaaaaatacaaaaaaatagccaggtgtgatggtgggcacctgtagtcccagtactagggaggctaaggcaggagaatggcatgaacccaggaggcggagctttcagtaagccaagatcacgccactgcactctggcctgggtgacagagcgagactccatctcaaaaaaaaaaagtcatccctgactcattaaaaaatatcctaataaaaaatggtagcagagttttatacatgttaagtggttaagaaatgcataaacaataccataaacatgatactttaccttgaaaaaaactggaagttagcttgtggaagtaggggttggaagggttgcagcttgtatgttgtgaagtggtagaaggagagttgtctgaaatcccaggggaaaattataatgtcagatagggatgagtattgtttataacatatgtgggaaactgagatagatggtagtgttagtggtggtgaatatccaaattaccgatgggtctgcagcaacctaaattcttgcttcttcagaagaaagaactcgacagaggggcttaaggcagaaaaagagactgaggcaagtttcagagcaggagtggaagtgtattaaaaagctttagagcaggaaagaaaggaaagtacacatggaaggacacaagcaggcgacttgaaggataagtgcgacatttgaccttttgacttggggttgaatatgctggcatacttccggggtcttgcatcccttttcccataattcttccctgagggtgggctccttgcatgcacagtgccctccttgtgcttgggaggtgagcatgcacagtgtgtttaggaagttgtagcatgctcacctgaggctttcttccctcttctagtgaaatgcccccgggaggccatactccaccattttgtctcttcatgcatatgttcaagctcactcacccaattcctgagattttattggaagctgattaccaatttcaagtgtttttaatctgtttgggaaattgcctctccctggtgcctgcaatcaattatcatgttagtatgacaactgtgaaccatcaggaaattgcctctcctaggcctggctgccaatgatcatttttagagaggcagtgtgataactgccataccattatctgatggttgcctgaccatcctggtgggtggtgggggagccctctcctgccctgctcatgcctacctatctactgtaacagtagacatttgagatgtatatttgttttgtgtgttactgtttagtttggatcagctgggcacagttttctgcattcacttagtgtttctcactaacagaatcacacataagcaaacacaaattttgcattatgctcaaattgttccctaatatgtcaactgcattgagacaaacttgtccttttttacatggtgtttatgagtgttataggaaagctgactatattaggttagaccacaacttgattccatcttttagaaactatacctgaggcatgaattaaaggaagaagctttgtagggattagggtttgtgaacccaaaaatatctgagataggtatcaatttagaaagtttattttgccaaagttaaggacaggcccatgacatagcttcaggaggtcctgatgacatgtgcccaaagtggtctgggtgtgacttgcttttacactttttaagaagacataatacattcaatcaatacctgtaagatgtacattggttcaatctggaaaggtgggacaacttgaagcagtggcttccaggttagaggtagatttaaaaattttctgattggcaatttgttgaatgagttagtttattttattctattttattttatttttgagacggagtctctctgtcacccaggctggagtgcaatggcgcgatctcagctcactgcaacgtccgcctcctgggttcaagcgattctcctgcctcagcctcctgagtagctgagattacaggcacgcaacaccatgcccagctaatttttgtattttttttagtagagatggagtttcaccatgttggtcaggctggtctcaaactcctgacatcgtgatccacccacctcagcctcccgaagtgctaggattacaggcgtgagccaccacgcctagcctgaatgagttattatctaaagacttggaatcagtacaaagaaatgtatgggttatgatgataagcggctgtggaaaccaaagttttatcatagagcctccaggtaacagccttcagggagcataggttgtaaatgtctcttataagacttaaggtctgtgttgatattaatgctggttaacttttcctgaattccaagaggaaggagggtataatcaggcatgtctcacccttccttcccatcgtggcctgaactagtttttcaggttaactttggaatgcccttggctgagagaagggacccaaatagttggggggccttaggattttattttgggtttacaggttcaacaatcaaaactcaagtcagagttatgcttacttggacagggcttccattatacacagggtgatcatttgtcccaatttccactgtggtacaggcctaatcatgaatagctccccatttcactatcaaaagtttgagtcaacaggaatgtgcacctccagattttgggaaaccacaccacaagcaactgtgtctctgatgtacacccctttctggccctcactgccaaggccagaacctgcctctgagatttaccatagtcttttcgttccttatcaaagaatttcaattaaaagcatttatgaggccaggcgtggcagcacatgcctgtaatcccagcactttgggaggctgaggcaggcagatcacttgaggtcaggagtttgagaccagccttgccaacatggagaaaccctgtatctactaaaaatacaaaaattagctgggcatggtggtgcatgcatgaaatcccagttacttgggaggctgaggcagaagaattgcttgaacaccggaggcagaggttgcagtaagctgagatcacgccgctgcactccagcctgggcaacagagtaagactctgtctcaacaacaacaaaaagcatttatgagttgtttcctcagatatttgcccttgataaaaatgaagacaagtgctttggaaataaaaaggcaatgtgatttttaaaattccagttaaaatttttcatggtttaagatcaaaatagcttctttagaacatatgtaccaaggctttgtgtggctagttgttggatttctagttttctttggggcattaacacagaatctgaaaaactatttgtttggaaaagtttaatttcactgagatctaatttatagagattttccttatttatttattttttatttatttatttttgagacgaagtcttgctcttgtcccccaggctggagtacaatggcgtgatctaggctcactgcaacctacccctcccgggttcaagcaattcttctgcctcagcctcccgagttgctgggattacaggcgcctgccaccacgcccggctaatttttgtatttttagtagagatggggtttcaccatgttggccaggctggtttcaaactcctgacctcaggtgatctgcctgcattggtctctcaaagtgttgggattacagccgtgagccaccacacccagccttccttattatttaatacctctttgcttaaaaggaataacattacaaaaccaaatcaactagttattaaggtaaaagattttcaagataaaagaaactaaaagtggctagaaattaaattgatattccacaaaagctttatactattgggtgactatttgaaaattgcatttcgttgagcctcttcactaattaaaaatgtgaaatacaagtttagtttgaaataatagttctgggctgagaattacagaagaaaaaaatctcaaggtagggtaaataaattacagcatgttttagtcaagtaaaaactatacttacaggttaacaaaaccagccatagtagtcatggctaagcactagcagtctaatcctagggaactcagctgtctgatcctatgcctggctgggatgaacaattgaccacctcggtttagacatcatacataatagaaaattggatccaaaagccagaatggagggtaggttcttgttatcagttttagggttctagggaatatgcaaatgtttacttttttctaatgagtacactgggctggggtatggtttggtttaatagaacactgtaaaaaggaatgaaactgtcatgacagaccagaaacaagaaaatctatctaaatgcagatgcaacagagaaactagaaaatatccagctgccctacatcagccgttttccttctaaaactgagtaaaaatattcctgttaattctactactttatttttcatgataaaatgtctgcaaaaggtgactgaaccttttggacaaaatgaagtatttctggtcactgtgactgtagctacagttgggacacggcacacaaactgccaagagtgaacaaaatggcagggcagaaaaatacaggctggccagaggcggtggctcacgtctgtaatcccaaccctttgggaggccaaggggggcggatcacttgagcctgggagttcgagaccagcctgtccaacatggtgagaccccatctctataaaaaatacaaaaaactagccaggtgtagtggcgcacatctgtagtcccagctacttggaagcctgtggtaggactgcctgagcccgggagagcaaggctgcagtgaggcaagatggcaccactgcactccagcctgggtgacactgtcacacacacacacacacaaattgcaggtgatctagacatatcttcagattactcaatggcctttagagtatcataaactactaaattagctatttcaatgaaatccttagtatcttaattgcagaaaggtagtggtccaaccctgaatagatctgccatggtaaccaatcacaaaaaaatgaggccaagtcttgaacatggaccaaatgatcactacttttgatgtagattataggtggcagctaatgggtgaataatttcacttagaaagccctacaagcaggcactgcagcagtgtgggaaaaggtggaaatttagcaaacctaagatatgggttaaagtctggtcttatcacttaacagcagttatgtgaccttgggttcattatttaacacttgagtctgttatcaactctaaaaataggaaggttaagattccctgacagttgaaaaataaaagtgttctgtgcactgtaagatactttaataactaaatgagtaaaactaccatttgaacattcagaaacttgtattataaaaaggttagaaagtgtgaggagctttaaaatacattccttccaaaaattaagaatatttgctttaataatcagcaataaaccccttgcagagtaatatgcatggacgaaatacctagcatcaactacatttgatagcagattgtaagtgctcaccaaatagctacatgttctatacctcccagtcttgtttgcagtgaggctgtaggtggaaggcatgtctctttcaggtctggcccttaaaaatatcctacaccatctgctagtctgctcgctctgatttggcgatgttggagaccatgcgtccagatggcatagctaaaaatggaggattgcccagttgacactggacatttcatgagcataaattttattacgccacaccgacttaatgtttaattgcagcataacctactctatcatgatactctatatgcaaggaattgagatagggttggaagtacacatgcatagattcatgacaaggttcttaccctcttgagaaagaggagttttaggattctaaccccaaacttatagtccattcattccagtaaaaaaatgtgttgtttcatcagtgtatttctcatcaacaaatattatgtgctgttaagcattatactaggtacatgtatttctgaagctcaaatatatgaatgaggtggatctttatcaggagcttcatatgtcactgacattacagtacttcctgagctctcaggaatccattatttgtaaatgttcaaaaaaacctcaaccagtcatttgatttcatataaatcaaataatttaatcaatatccacccactctaatttacatccagcttgaaaaacactgtatttagaaaaaggattagagtgagcaatttcattatccttatctgcatggaccaagtctttgggaatgctttttctactagataataatacacgctcttgaggagagaaaatcctacactgctttgcaggtcaacattttgattgtagaaaacaaaatctagcaaacaatcatctgttacatagtacttcacaaaggaaataatgctaagacttataaatggaagcctagccacgttactgttaaaaaacaaatgtggcctggagcagacccatcagtccatgttttatgaacagactgaatgtgtccgtagcatccaccattgtttattacaatgtaggtttaatagttggccttccactcagctcagattcctaatagcaggcagcgtgcttatctgtcttcatatcaccaaggattggaaagcagtagtaagccttgacatacagcaggtacttaataaatgcttaccaaaagactgaaaaaggacaaaaatagggaaaagtatatttactagacttccataatccatacttactttaaattcaatctagaaataacatgactcatattaggcaatatactttgaagatctgtacaacatagtaatcacagcagggtcttgctaactcacaaatttagcatacatgctgcaaaaacctctctcctggagtcccaagggctttcaaatgttccaccaggggcagtcaagactagattcacggtgctctcttcatcatgcgcacaaaatgtgttttcccataacaccatattatcacaagtctatgaacaattctggttagctaaggtaggcagtatagaactctttacaaataacagtatttcaattatgccatgtaagtaaacaatttgctgtgaactgtcctgtgtatctaatcatttaatacattgcttctataagaaaatactatttgttaaattttagtcataatttcattgtttctcatcatagactgcagatgcaaacatttaatggtgaacaaaatgtttatctcaatttttctttgacatttttatgctttgaaaattcagaatggataaaaacaaatgaagtacaaaatatttcagatttacatagtgataaacaagaaagcacttatcaggaggacttacaaatggaagtacactctagaaccatcatctatcatggctaaatgtgagattagcacagctgtattatttgtacattgcaaacacctagaaagagatgggaaacaaaatcccaggagttttgtgtgtggagtcctgggttttccaacagacatcattccagcattctgagattagggtgattggggatcattctggagttggaatgttcaacaaaagtgatgttgttaggtaaaatgtacaacttctggatctatgcagacattgaaggtgcaatgagtctggcttttactctgctgtttctttcacactttagattttaaaagtacgtctcaaggaatctttctttccaatttgagaactcaactcactttaaaatggaaacacgcaacaaaaaacagatgctgctttctagaactccattgtcatgaaatataatatttgctaaaataagagatttactttaaaaattagagtgcttatttcttgcaaagtacaccatggaaaaccctcgggggaaaattgttgccaaatgtatccattaactgtatttaaaatttctgattgcctttttgaccatgttattgctaaatagcaaaacaaacaaaaacaaaaacaacaaaaatcctatatcccagctagatttcttcctttagcatatggtagtgtcttcgatattttgtacaatgtgtagtattttaaatagtaaagaagtgaccatgcatcaagctgaaggtagtgactaatgctcaagagctagctctttaaaactataaatatggttactatgagtatatccactaatgtctcataagacactcttaatgatatcctatcagccctgaaaaaatggctgctgctatgcaactccaaagagttacatagttacgtatagtgaatggacaacacaaataggtgggttttttttgttttttaataatatgaatttaaaatagccacaaacagggtgagtgcatgtaagcggctgaactgccagtacaggggaaggtaaatgggcctaaactatgatacctagcaagggttggatctgtgcaggcttctatgtacagagacaagcagggttaggcacttaaagctttttgatgaaaatcctgggaaagagctgagcctacatttattattattactatcaaaacaacaacatacttttcatgaagaaacatgcaatcagaaacattacagagactgaagagagcttaagagttttctgaaaatgaaatgacatgtttttccagagtatcatctcaattataaaatttgatggttttatattatcatatttcttcagtggtaaatacctcattaaaaaattattaaaaaattattgacaatacaaagccctagttagtatacagatattactatactggtacccatcttgtaaggaaaatatcaccatctagatatcttaaatatcttctatcatccaatatcttaaaccaatttcttaaattgttttattcaaaggtacttttgtcgtcttgcccctattcttctatcatcaatagtccttttaaaaattataatattctacatatacaaaataaaaatctaatgtcataaaaatctcaaaaatgtaatgttagtagtgttgattatctaaagaactcagcttcatggaatacctttcaatatttattgcccagatgtattaaagagaattcttaaatgtaatgcatcaatggtcctaatacatctgtaaacagaataccactaaaaaaattttactggcatgaaatactatacttatggttgtgtgaaacttttaaatcttaaagcctcttaacataatcatgtgtatctatgtacaaaacatacataaatttcactttatttaaaacatatgaaagaggtaatttcaaaccacactaaacataataaatatagaactcgctttgttaaaaatctacagtatacattcaagtaaaggctaaacttccaatgccaactatatttgagacaaaattaaacatttacaataatcagtttcctaaaagtgctatttttaatacctataagaggaaactcagtctagtgcttttgtttccatccaaacatctatacattcctttattcacagaaccagatgcttctgttactaaaaatacatatccaaagcttttatatccttttaaatagatttaagatttcaactctttgggggaagacagggaagtccaaacaaacaactcagaccatcttaagttattagagataactgactttatgacacaccctgtttcaacttagatgtgaaacttgatgaacacattaatgaaaaaaattccagtccacatgtctaaggtaagtcatctttttctacatgagaatttgtgtagctcaaggagcatccactatagcaaccttcctgtgatccaggtcttgatgccacactccatttttgatttgtacattctcctccaacctgatttggtttaatttcttcagcagttatattcagtacattgattgaactgttgggaaaagaaaggcagatcttagtgactatcctctccttcttttgtactttaacctcataatgtggcactcttcaaaaaaaataagttccttttaattctaaaaatctaggccaaaaatataatttaaaattttacttggaaaaaaaaaacggctgggagcagtagctcacacttgtaatcctagcactttgggaggctgaggcagccgaactgcttgagcccaggaattcaggactagcctgagtaacatggtgaaaccctgtctctacaaaaaattagctgggagtagtagtgcatgcctagtttaatcatttgtacaagggattctgatgaccaaattactataaatttatttaccaatacttatagtaattcggtcatcagaatccctgtacaaatgatcaaactaagttttttaggtaacttacgcacaagtctccttgcctggaatctaaggcacagcctttatataaaattccattctacagtgaaggaacaatgaggatgttgtagaaattagctacaaatactcctaattattttgttgcaatattaatataaaccgagatccaaaatgcttcaggagcaagagaaccaagtttatcaaataatttaaaatgtgaagaaccaagtcaggctgcacagcttctctattagttataaaacttttttctgtttgttttattcttagaggctagttaacaatgaataccttgaatttctttaagctccaaaattgtttctatgccacggatgttgtttagtggagcactcagaaacaaaaaaagcatgtttatatttgtttacatatatttttatttttatagtctgtcactaaatgtttttaagtgctttacatacattaacatttaacttgcaacaccctatgatttaggtactaaatgctgaactttattaaacataaaacaatgtcttcaagaaatgtttatgtcaaatatttcacaactaaaaatgatgtaaaaagctaaatatttaaaatatataaaaacaattgagacaactatgttatgctatctcttagatataaaatgcattatttgtgaatggtggctagaatttgtgtctatatctatacagatagttctgactggtcaaatttagaagtttgaataacattctatgtaagaaaatactataagcttacacattatcttttgattgtaaaataaataaactttcacttcccatattcaactcatctactggtctaacttcaaaatagatcccaaatccaagcatttcttccttcatattatgaccctagtccaattaccattgtctttcgtttccactccaatagtgcctcctaactggatttcctggtttatattacagactcctacaatctgttttcaatattataaaacagtaatctttttaaaacttaagactttttttcactctcttgcttaaaactagtgttttttctattccccttagaacaatatttgacctgcaaatgcacactaaaatattctgtaaatgaaatcccagatgtgttggggctggggtggagagagcaagcagagtgggattatatatgaacaatattgatcagagttaataattgctgaacctgagtcataggtacacgtgggttcacgatcttatcctctctgtatatttgaacttttacatctctccatcctcatctcacacctctaggtcttggtcaccattgcaaatgtatgaggtgtgtcccaccctcagggttcctacacttggctagagtgctcttacctagctctttttcatcccctctaacatttacttggagtcctaatccccccacctcttaaaagtcaactacaacttatagtgtgttctcctccttcttttaaaagcttcctttcttgttttaaactccatctatttcataattcttggcccaagggccagctggcttcttcgacacttagttccactccagtctctaacacaggccgagtttgcttcagctctgactgttttccaaggccattatctcctacttttaattaagagcaaagagattaccaccatactttccaacttacccctctgatcttttctattcctctctgtcttactaggaatgttctacctgcttcctcttcttcgtttaaaactaatcttggaattggcactgaagcagagtattgatcttatcttagaaaatgatataataacttgagatacaggaaaacaccaaaatgtagcaattaagagcaacatatgggtttcccagggtggagagccatgtttttttacactgtcatccttgggcacaaatctttttcactcaacaggaacaggcttttctcagttctttgcccttcaacaacaataaaatgggcatgccggaaaaaagtgttaagatatgtactctacaaaaactgtcaaaacaatatccttccatttaatacaattaaagtgcttaaaatattaactcctataattaagactacattctaaattgtatcttaaatgtgaaataaaaagacacacatcatatgatttacctccaagaagacaacagatctacctgttcactagtgtatttccagcatctagcacagtgtctatatatactggacactcaatatttgtagaatgaataaatcatctactaaattcctctccaaaatctctattgttgctaatactacagacatgccacctttcccttagcagtgcaactttagcaatttttagaaacacgtgaaaagatcacctatagacaaatacctatgttcagatatgcaggaacgtgtctggcaaaagtctgaagtggaaggtgaagcaggaagagatttagtaagtttagacatgcaaactggagacccattagacacactgtgaggcttcttttgcggctgcctcgagtgcactataagattgtcccaatcagaacctgttgtaaaacaagtaagagaaaaaggcagtacatatggtgaggcattaaatatagtgaaggtaaatcatcaggatgattcatctgcggttctgagtgaggaaagagatggaacaaattcaaattaattatcattaatcttgcttatctttgttgcatagtccacccatgtttaaaaggatcttttttttttttgagatggagtcttgctctgtcacccaggctggagtgcagtgatgcgatcttgcctcactgcaagctccacctcctgggttcacgccattctccttcctcagcctcccgagtagctgggactacaggggcccgccaccatgcctggctaatttttttgtatttttagtacagacggggtttcactgtgttagccaggatggtctcgatctcctgacttcgtgatccacctgcctcggcctcccaaagtgctgggattacaggcgtgagccaccgtgcccagccaaaaggatctagttttaaaaatatttctaggctgggtggggtggctcacacctgtaatcctagcactttgggaaggtgaggcggaatgactgcttaagccaggagtttgagaccagcctgggtagtatagcgagggcttgtctctacaaaaaagtttttaaaattatctgggtatggtggtgtgtgcctatagtctcagctactcaggaggctgaggcaaggaggattgcctgagcccaggacgctgaggctgcagagagccgagatgcactccagcctgggtgacagagcaagactacatcttgaaaaaagaaattctcaatgtaaattttcaaaaacttcgcattattacaaactcacaacaaaagttactttgggcatgcacagtccccctctcatcctcactttcactacagtaaataaaatattaaagttgatttttaggccaggcgcagtggctcatgcctaatcccagcactttgggaggctgagatgggtggatcacctgaggtcaggagttcaagaacagcctggccaatatggtaaaaacccgtctctactaaaaatacaaaaattagccaggcgtggtggcacatgcctgtaatcccagctactcaggaggctgagacaagataatcgcgtgaagctgggaggcagaggttgcagtcagccaaggtcacgtcactgcactccaacctgggcgacagagcaagactccgtctcaaaaacaaacaaaaaaaagttgacttttagttataattagagagctctaattggtgatttccaaagttttgtattaataatatgtagtattttgtaatatgtaaataattttatttatatgcatgttcaaattaaagagtttataaagtactcacttcctgagaaggcactgaaaagtttcacattttctgagttctggtggtcaaaggtagtcatatttagaaactgctgctttaaccaactggctctttcttcttcaaatgcctttctctaccataaacagccaaagaaataatgatcaatatttcaacatccacacagttgccatttcacatgattgctctagctatctttgtttgctctctggctatctattcgtacttcttatgtcaaatgagttaacctaaaaaactaaaaataatttcagcactcgtctgtaatcccagtattttgggaggctgagggttggtggagcacttgaactgaggagttccaaaccagcctaggcaacacggcaaaaccctgtctctacacgaaatacaaacatcagctgggcatggtggcacaggactacagtctcagctactttggaggctgaggagggaggatggctagaggctgggaagttgacgctgaagtgagccgagatagcaccactgcactctagcctaggtgacacggcaagaccgtatctccaaaaaaaaaaaaaaaaaaaaaaaaaaagccgggcgcagtggctcatgcctgtaatcccagcactttgggaggacaaggtgggcggatcacaaggtcaggagtttgagaccagtctggccaacatggtgaaaccccatctctactaaaaatacaaaatttagccgggcatggtggcgtgcgcctgtagtcccagctactcaggaggctgaggcaggagaatcacatgaacccaggaggcaggggttgcagtgagctgagatcgcacccctgcactcctgcctgggcaacaaagcaaggctccatctcaaaaagcaaaacacggccgggcacggtggctcacgcctgtaatcccagcacttcgggaggccaaggcgggtggatcacgaggtcaggagatcgagaccatcctggctaacatggtgaaaccccgtctctactaaaaatacaaaacaaaaaaaattagccgggtgtggtggcgggtgcctgtagtcccagctactcaggaggctgaggcaggagaatggcatgaacccaggaggcagagcctgcagtgagccaagatcacgccactgcactctagcctgggcaacagagtgagactccatctcaaaaaaaaacaaaaacaaaaaaactaagaaaaatttcacttacgaaaaaattatgtttaaaaaatagaaattcatctgtttcacctaataaaccaaccatcactgtcttcatatcaattttaagttcaaataaacaatgcaaaaaatggaacagaatattagcataacttttgaacatacaaaacattataaagttacaaacaaaagaaaaataatctatattgtaaattagtcacttgaaaaacaggacctatgacttcatcaagcatttctctcatcctctagccatctaccagtactggtagccaccaccactaaaccacaagagggcataggcaaattatgtcaaacctcccccttctgaatagctgatgaatcctaaactaaattctccatcagccctcaggtcttgcatgcctccctcccatccctcactatgcccactgtcccagtgaccagacggagaaaaattctcttgcagggaaaggcacctggcaactgggagcaatatgcaaagtagcaagagtaattactctcttggagtaatgtggggaataagggcttggaaacaggtaggagacaatgctggtcaagtgttgttccctgaagatagctactgatgaaacagacgttcacactgtgaactgaggaaatccacgtcagctactgaaaacaagcaacacacagtctttcattcataaatattgatacagaatcacgcatcaccaaacattgagaaaactaatatagaaaaaaggtcaagataaatagaaaactgaccatggataagagataattcaacagatgaaagaaatcttttttaaaaatgtaacaaatattatcagattaataaacatctgtaaaataccatcatgctatataaagaaaagcaaaaattaaggacattagaaaaatttaaagataaattctgaagcaaagactcagtggctaaagcaaataataaaactgaccctgaaaggccagtttcgtgatctctaagataaaggtaagagaatatcccagaattgagaacaaaagtcaacctgtagatatatattcagaaggccaaatgtgtgtctaacaaaagttccagaacacagagaagtcaaagaaggaaaaaataaagaagaaaatttccctaaattaaagaaatacagaatctttaggatgaaaggaactctctagaagtatcctggtaaaatttccaaactttaagaaaataccaaagcttccacagagggagatagaaaacaaaacacagttatctacaaagtaacacaggtatattacaatcaggcttctcatcagtaaaactaaacactaggagaaatggaataattcaaagttttgaaggaaaaaaaactggaatctaaattctatacacagccaaaccaatcaagtatgaatatatttttgactattccagaattcagaatgtttacagctcatgcactatttataaaaaaaaaattactcaagaattagtaattactcaattactaatatagcgaattgaacagaaacccaagaaagacagtaacatgagatatgagcaacatggcagctgaaatctgattcaggaaatcacaaaggaagctacagagaaaaagaattcactagatagtgatatatctctctgggtggcaaagtcttaataatacagaatattttctgtgtccaaacatatttggttatagaataacatttacataattgtagtattatcaattttctttcctggttttccaacttttaagtctcaagtttagacaaagtacttatacctggattgtattagaggacaaactatgaatgtgataacaatgaaaaataatatcacaaaaattgcaaagtagtacagcaagagaggtagaacaagagtaacaacaagaaagtcctcagctttcactgcagggatgaactgatactgactgaagttgaacaaacatgaaatggaagctttttattatttccttaaagcaaaaaaaaggcaagcagacgaacaagaggaacaatattatgaagacatgagatgtgaatgaggaagggtgtaggtaggaggtacaataaggacacagaattccttatctttcatagcagggaatcaatgaactgataaacaagaaaacttgaaatacattaaaagttaaaatagtacttcctagaagaatttccaacagatactttttaacagcagttacctctaaggaatgaaactgaggatgagaaaggaggatactttcttactttgtagctttttttaatgagttttgttgattttttttttttaaccttattcagacattactgctacaatttttgaagggggaatatgtagatgacacattgctaagtaaaaaaagcaagctgtagagcgtatatataacaatgatggactggggagaagagaacttaattttttattatacttcctttttaaacagcaaatatagtcttggttgcactgtcttctgacaccacacctactgaccgtggatgaatgatggatacccaaaagagatttcttgtgtaaaacacttagcaggagaaagccaatctgaaagcagtaataaatgcttatagcgtttttttttcttaagttcaattctcaaatctggtaaggggaaatgatcccattctatatgctcagcctccctctcatttcaaattatttgtgagatcaccagtaaatattttagaaaataagtaaatagcaagaaaaaaaggagaccttagaagcattctactgaggcccacccacccccagtattttcaaaagcactacaattgtttaaaatacctccaatcccaggcgaatagcggcttctgtaaagcttcgtctctccctctcaaaattctttttctgctctttaaaaagggaccattcttctttgagacgttccttttcttccaacaaataacagtctcgtaatagtgaagtggtatcatcatcatatgcagtagcgagctgctgctattaaaatttaaaacatagtaagttcctgagggaccttgcgacactccaacgagttgaaatgaaagcaagggaaggccagtcaaacttcagggcaggaatagaaattattaagaatcaaaaagtcaaatgagaattctcatttcccgaaacctactaccccaactagcaaagtatggactatttaaggagtggtacacaatgtatctgttagcagggaacacagactagaaatctgtcaaataccagggccttatgaaataaaggaatacaaatctggtaaggttcagcacaattctggcttttcatggagaacagctttaaaaggtaattcatattcacctgtaaaagctgttgctgagttttaatcatttctttacactgctgaatttctaactcgagtttttcagtttcttgttcatggtcttgtcgtgagattacatcttcatcattaaaaccttccaggtgtacctttgaaactaagacaaaatcagtaagttgacataggtcttatagccaccacttagtttacagtgttttgcacatatctttaaaacaagggctctcagaacttttatctttctagaattttataggttttctaaaaagtagttacgtcctttgactttttaaaatttcataagctataacaaaattaaatttatattattttaacattataaaaaatgtttaagcaaagcaactacaggagttcatgacgacaattacacatttgtgcaattttaagactaaatgatatgcttacaaacagagctctattgccaacaatttgtaatccatatttattcatgattatgtcctaattaaaaacagacaaaatggccatattcagagaagagaaaaataaaatcatgtttttgttgacactgcttcaaagatcaatgaagtgtcacaaatcttgctctcaaatattaaattcaacaaatacgaagtccaaacatacttgctatttgataataaacagcattgactcaaatgaacaaaatctcatgtagattcattttggtgctgtaataataattttgctgattgctctttactaatacttaacacaatggcactgagttcatattttgacaatttaaatttttctttaaataggcttcatttactgagcagaaatcttcattttcctagtttaaaagcattcaaactttaccaagcagaaaatattaagaatatattcatcaatgtagagctatgtataaggataatagttaagtgaaaaaagcacactaaagaaaaatataggtaatattcaatttttaaaatttaaaaaaaagtaagtatctttcaaatccatagaggaaagtatagaaaaatatgcaccaaactgttaagtgttatatgtatggaatagagaccaggatattctactttatatacttccaaattaatattttgcattaaacatctattattttaaaaataattttaagtgaattactaggaacatagtaatctgcaagcatctagaaataagcaaaatgttcctatctatactacgataaatatttcttgatttttgagagtcagtaaaagagactcagttttctctttttgggggggaacaggtggtgtttggttacatgaataagatctttagtggtgatttctgagattttggtgcacccatcacccaagcagtgtacactacacccaatgtgtagtcttttatcccaactcagttatctttatttgattgtatactgcatccagagcagatggatccatgatgtcctcttttcaaacattcactctgagaccaaagtgtatttttctcagtgaggttcaaacctcacatctaaatgtatgtaaaatgtcggctgtgcacagtggctcacacgtgtaatccagacactctggggaggccaaggcaggtgaatcacttgaggccaggagttcaagataagcctggccaacacagcaaaaccccatctctactaaaaacacaccaaaaaattagctggctatgatgtgcgcctatagtcctagctgctcagcaggctgaggcaggagaaataacttgaacctgggaggcggaggttacagtgagccgagatggcaccactacactctagcctgggtgaccgagcaaggttctgtctcaaaaagtaaaataaaataaaataaaatgaaaaaataaatgtatgcaaaatcttgctttcaaaccaccaaactgaagtatagtactttagctctgagcctataatgcggctttctaagtgactaaaaatcaacaccttaccaaatgtcacaactcactttacatgcatagaagcagtggttaccttggttatcaagcttttctacatgacttttcaaaattctccactgttttctgatgctgtttgtaagctgctctctcacagtttcacaggaaaggtcccacatactctctctgcttagttccccggcatcttcttcaacatcggaaataacctacaagcggagagagatgaagaggaaaggctagtaccttacaatggctttagatgctcaggcaagtagtcttcagtttgattaccagaggaagccacatcaaaatcatttctgtgctgtgtcttatgcatatatggcccagtatttaaatgtcttgagaaaaaaaatgagactcctaaattcagctctctctaaacctgaatttgaatccaaatacagttaatgacaagagtcatgaagctgtctgagaaggagatatcactacctgtctaatgtgttggatgttttcacgttatttaaccctcagctcattacaatgtgggaaaaccgaggtttagagaagcagcattacaactaagaggcagaactgatatttgacattagatcaacttgtttctaatcctaggctgcttaaagaaatgcacttgtgaaataatctctgaagtatttaataaaagcaactgttaattctattttcctcatatacttttttatataacgggagatacttttctttgtattctgccaaacatgaaatcataaagaagtagcaaactttactgatatatgatcacacagaatcaaagcaggataaagaacatggggaaacaatactaaaagggatatatgtcataataacccacatctacataaagtagttctaatttgtcattaatattcaggaaggcagagagatatacttcactaatttgaacaataaaaatcttgctggggaaaaaagaaagataaaagatgaaaagaaagaagggctgattcgactgctcgcacatggagatcagcaggatgagggagcaactgagtctgaagaactctatcagtagttgaggtcagcaatgggctagcagaggtcagggtctctgaggcggagcagacaggggaatggcccaggatccggctcatggtgattctagcccctgccaatactcaaaagctacttgccagtaactcttccaaggaagcacagcttctcttctgaacattttaaagcctattagaatactaccaatctgttagaaaaattattggccgggcgcggtggctcatgcctgtatgtaatcccagcactttgggaggcagaggtgggtggatcatgaggtcaagagatcgaaaccatcctgtccaacatggtgaaaccctgtctctactaaaaatacaaaaattagttgggcgtggtggtgcatgcctgtacttccagctactcaggaggctgaggcaggagaatcacttgaacccgggaggcagaggttgcagtgagctgagatgtcaccacagcactctagcctggcgacagagtgagactccatctcaaaaaaaaaaaaaagaaagaaaaatgaataattattgcacatttctcagattgaacagaactctctaaccacaaaatgaaaataaaaaattcggctgggcacagtggctcatgtctgtaatcccaacactttgtgaggccaaggtgggatgactgtttaagcccaggagttcgagaccagcctgggcaacaagaccctgcctctaaaaaaccaaaaaacaaaacaacaaactcattttacctgaattttcggtatatgttttacaagtaagtaggtcaaataataaatgaaatgtggatgctacctaggcattccaacattacatcttatttctcttgctataatgcttcaaaaatctttccctacaaaaattaaagagaaaagggagctagaaaaatggatcttttaaaactagaatatatatttaagaggtcattgttcatccacttaaacatgtgaattatgaagaattatacaggatactacccactggctgagtaatgggggtgaggagggtttaatcactgaagaaagatctccctgacttaccacatacttttgctaactgaaatctgatgatgagacgttaaggttggaccaaaaactgaagatgctgcagtagtaatggacactatgctaaccttgaagaagtattagtgaatgctaagaactgactagaagtgacagagtttgagataagaggttaactacatataagaggtcaagcaggcctcaaaatggagaatgtaaaagatattcgggaatttgagaccagcctgaccaacatggagaaaccccgtctctactaaaaatacaaaattggccgtgggtggtggtgcatgcctgtaatcccagctactctggaggctgaggcaggagaattgcttgaacccgagaggcagagattgcagtgaggtgagatggtgccactggactccagcctgggcaacaagagcaaaactctctctcaaaaaggccagacgcagtggctgacgcctgtaatcctagcactttgggaggctgaggcaggcggatcacgaggtcaggagattgagaccatcctggctaacatggtaaaaccccgtctctactaaaatacaaaaaaaaaaaaaaaaaaaaaattagccgggcatggtggcggctgcctatagtcccagctactcaggaggttgaggcagaggaatcacttgaactcgggaggcagaggttgcagcgagtcgagattgtgccactgcgctccagcctggcaacagagcaagactccgtctcttaaaaaaaaaaaaaaaaaaaaaatttaggtaatttttttttttaaatgttaaggagaaaaaaaggtaagtgctgggatgggcttatcagctggactgatttgtgataccacaaaataaataatcctcaaatacaggtttaaaaaacaagttctggtatcttgctgttaactagcattttccatcaacattattttcagatttttatcactaatgtgaacttgctgaaacctacgattttaacttatacgtaaagcaattaagtaaaatgaacttttcaccattatgtgatttttttttcagatctctgcatatattactcccattctctggaatgctttctccatgtttttttttttaacctcaaaaatacttattttctaagaagcagtgaaaatgtcactttctctgtgatgccttgattgccataactattctgttctgcacattgtaccaccttattacagcacctaacacatgtaataatcacttctccacgtctgtctttcccaaaaagagcttcttgagggaaaaagtcaaaatctttttagcctttcctttccagagactagaacataaagaacacccaataaatttatatttgtttcccaaagttaacagaagtttcactctgtgaaaagtagagtacataatactaaaacaactgaaaggatatttgacatagtggttatgattgtgagctctggagtgagaaacttggattcaaatcctagcactgtcatgtgtgatactgggctactaaatattatgccttagtttccttatctataaaatggggatatttatagtatctaaatcatcaaattataatatatgaaataatctcatatgttatgaggaatattataaaatgagacaatgcttataaagcacttcttaacagtgcttgacatgtattaattccccggaaaatcatctccagcatttttcaggaaatgtctgaaaacacataggaacagtcttttcagttgtcacagtaattgaaagtagcatagcagttgagtgtcctattcaaaataccaatagtgtccccattgagaatgcctaccacatattttaattattcttattagcaatctgaagactgtattagagaggaaagagccacttacagttcctgtactatcatctactctttctctaggtttcttcttttggggagaaagaagagaaatcatttcctttttcatttgttgaagaaccttcttaagttctgcattttccattaggatttgtttctgacgatattcataatcattcaagagaattttatacatttcatcttcattcctgagaaagaaactgtcagtatgaaaatgcaggatagaaggaagtctgattacatttatcaatttaaactggactttacctggcttcagttttaccagtcctccaggagcctctttttccatcagctctcccgacataattcaaaatgtccatagctacaaacatgaacacataaaattaattcttaccatacatgcttaagcatctaaaactctaatgcattctatacacgtaagtggtgaaagtgaacctggtatataggttaggatttgggcttaaacagcctaattttcgagtttctagttccaccacttgtaagcaatgagatctcggcacattatttaactgcttagcctgtttcttcttggacactgggaataacaaaagtatctaccaaagagttgttgagaagacaaagaaataactattaaagcacccaacacagtagagtgaacacagtatctggcgcacagtaagtacttaataaatgttaccttatcattattaatttcattatcagggttgcctgataatggcccacaggctggctgcctgattttgtaaataaagctttatgggaacacagccacatctacttgtttatatactgcctatggctacttttcttgttacaatggcagagataagtaggtgcaacaaataagttgtagatcccataaagctgaaaatgtttactatatggatctatacagaaaaagtttgccatgtcctgttaacattaacatcatcattttcatcaaaggagtcaaagcccctgatagtagtaatatcttctgctgcaggtggacatggaaacatttggcgtaaaaaggaaaaagagtaaattattataatcttagagttaataaaatcattatgaaactgtcacttccgattggaccaggaaacagccagaccgctataatggaagagctctgtttccagaactaaatccttaataaacttctctgtgttacactttatactttcagcatttcatcctgctttttaatttttttccttcatgaatgaatatgaggctaactaaacttaaaaaccaatgattctccaaatgagtaagattaactcaggatacctaaagatttccaatcttaacggcgcattactgaatcttcatttctatttttcaacaatttaaaaaataaagtattcagatacctccaacagctctgctgcagaatgacagtgatgtagtcaacactaaactgcttgctgacagcaggcagagtctaccacatgacagcctgaaacgtacgctcatcgcctgtttttcaaatctaaggtaagacagtttaggggtgtcacggtataatgtatgttagaggactacctatagtcactaggaaaccactcttcaataaataaatacacacacttcttgtgcctcgtatttataccaggccagcaaaactgtattgtaaagctctactttcgtgtttctttgctttttaatttacactatctacttgaaattatccacatatttggatgaaatggcttaaagttttgaaaaagactactattaggaaaaaagtataccttagacacacacacgcctaacttttatagtccatccttttgactagctgctccaaaaatgtacagctaaacttatttaaaggaactcaaactgacatgaacgatttggtctgatgaaaaattttatgaggtttactctaaaatacttcttttgatactcagaaactgacactgatttttaatattatcagttctttgctatggaaaattagaatgtcctctggcttagttttcctctatggattaattctacactggtcatgttaaaaaatacatgcaattaaataaagcaaggcagaatgacttactttccactaaccagttgtctacattttttatataaacaaacaccactgaaaatcaattgtataaagcatgaaaataacatttcgtgagttactgtgttcaatccttttacaattatttctaagcatagtattagcttatttattctcttagctgatctttgccagctgtttacctattttcttatctttcttgttcataacaagttgatgtagacgttccttcagtttattatattcacgctcttttctcttcatatcatgattatactgagtagctcgacttgcaatgatattttgtaatttttgcacctgaaaaaggcatttgctattataagcccagtaacgattcacaaatttgaaagagaaaaatcctaaaattcatctccccatataggttttaaaatcctaggatgattcttccttatttgtaaccagtagaaaccacttttttaaatattatatgaatcacataaagtttttttaattctgaaatttccagaagcgctaattttctaaattatctcctataccttttaccttacatatagactctgatcatttaaaaaccagatattcttatggaagtattaaaacgattaaaacttcatctgagataaacagaattcatctgatcatttttagtgaactccttgtattactgacttacaatcacttatactttttattaatctgtgacaaagtgaattaagcctgtgacacatggcagcaggtaagcaggctcgtttttctaattaaaaacaattctcgagtaagagtaagtccaaacagcagaataatccagtccaaatatttgctgagtatctactaggtgccagacactgctgttcaaaatttagatctattatagtttctcaggcaactcctgacagagtatgtcctattcttttataaagccattcccagtccctgctagggatcaacatgattaacttaatccctaccgaagatgagctgtattcaaaccgtttaaatataatcaacagatctagtcaaaattgtctgtgaactcaaggaaacacgtacaagcaaccttacagtttaaatactaattacctactacttactaaatatactactaaataaacaaatatggtaaaacaaatctatctaaaccactccagggcgctttaaagaaatacactcctcagaagtctttaattgtagttaaaacaacatataaaacactgaaactaagtattatatttttatagttattacatggtcaggggtcatactttagagcaataaaaacataatagtttctttctacacaaattaaaaaatatattttgaaatgcattagtgctataggtccaagtaaccactaaagtagaaattagaattctgctaagtaaccactaaagcagaaatcagaattgtatcttttgtgtcagaaattagatttttaatgtgaactgcttctgtgcccatttaatgaagaaactggttgactagacgaacaatgtcaatatttaagacagtgcatgcaagaaggggcacctcagctatcacgtacaggtacagcagagaataaaagatctgcatttaaagcactcttgtgcctaagaaaaagtgacagtgaacatgagtccaggaagggcagtccaggacactggctgttaccagctatgaactaatatctaagccaaatggatccactgggggcggggtctgtagtggagagggttcctgagcttccagttaaatactattacacaaaggtccaccatatcaatttggggaaagatgaataaatggttctttcttttttcaagtaaagtggctcttatggtcatctcatattacaaagaaaacaaaaattcacttaaacttcatctgcaataactgacaactcacctcatctttctcattctttagtagctgatgcaaattcctgttcttacattgtaactgtctgtctctttcctgaagcccaatcatttccctcctggaggtttccagttgttcctaaaacatttataagcaattttgcttaaaattaataaaggatttagaataactgaatccttaaaatatcagtaacaagaagttatacatcctagtgtttattagtcaaaatcaaatgttagtggcacatgaaatgtttatttaaaggaattattacaaagcacactataaaataacatttaaacttacacatcaaattttaatctacatatcaaattttgtacacatatacaaaagtgcttcaaaatggatccctggaaagagcatcactccatgatgctgcccctgaatatttttaaagtttatttttaatactttttaacacttctataccacacttttgaagatctcctcaagtacagcaatgtcatcatccttcgagagtatacttggctttgaaaaagaagcaaaagtgatttggagctaagtctgaagaaaaagatgggtgaccaagcaaagtggcaacacatcaagtcacagaaatgggacttctgtgtgacaccacttctccctgcaagtggtaaagtctctgaaggtacttcccagagcggaatggcagcaaagccagaattagtatgaaacaagatgctccttttcaacttatcgcatctgaggaactgtgccgagttctgcatgaggccacccatatggaatatttttaaaattgtactaatatttttataaaattcaaaagccaatcaaattatgtcttaaccgaccataaataataacttgcacaatttctgtaagaacagatctcaagaaggtacagaaaatgtaggagtataacctggataactctaaggttgtcagtttttggcaacctttttttttgaatgtgtaaaacttactactagggtagatcagttggcatgacataacttacaggcactaggccaggtgatatgtagcatatatgtcaaatcagaaattcactcagcatgattatcaacactttacctgaactcagcaccacccctgaacatctgcacacacccctccttcctttcttagtgaatcacatcgccatcctcagtaactcaaggcagaaacctgaatggggtcttgaatccatgacccctagtctccaaattcaatttttcataaaatcctacccattctacttcttaagtgttcgtcagatctcaatcttacttactattcccattagcactaccttagttcaagtccaaaacctcagcaaagggtcgctaacaggcatctttatcaccagggctttctgagccccctaactccatcccaaatacaagtctgcaattcccctataatttctccaccccactgccagaatatttacacattgtcttcctcctgtttacaactcctcagtgcttccctgtttttgtacaattccttttacaccatcaggagatgaggctccagccttacctcataccactcttcataccatcacatacccatcgcagccccaacagagatatttgtggttcctctaaagtgcagtgatctcttatgctgctacgcatttacacaagtcatatactctgcctagaatgacatttccaaacactagcaaatttctactcattcttccaatctcagatcaggtgttacctctccatgaagccttcccttgcgtcctaccccaagaacaattaatgaagcaaacagttatgtttcaatatgtctcccttccctggactgcaatctcctcgtgacctaggactggggtttcactcatctttgaaactcagtgcctagcatatactcaataaattttgttcaacaagttggattaatcatatgctagatctagaaacttttccagatagattggcaactttccccactgaatacacatttctgtccatagttgacccaaaataacaagattctggcccaggtcaaatcccatattagaagacatcctgaagaaacagtctctgctctgggtagtcctaataaatgggaccactccttgaagtaaaggctcaatagcctcagatcaccaacatatcataatgatttactagctacttataagacatgtggccaagggttacaactctgcatcagcccagtacttaataagaccttccataggtctctctgatctggattaaagtagcatccataactcataaccttttcacaagcctagggggcaccaaataccctctccaatctaccacagttccccagtcagccaagacacatagctggatcatctttatcccttaggaatataagatgcacaaaagcctaaaaacattattaagagaaaacacacttttatcattgtgtatgaaccaagaagacaacataagacagcattatcaatgacaggatggtaggcacaggtgctcgtaaagagcaaagatgtctctaaaccaatccccaagtgtttctagtgttcccatgtaggccaactctatgccacatcattacagcacatttcctgctagggggtttttaaatattctatagacaggtcctattattccctcacagagctcaaagattcaagattctgagtgggttttttttattgttttcttagatggcgtggggtgggggaggatgtacacaaagaaaaataaggaaaagtaaacgggcatggaccaacagatgaaaaactaaaagaaagctgatcatctgacagtatgcaaatgcaaaggctttgattttcacaaataacaaaacccaatatagaattgtatatttaggaaaaaatttgacttggattgatttatattatacccttaataatatacaactataagtcccaaccaccccacgattttgaacaccttgttcccttctccttggataaacattttaaaaataaaaatgaaaacataaaaggaagaaaaagaaagaaatcaaaatagaaaccagcatcaaatattctacattttaaagttagtaggttcaatggtcctgtgaaaaatacttcctttttttttttaagagaaaagcaagtttactaaagcatttttctatagtcttttccagagacccagggcttctaagggaagttatctagtctgatttaattattgagccttagctcatttggcatcacagatgcctcaataatatttttcttggaattaacctgtgcagcctcttacaataagacttttaaatgaagcatatactttcttaaccaagattggatggggtgacagaattgttattttattttcccagagcataaatatttcctaatctaactttttacagattcggcaagtcattaaacagctcaaaaaattaatgccttcaatatactgtaggtattaggaagcagatgtgtgtaaattataagttcacttttacttacctgtttaaaaagaaaaccctaaagcttaagaaaaccctgaaatatttaataaagtcagtaaaaatttatagtactcaattatataattatggcattaaaatatggatctgcaatttctaccttaagttttgagtagcagctctgtagatggtccatatcacttcccagcttcaaattctgtgtctccacattttcctgagctagaaggttcttccgctgaagcacaagcagctcattcatacaatttagtacagctactatatttaactctctctttgtctctttacctttggattcttcatataatgaaggaaaaccaaaagtagtcaattcctggtaggagaaaatgttttcttaaagttggttacagttgaggagatactggtcagaggatacaaactttcagttagataggaagaataagtttaatagatctattgtacaacacggtgacctcagctaataactacgtactatattcctgaaattgctgagcaagtaaattctcaccacaaaaaatgatataagtatgggaggtatgcacactgagccatttcacaatgtgtattatgaaacatcatgttgaacatgacaaatatatataatttttgtcaaaaattaaaaataaatgtgaattattttaaaaggttggttactgggcaacttagtaaaaaaaaaatcaaaagatagaaatcttttcttagaaaaatagaaaactatcttgaaatagttaagaaaatggtcaatatcccaaaggacaaagagttaagaggacggggctcttttagtctctgctataaatctgtgacatggagcaaggcacttgggtttctgcatccataaagtgatggctggactctcagtggaggagcccctgggacaatgaggaggccaaggtgctccacacaaaaaagttagacttgctatctctagatgagataatcaccaaggttctctgaaaatctaagtctcaggggcactacataaacaacaaacttgtgtttgacaaatgtttttctcataattttgatacattctattatataacatgatttatgctactgttttttacaaaaacatgttacctgatcaagatatgagatactctgttcaatattatcttctgtgcagaaggcactgaaaaaactgtgcacatttttcgataaaggtattgaagaacatagcacttgctgtgagtataaacttgatggagacatctttgtttctgaggtatattgagagatagttttgctttctgaaagaataaaaggcatctatataaataatttagaaaaacgtatgtaaagctaacataatcgccattactaaagactttgaattacatatatacatataaacatagatataatatatacatacatattttaaggtattttcaaattagggcaaagcctctttatgaaaatgatatacttttttttccaaaaagatacaaatacagtggtgttctcagtagacatgaaaataagtattttacaacgatttgtctctctttagtcacatcttcaacatctgcagtaattattttatattttcattgaaaaattcacctttacagtttctgcttttgtttacaattatttagacttaattacctgaagacagacctggatctgtaacagtcatccaatctcccatagcaatctctagagccaggatacctgaggaactagttcagcagttaaacatttagtctagctgctgtcactcttctatgtaggcatctccttaaaaagcagattatagaataatagcatctaatttaaaatatgaaagccaatataaacccaatgcttaagaattagttgtatgtgcttcaaaacagaaggattttgcaatacctattcccatgcacagatatagaacatggtgtgtgtatatacatagaaatataaataatatgtaaggatcaaggttaaaggcttcccaagttctactgaggtattcatattactttatatacaagatacatggtacacgatttgactcaacatacatctaaggtatagcattgtactaagtaatatttctatattatatcctctaaaataaaatacaattatatagataagatgatgaaaaacttcttcttggccagcattttcatttttgtttgtttttaccaactatattggcaaaacttgtaaattacaattcccagtgttggcaaagatgtagagaaatgaaacttccatatactccctccagattatagcaatttacactactaccaagaaagctgacaatatgtttcaagtcttaaaatatattttgatccagaaaatctacttcaaaaatattatcctaataaaatgctgtgtacaaagataatctaaaatgttatttacaatatcaaaagaacaaaaataatgtgtttatgtttccatagaagaatgagtaaataaacaatatatttatacagcatttaaacgtaactgtgtggaattaggatggcaaacaaacagccaaaactacaaatgaatggtatggactaagtataagacaccttttctgttttcatttatgttttcacttttttatagagacaatggaagagataaatatttctccatcataagaaaaacaattcaaatgaaattgtaagtggcaactggcaattgatttcaaggtcagggggaagaggaggaagggtgaagactgcaggcagcctggggaacacatgtcaatactgtggacagctgcttctcggctacaataaattgtggtcaaggggaaagcggttgtgttgatctttgatgtttttatgagatactggaactctgaatttttatgtgaagtctcccaattttaaaatgctagtagctaattaaaaaaaaaaaaaactctatgtattaagttatcctgtgggaaaggggagtggctagagaaggaaatgagtgagtctggggtgccaaaactttttacatcttgatctgagatgtggttatactggtacacacaagatcagttcatcaagttgtacacttaagatctgtgcacttgactgtaagttatacctcaaacaacagcactatgtaataagccaaataaaatgtgtctttaggccagatctggactgtggatcaagagttcacaaccacagttctgaatatttaagactgtggtaaaatattcaaaatatagtgttaaatgaaaatttagtctggctgcagtggctcatgcctgtaatcacagcactttgggtggctgaggtgggtggatcacttgaggtcaggagtttgagaccagtctggccaacatggcgaaacccccgtctctactgaaaatacaaaacttagccggcgtggtggcatgcgcctgtaatcccagctactcaagaggctgaggcagaagaatcccttgaacccgggaggcaaggttacactgagctgagatcgtgccactgcactccagcctgggcgacagagaccccatctcaaaaagaaaaaagaaatttatattcatccaataaatactaattgagctcctactatgtgctactacgttttcctaggcacaggggaggccatgttctcaagaagtgaagttcatattctgatggagatagaaataaatactaaacaaatgagcaacaacttaacagagtgataactaaaaagaaaataaaacatggtaatatgagagagtattaaggtagggagcatctagatcagtgagaaaacctccactgaaacggtgacatctgaagtgaaacctaaatgatacggagtcagccgcaagaaaatcaatgaccagagcagcccaggtaaaggaaacagcagatacaaagacttatgatggatattaatgtgttaacgatgaaaaacagagagaaggccagtatatttgaagcacagtaagcaaggctacagcgtaggaagtcggatttcctctaaactgcaatgaaaatctattgatgtgtttcttgtaggtaggaaagtagcatgttctcttttatgctttaagaaagattactgtggctactctgtgagtagactataggtaggcaattgtagaagctggaagaaatcaggaggctactacaatagttcaggcaagatgaccagtgttaaactacagttctaacagtggaagcagaaacaggcagatgaattagggatgtgttctggagacagaaccttcagaactcaaagatggattgaaatgtgggcaaaaaagaaatcaaggatgatttctaagttgtagagaagcatataatatatactaagacagatgatgttacatgtcatattacatgttatgatgttacacacacacacagacacaggaggtaattcagtctggcaatggtcttttgccacttttctactcatgtgcttggtaaggaagggcaccttgaactattttgttcttcccactgtccttaaatgggtattagcaacaggatgagaaggataaagactgtaccaactaagaaagacactgattttacttctagctttctgagataatcactataagtaaaacagaatccaagggacaataaacctattctaatagaactctgctttgggtaaattccttaacctctctgagccatacctctctgataaattaccgtaacaatgaagcatacctcctaagtttcccaagagataaggtataatgtacttatcccaagagataagtcataaagtatttagcacactgcttggcatagaagacacacataagctaatattaatcatcatcatcattattatctagacacagggctatttggtataaatgacaggcttctaaaacctataacaaaatgtaccgctgctcttaataaaggttgaacacatattcttaaatgatctagagacagatatctttataaaaacacagtaagcagtgagctaatttcataatcaactggttggggggaaaaaacaaggtcagaagaaaacagtaataggcacctttccaatttgtgttcttgttaaggtatttgtaagtaagacaatagtgccttaagtgtcttttctccttatacagaaagaacaccaaaatgtgtctattatatatccattctttaaaactgtaagtcagttattctctctgcgaatttggctctcctgtctatagattagacagtgaattgttccctgccctattaataccaacaaactttgtaaaatgtttacaatgaaaaccaaaaccccattttgaagtcctatgaaacaaaaaacttaactaacagtatatgatttcacacaatctaaaagcttccatgaatgctcttctgttcaatgatgtaccaattacatgctaggagacttgcgatataagaaaagttacccgaccagtttttccaagaaaggggacttacgactctttatcaatacataccctaaactaagcagtgaatttaagcatattattgtatttcagctcaaatatagctaaaactgccttgctgaaggttgcaaagcattttttatgaagatgttaagctaattcaatgttaatttcaaaagcaaaagaaaaaggtaacagaaccatatctgttttgcataaatataataccatcacaagcccatttcaatttgaaagcatcaaatgcaaccaagaaggactccattacaaagtcagtgcaggaacacacgttcatattatagattaatcaaataatagtaagccattgtatagtggacatgattattcctcacaactggatgagaacaaacttagttttctagcactgttaccatagttaccttaggagaaaaaagtaagcagtgattcatgttttagttcaagtaatgtgtaacctaaaattctatctattaatatgattggttagagtatgtgaaaggcaagtaagtcttgggaccctgaaatcactaagccaaagggaaaagtcaagctgggaactgcatcaggcaaaccagcctcccattttattcctaaataaaatagctacaaagattaaaaagctacatttgtccaaaattccttgtgggcctcaaggtttttaccctaaaacagttctgttggatttcactcttgcagtgtaagctgatagcttattttccaacgtgtgggacaaaggacagaactcaaagttatccctctgcttacctgagacaaatgcacatctgattgcttcctatgccctattatttacgtaaaaatgcagattcaatgaaccagactaaggtctaagtggctattcctctacttccctctcacatgtaaattgcgtattcagtgaaaggctgatcaaagacccaaaagaatgcaacctttcaactcatctacctgggtcctggaagcccctgcccccctttcccttccacttcaagttgtcccgcctttccagactgaaccaattaatgtacatcttacacatactgactgatgtctcatgtctccctaaaatgtataaaaccaagctgtgccccaaccaccttggacacatgtcgtcaggtcctcctgaggctgtgtcacagatgtgtctttaaccttggcaaaataagctttctaaattccaagatacagctacccaaattccaagatggatcaaattcatgagtgaattttatgagcaaaccttgaacattaaataattaaaatatcttgtaaaaggcatttcattcatttaagattgtcagggaacaaacctgaaatacatcaaagcaaaagtataaagtaatccataaataagagacatagttttgttcattagcggtaggtaacacgtatatagccatctaataaacttccttgttcaaagtacttctcaacatagattccaatcaatgtctttatactgtaatagaaaatcttataatacttttagtaaaagctttaccttactacttttgaagtagtaagtactttttaagtattagtacactgtcttccctatatgtcactatgggttgcaaagtaccaatgccatacacttcaggtataaaataagaaagggaactctggtcttttctgggtaaaatcatgcagagcttaaatctatcattcctcatgtccaagtgttttctcttttgctttctgtattatagacaggaactagtgctcagagagatcaacaggtttgcccaaggtcacatttctaattggttgtgaagccaggaaacaaatctgatttcaagactctgtgctcttttcctttttttttttttttttttttgaaacggagtctcgctctgtcacccaggctggagtacagtggcgcaatctcagctcaatgctatctcagcctcccgggttcaagcgattctcctgcctcagccttctgagtagctgggattacaggcggatgcctagctaatttttgtatttttagtagagatggtgtttcaccatgttggccaggctggtcttgaactcctgacttcaagtcatctgcccgcctcggacttccaaagtgctgggattataggcgtgagccaccatgcccagtcaactctgtgctcttttcattctatcactattcaacctttcaactttgtacacataaatctctatcgtgcatgcacatccaactgaaaatagaatataatcaaaatgatttccactgtttatttagaagattgtgttcttataatccacttaaaatgagtccattcagagcatacaattctcactggaacttatatactaattaagttgaggcatacttgtaaaattggtctctgcttggccacaaacaatagctttgttcttgtttatacttctctatcgtaaatatcaacacaatattgaaactaactttatagacctttagcaaaaacatcttgttttttctggttaatcacatctgttttttccatcagtaaagttcgttggctagctcatctttttccttctaccccaaagacgaagaggttctcaatacacaacaataccttgtagaactttaggtaagcagtctctaggatggctctcagttatttctgccttctggtggacacgctcttgggttattctgttccttgagtatgggctagatttattgactagcttccaacaaacagaatatagcagaagtgaagggatttcacttccaaaattaggttataaaaaggctgtggcttccatttaaggttgtttttttacttgttgccctcttaaatccctcctcctggggaaaacaagccatcacgttgtaagcaactctatgagaggtccgtgtggcaaggaactgacgtctgaggtcagcaggatctgaggcctgccaaaagccatacaagtgagtttagaactagattttacctcattcaaaccctgagatgactgcagccctgtccaacaccttgacagcctagtcagacaccctgagccagagcacccagctaagctgtgctcagattcctgactcatctgttctaagctggctgttaaagctgctaaatttcggagtaatttgttatgaagcaacagataactcatacaagtttttaagtatgtatattaaatatacataaatttcttgagaaatttcggagtcccttctaaaacttaaaccataatttactgaaacataactaaaaatgatgccatacactacaaatgccactgatcaggtttttaacaatgatatcatccagtattacaattaatcattctatagtattatggttagatgtcttcccgactagtttatgaacttctagagggcagggaatgtctgcatctttgcagccaacagtacctgaaacatagcaggtgctcagtaaatgtttacaatatgaaccgagtcccacttgtggcacactcacttcagcctctgtgcctccacctgtgcttccttcttgcacgtatttcaaaactaatgcttttacaaaacagtgcacaaccgccatccccatcacataaccttctccaactactccagcccacaaagctcaatctctaagccctccatatacttattggtttgtttcatctttcccaaccacactctcaagtaccacacattttacatttctgtatcccctccctcccactaagcttaaaggatggcataatcaatgaatactcaaataactgataacaaattaacatgttcattctggcaggtagaggtggagaaaggaaaagagcaatggaaaagtagcaaaagaagagtcaatcctttacagaaaagaattactctcaattcccatttgtcttgtcctcttcacccccaaatctctgcaactacaaactgaaagagagctctgcagaaacacagtattctgattacaagatttccctcacaaagtacagtactttaagtgttcttttcaaggtcacttgaaagtcaaacttgagaaggtacaattgcctacctactcagaattctaaaacaatttcagtcgacagaaaataatagctttccattatagagggacatggtaactttacaccatctgggcttctaaatattgcacagaatttttcacaaatagagctaactgaagtctttgctaaaatctcacaaagttagagttaccacactgttgggttaagaagataaaactaagtgttgggttaagaagataaaactaagtcacttaacattagtcctattttacaaattcagtcctaaaacttaacaatttagtcatcagtattgactcttaaaaactagatatattacaattatttaaaactgtaataccaccttcaactatgattttgttataaaggagaccgtagctttgaattccattagaaatatctctgcaccttaaaattgttcagatgcgcacatcagtacagaaacacattaagtccaacctcttagaaaatctactctttatgaatttaaaatctaaattatttcttctgagtggtgccattttccagatattttccacagaaataaactcttcctcataaatttaaatacacatgaatggtgcaaactcaaaaactgatattaataatgtgccttcctgatgttttgtggccaatagaggatttatagttggaaagtacagtgcaaacaatgccagcctcagaggcccgggtcaacagactgattcatatcttgacgaagacacttatttccaagatgctctcttcaagatggtttcctcaccttaaaatggggtgatgataatctacttcttaaggttgtggatatttaacagagtaagaggtggaaaactaagtacactataactaggacatagggtactggtttaataacacatgtgccaggagctattctaaatgctttacgtatgtaattaagtcaatcttcacaacaacactgttattttttcctttttacaggtaaggaaattgaggcagagaggttaggtaatttgcccaaggtcacagagctagcaagtggcagaggcaggattccaaccccccaaccccacattggactgcagagcccattctcttaaccatcacatattgttgcttcagtgggtgaggggctcaggaagcagcatctcctacgactactcctttaagaaccagaaaaaacagaactcaatctatctcccagttgggctcagactgcataaaatagtgtgaacacataaattatggtacaataattcatgtgtatctctgggttgagggatataatctcaatgaagctcctggccaaaatctgccattagaaagccatcctcagcttagaaagcagggagctacatgctgttctttaaattccttatatatctttgaactgatcattgctgcagtatgagaaacagtacagtaaaagagttaaaatccaaagccagaccatctggttccaaaccccggcttctccacttacagactaaatggtcctgaacataaatcttctttgggcctcactttcctcatctgcaaaaggagagtaaaagcagtttacctcaaaaaattatgtggttaaacagtaaatttagttaccaaatttctttaataattttattaaataaacttatgcatgtagagggcttaaaaaaaggtcatgggtacatggtaagtgctcaataaatgctagctattattagctattttactcttggaaagacttccatgatattttgttaagtaatgtaaaaaagttacaaaaccatatctaatatgagcttatttagtcctcaggaaaaaaaaacaaatatcagtagatatgtacaggcataaattctgctctataaacacaaaagttggtataaggacagaaaaaattgcaaggaaaaaccaacttaaaaaatagggaaaaggcaagggcaggactttcattcctttctttatgtactttcatgcacaaaaatataacttttattttattgtgtcttccaaattttctataaatgaaagtgtttttcatattaagaaaaaaaatttatgtttttaaaaggcaattatggtgatgataagcacaggaaatggggataaacagcaccattctgaaccaccaaaaccaatggtagaatggcatgagtgataaaaaatgcataaaataaaacagcaagcagtcttgttgggcaaaaactggttagaaaattatacaaatgtcctacagttttttaagatagtcaattatgtaagggaaatagcactttaccagagatcagtagtttgttgttttaaagggcaattccaacagtatacaaatatttgaaatgtgtaaatctttccactaaacaatcatacttctaggcatataagagagcaagcataatatatattgaggacattgttgaattgcagtattatttgaaatggcaaaaaactagagacaatcttaatatccatcatggacaaactgttaaaaaccaacacatatggtacagccaggctattctgggattattaaagattaaagcacatatgcatgtatagcacaaaaaaagaagttacaggttaattagaacagtatgatcaccattttttgttaactcaaactacctatatatatttaggggaaagttctggaaaagttacaaaatgtcacaaatgacacttcttgggatggaataatttgggtacagggaggggtagaagagcagggctttcacctcttccatagcatatctttatatagcttgaatgttataggagcatgtattattctgtaaaatttttagcagcagagtattcaagcacaattaaatgagataatgtgtgaaagtactcttagctcaatcccaaaaagtagcagccctgtccttgagtggaaatctcgacttagacaaatcccaccaatcaggtacacttctagcacctgttccacatatgtacgcatacccatgagcaagggtaatgcagtcttcatacctgagggaatgtctgtgggaatctggcccatcaggaagacagggaacagaaatacagaggccagacttttccccaactatcatcaagggcaaagccatggagtactggcagacctggcaaaagtggactctccccctggcttaatgaacaatccaaccttggtaggaggaaagagggaaattgactttattaacaccctcttcaaaaacaaatgctcttcatctttcaaccttcaatgaatgaaattactaagaaggtgcatttccgcttcaagagagcagctcacaaagttaaatacggtagggacttaatctatgtacaccatctgatattccattatatactgactttttattgctaatgttttcacctgttttggacttggctgccaattaaactgttagttttccagggcgctgtcacttcagggaagctgcacagggtactgagagagcgctggactgagtagcatcagaggccatggttctcagcaacacttctgttatgtactgagaaaccttgaaccggtcataatttctttgggtttcaattatgaagtcaaactagatgacctttaaagaatttcaagttctattatcttttgatttttacatttctcataggacccaatatggaactgagtacagctatttatatcaaaattattttgtcttcacttttttttttttttttgagacggagtcttgctctgttgcccaggctggagtgcagtggggtgtgatctcagctcactgcaacctctgcttcctgggttcaagcaattctcctgccttgacctcccgagtagctgggactacaggcgcatgccaccgcacctgctaatttttgtatttttagtagagatggggtttcaccatgttggccagactggtctcgaattcctgacctcgtgatcctcccaccttggcctccaaaatgctgggattacaggtgtgagccatcacgcactgccttttcttcacatttttataacaatgtgcacacattgtctttacaacccaatgtttagcaaatgagattctacctaattttaataacaataaaataatttattaagcatgtagcaattacttggaacaattctaagcattttatgtgtacgaacttattcaatcttacaatgatccaaatactttcccccattacagataaggaaactgaagcctggagttttcttgacctaggatacagagctggaacatgacaaagccaaaattcaaaccctggtagtctagcacatttaacattacaccctactatctttagtacaggagagggggaaggatacaatattcaagctgctttttttttttttaagttttgggatacatgtgcagaacgtgcaggtttgctgcacctatcaatccgtcatctaggttttaagccccgcatgcattagttatttgtcctaatgctcttcctcccctcaagctgctttttcaaaccgaacaagtattctcttctttaccacctcacctgaaactaaattataatcaaataattatgccaattgaataactggaatgggaactacacaaaagcagacaaaatattaaattctggatgtagcaattcaaaaaaattttgaaaaacctagcaaatatattgccaggctttccctgcactgccatcccttctctctgtgcttctagaacacttaacatgaactgtattacagcacagatctaacaggaataaaatttctctcccaccacaactgagttctcatttggcaggcttgtcagcatattctttgtaccccacttcggtaacaggcatcatcactcactccaaggttggagcccagtcaagattgctgaatgaatgtccaagttcaaggatgtattagtgtaaggtttgctgctgttttagtatgatagacaagtcaacactttggccatgctgcaatttggaagggctttcaacgtaatcttgattggtaacagctcagagaaggagaaaggtgattcagggtatgaatcaagagcatggcaatttacaaacagtgtatcagtttcaaattcttccaatgtacacacaggaatagcagcaatcatattcttagaagattattaagaaacaagaaaaaaaagaggcacttttagaagtctatcaacttttaaggttaaaagtcagctaagaagtccaaatcaaattttaaaattactatttattggtatttcactcctcaaataatgaaatggtaatagcatctactaaaggcattggaaataacaaagaaaccaaacataattaataaatctactcatcgttttttcaatgatttagcccaaattcaatcattggttatagttgtcaacgtgtggtcctgggaccagcagcatcaacatcacctgactcaataaaaatgcaaattatcaagtgccactacagacctacagattcagaaactttagtggtgggagaacctccacgtaattctgacaaagtttgagaatcactgctgtgttctatagaatgtggttcagtataaattagtattctatttatatgcactttcaattagagaacaccaaaaaggaattcttatctaagggtcctacaaaatggattccaagaatgatgtaaaagtgttccaaagcactaaatggaggctgaaaataacagtcctagggaatgcctggctaagcagcttattaaaccttagaggatggggggaaactctgaaaaataaacagttcatcagctgaatattcatttatcctattcacatactctacagcccagcaagtccactcctagtgaaacccaatcgaaactcttgcctacgtatgccaggaggtgtgcacctatacagcagcattcttcacaatagcgagtagcacaagagtatcaccctggaaacaacccatataccaccaacaggagaatggataaattatgccatatgcacaaaatggaatattatgcagtaatcagaaaacttcagtgacacataatataaatttcagtattataaaatgaaaaaattttcagaagatagggcatgtaatatatacagttttaaattatgtgatgcaataaaactataaaagacaccgagagaatgatgaatataggattcagtaaatagctgcctcaggtgagggacagaggaaaaaggaatggaggggcccacagggttatgcacagggttaggtggtacttactgtattattaaaactataaatggaccaattaaacaaacgtgtcatgagccaaggaatataaactaattctttacacctgaagtcctttaaaatgctttaaatacatatatataaaatgttcctccaatatttcaaacaattctaaattctacccagtcagtttggctgtggaggcaccaagagccctgggtccttggccttactgccaactcaggggttaaaatgttttgggtcccaaaacccaaagccaatgaccctcttcctttaaaagtacaagaacaggcaatttgggctagagtttcagaggatctatgaagccatccatttgcaaaggatccatggatggcaagttaataactcctgtactagctaattatgtgaaactggtaggagagaagctgatgatgaactcaagagcacctaatgcatgccagatggggctccattagctgttatcacttaatcctcacgctagccctaggaaggagtaaagatagcactggtttattgatggaagaaactgaggcaacagattaggtaacttacagttacaaacctggaagacagaaataaaatccagctatttaacctggaaagactaaaaactagctatttatgattccaaagcctcacaggcctggtttcctcctgacattcaacaaatatgctgagcaaatgatatcaattctctgagcctatcgcctcattataaaacaacatggctaatgatgggttgtacttacagattatttctatgatgttggcttgcttttatagtctagatcctatgcagggggatattcctgaaatttggctatagaatagaaaataaaatcgaaggctatagaatagagaataaaatagataggaaagcacaaccagattacaattaacaggcaaatgaaaagtataggcagtggctggaacccatcttgaattttaagtatctactttacactatttaggctctatatacgatttcaaaattatttagtcctacaattcttttagaacaatatttctctacaaatctcctccaaacttaatgcttgcaaaataagttctatttgtagcaccgtggcacaaaaatatattctcagtgctgactgtatgccaagaactacacatgaagtaacttaaatacttttttgctttttatcttaatttttaaaatttttttacaaaaagcatacaatacttttataatctgaaaaaaaaatctttgagacagatattatagtaaactgggcaattaatggtcagggaccagctggctgacttagtcagtgactgaggatagtgaagaacaggtaagaaataattcaggacatggtgacaagtacacaaaagggaggcatctactctctcacataaaaacctgtctttggcacttgacagataatagtgtcatttagataaagggaacagaggagtaaagttagtaaaactgggtttgggcaaatgtgtggagataatgagctttgtgtagcttactgggtttggagatgcccttatgagacattcacatggggataaactctaggcctagaactcacaagacatccgagcacatttagatagatgaattcataaagaaaaaaggggcaggagaacaaaccccaaagaacatcaacataagcgagtgaagcagacccagacacaagagatacaaagagacaggggaacggacttcaggaaagccaagggagaagacttttaaagagaaagggtgatacacagcagcaaatgccatagaatgggcaggttttgaattttaaaaagtgttgaattcggtgattagtgacttaatgacaaagctgaggggtaaaaatgaaaatcagacttcagaaagatgatcaccaaataagaaaaggaaaatcacttgttcaagaatctcagtttaaaagaatgttagtttctctgaatgtagaggctttattagacgctcatggatagatctagcatgacaaaaaaaaaatcctgtctttaaagtctgttcttactcaattacagcatttttatatcaagtagaaatattaagtgctcagtaagtatgagctatttttccaggcattgttctggatactaacctatttttctaatcacacccctacgaagcaggtattgttattatccttcataaatgcgacaaccagggcacaagatcacatagctagtagtgtggtagatcaaaccgaaaatgtgactcaagagaatatgagaaaaggatatgtgtgaagcaagagttaaaagatgagaacaactggagttaagattgttctgaatgtttaactgcttgtagtttcatttctatttaaaaacttatttttgctaatttgaaagactatttcttctctcatctcagaatcctacattgctagagtctgacatttttatgtctgacacccagattctgtactgcattataactgtgttatttctcctactgaactgcaggttgcttgaaaatggggaagtatcttatttaatttgtatccctattcttccagtcttcaaagtagaagatacttaagaaaggtttgttgtataattatttctgcttttctggagtttctgagggcttcagcaaaatatacttcaagtctaactgctgtgtgggactgtctttcagatattatttgcactatactcaatacattttggatcactcaaattactgattttggtggaaatatccttctaaagtaaaaataaaatataattccccttcataaaaccttctgaaggttccctgtaacctactggtcaatgttcacagcactgttctacagccttattaatatggcaaccccaccctggtccaactctaccaagccacctgtaactcaactgtacactgctgcagaatgcaccagctgcttgatgaactccactgcctctaccagacacagctgaaattctccttctttttgaaagccttcctatatttgttttttgtgaggtttttttgcttcctgcctcactatgctgataatttctaaaatacaaattcctcaaggcaacactcatctttttatcctcaggtcaggcaagtagcagcttactaagcgtttaatgaatgtttattgaaagaattactaaagaataattcagtaaatctgctggtactacataaaacattggcccacaatcaaaaggcacaattctaggatgtttttcattactactaatgaatggtgcatttctctattctatctcatcccataaactcgtgaattcaagataacttgtaccttcactactagctaaccatatcaccattaccaaagccacaaaacaaacccacatcgtatcaaaacctctttgcgtcatgagcaaatggtgaaaccagtaaggcatattcacagctattgtaaaagatatggaaaaaataacttaaaaatctttgaaatcgatccaatttaagcatgttaaatgaattaaaatcacacaatttgggggcggtgtcttttcatgcacctaatttctctaggggtatactacataaaaggcactcaaacgcctactttataaaaccggtgtcacggcctgctttggccaaaaagcagactgtcaagtactaggagatcccaagtatacaattggacactgtgctggacttgaggtctttagcaaacaatttcagcgtaacattttagttttctcatatatctgcctcattatgtttagaacataatgtgctttaacaagtcttgtcacaaggcacaatgtgttatgagatctccacatttcatcctagaataactaagtcttcacagttatcttcaagctgcctcacccatgttacgtaatccatgagctttttatcttccctgtacagttggggaaagagaagggaaggaagagtacaaaatgacttggcctaagaggttcagccagtcactaaaagagccttcgttttaattatcagttcctaaccctcttctcaaagaaccgttttgtttgagaaaccttcattaacagcaggcagaacagagtgttaaattagctattagctttccttacttgtttagtgtgaatgaataacctaagcttcctaagcctgtaggttgatagttttaggataagagatctgatggatcaagttttgccgactggatccaaattcataaatctacctctaacttctaaatttcaaaatagcttgacgtgaactttaaaggcatttctttcctctccaaatttctaattctttacaaattttattcactctcctaaatgagtcaactcataccaacctttctagttcaggatcaaactgtaggatcaccagaattttcttctaccccacagtaagccaaacccccatgaaccatgaaaaggtccatgacatccatcacccacagctaactctacaccttgactctaatctgaattgttagaaagcccaggaagttcaagaagcctccacccttacacttctaaatcaccttcttttctaatcctcaacctattacagcgtccagaaaagagaaatctcaattctctcagattcaagaactttatcagcgttgctagtaatcgcagtttggcatttacaactatgggtcctgaaactgggtaataatctaaaaattcctacattatacgtgcagacagcaaattagtatattctatgtcctgggcccaagcgatatgcctaactgggcaatcagcataggctcaaaaaatgtgcagggagctcacaattcagtttactgtcgttgactataaaattctaaaccaaagtattttcatgataaaattataaaccaaagtattttcacacatgcctgcctcttggatgatgtaaattcttcccctagactttttactagaccactatcggggttctcttccactgcagcggccacccaataactcgttttaaagactgcctcttgcggctgcactagcaaatcgccaaaccccgcatgccccacggccgctgctgagactctgcagccccaaatcggccatcccctcctcccccacgtccccgcgctgctcgtcccccaacgccgggcgccaaccttgctccatcccagagagggtttggggctccccgggtcagagcgctccgcaggcgcagctccgcgaacgccagcgagagcggtcccggggccagcacctacctcccacctcctcctccaggagcggcccgggtcgacgctcgcccgcaccctgcaacggccccaacagccgcgcggagcctcccgccgaacaacggggcgctgagccaggtgccggctctcacctccgcgcgcgcccgccccttgccggcgcccacccccgcccgcccctccctggcggggcgcgtcacaatccccgacgcgaggcgctgctgctcaccgtcacggcccccgggagcggcggggagtcaccgctcggcgtcctagcccggctcccgcagcccgagggccagcagcgcctcgcagcgcctcccgcccgcggcccctcctccgctgcgggctcccgccttccccgccccttgcagccgcctcccggcctccgcaggtttccgaggttcccaccccgcccccgcgcgccggcgccgcaggccccgccgcctcccattggctccgccagttgctaggcgatgaacaaccgtggcctgcattggtcgggtgggggcctcggtagtctcctccttacctccaaaaaaacccggagaaaaagaagaccttatccctgcggtccgcgcgcgctgcgggcgcagctgcggctgcggcacctgttacgcccagtgattcacccggccgttttctgctccccgcccccttctgacgcctgcagcgtccggggccggggctctgtgggggccgggactctgcagggaccggggtcgtggctactttagagcacgttttccgagccccactgaaccccaacacccagcctagcagcaaaagtgaagcttccaggagagccacgtgcgtttgccaaagtggagaaataaactgcgggcacctagaattaggtcaggtccaaggaacgggaggttcaagcgtcgggagtcgtggatgcaaacaatccagccgggagaaagttatatgtaaaattagggcgaagaaatggatctgggcagaagaccgcgggcaaaggaaagactaagaaatagcattcgtgaactcagtttatgcaaaaatgtcttacacccactcgacaaagtatgtgcgatgaaaatgtatgcctgctgcacccgtggccagggtcaggctgtctcctccctggtttcatggcagcctaaaattcactggggaagaaaagaaaagaggccagagaaaggagatcagatggagaaatcacaggcatataggttacacaaagatgttctttgatttttgttttgtttagttttggtgaagccaagggatttattcaaaaggcgaaaaacaggtttggtgttttaaggagactcctgagagcactttgaaaccaaaacagtatgagtgaagatgctaacactgaaaaacaagagcgggaggaatgtccacctcccagtttgcatgcacgtatccccaatcctggatgaaagatcagggccagaagaagcacgccacggtgacaacttcagggcccaacgaaatcctcctcttttcctttggccaagcaatcagaggcccgtctagctgctgttgagcccaggtggcgttaccattaacagttacatttttaaaaggtttgaaccaagcttagttgagctctgggaagtttagctctgacctcagcaaccccgggaaaggaataagatctgcctgaataaaccagcggtctcaatcttttggtctcaagaccgctttccacttgtaaaattattgagagccccaagaacttttctttatgttggttacagctattaatattaaaacagaaatttaaaaattgctattttttaaaataataatgaataaaaataaaaatgtcaaatagcgcattttaattaaaaataactattttcaaaaaattagttaaaagaatggtgttactttaaaattttgcccatatctttaatgtcttgcttaatagaaggcatttggattttcatatctgtttgtgcattcgatctgttgtgctatttcaggtagcgtctggaaaactctactgtgcactcataatgagagggaaaaaggcaaataatatcttagtattataacaaaaatagttttgactttgcagactccctggaagggtcttggaaacttgccgccccaaggttcagcagatctttgaaaaccactggtctaaacctctttgtactctgtccctctttgttaaccaataactggttaaggggctaaaaatatgacctaattctgctcagtccataatggggagtgggggatgaggagcttcaggggaaggattttatcctgacagactaaggacaagttttttccttcttgccttggacatcctccagtaagccagacatgtttggagctgtggcagcatattctgcaaccacgagagaaaagcaagaaaaatacatgcgtacctcgttttatacttcaatttattgcactttacaggcactgtatttttttttaataaaggtttgttgctcaaccctgcattgagcaagtctagtggcaccattttttctaagagcatgtgttcacttggtgtctctgtcacatttcggtaatttttgaaatatttcagacttttccattaaatatgttacggtgatctgtgatgtcactattgtattattttgggggtgccgcaaactgcacccttataagacagccaattcaatgtatatgttgactgctccactgactggctgatcatctctctccctctccttgggcctccctactccctaagacacagcaatattaaaattaggccaataaataaccctacaatggcctctaagtgttcaaatgaagggaagagtcacatatctctcactttaaatcaaacgctagaaatgattaagcttagtgaggaaggcatcttgaaagctgagataggcagaaagctagacctattgttccagttagccaagttataaatgcacagaaaaagttcttgaaggaaattaaaagtcctcctcccttgaacacaggcatgaaaagaaagtgaaactgccttattgctgataagtagaaagtttgagtggtctggataagagatcaaaccagccacagcattcctttaagcaaaagcctatccagagcaaggccctaattcttcatttctatgaaggctgagagaaatgaggaagcttcatttaaaaagtttgaggctagcagagtttggttcatgaggtttaaggaaagaagccatctccgtcacatgaaagtgccaagtgaagcagcaagtgccgctgtagaagctgcagcaatttatctagaagatctgattgatgaaggtggctacactaaacagattttcagtgtagaccaaaagaaagccttctattagaagaatatgccacatagaacttttctagctaaagaggagaagtccctgcctggcttcaaaggacaggctgactcttgttaggggctaatgcaactgctgactttttatttttattttttattttttgacacagggtctcaatgtgttgctcaggctgaagtgcagtggtgcgatcacggctcactgcagcctcaagtgatcctcaagcaatcctcccaccttagcctcccaagtagctggggctacaggcacacaccaccatgcccagctaatttttgtattttttgtagagacagggttttaccatgttgcccaggctggtctcaaactcctgagctcaaatgctccacctccctcagcctcccaaagtgctgtaagccactatgcccggctccagctactgactttaagttggaggtaatgctcatttgccattccaaagatcctagggcccttaagaaatatctaaattgactttgcctgtgttctatcaatggaacaacaaggcctggctgacagcacatctgttcacagcatggttagtgaatattttaagtccactgttgagacctatgactcagaaaaaaagattactttcaaaatctcactgctcattaataatgcacctggttacccaagagctttgcctgctaacacaagatctattctgcagcccatggataaaggagtaattttggcttttaagtcttatttgagaaatacatttcataaggctgtatcttccatagatagtgattcctctgatggaactgggcaaagtaaattgaaaacctggaaaggattcaccattctagatgccattgagaacattcatgggcacggaaggaggtcaaaatatatcaacattaagaggagtttggaagaagttgattaaaaccctcatatatgactttgaggcgttcaagacttcagtggaagaagtaactggagatgtggtagacatagcaataaaactagaactagaagtggagcctgaagatgtgactgaattgcttcaatctcaggataaaactggaacagatgaagagctacttcttatggatgaacaaagaaagtggtatcttgagggggaatctactcctggtgaagatgctgtgaacgttgttcaaatgacaacaaaggatttagaatattccataaacttaaactgataagcagcagggtttcagaagattaactccaattttgaaagaagctctactgtgggtaaaatgctgtcagacaacgttgcatgatacaaaaatattttgtgaaaggaagagtcactcgatgtggcaaacttcattgcattattttaagaagttgccacagccaccccaaccctccgcagctaccatcctgatcagtcagcagccatcaacatcaaggcaagaccctccactagcaaaaagattataacttgctgaaggcttcaagatttttttagattgttagcattttttagcaatgaagtatttttcaattaaaatatgtaccttgtttttaaagacataatgctattgcatactaatagacaatagtatagtataaaataacttttatatggaccgggaagccaaaatactatgtgacatcctttattgtgatatttgcttcattgctgtggtctggaaccgaacctgcactacctctaaggtgtgcctgtacagaaaaggcaaccccaagcccagatgttactgagtggctacattagcctaccttggctctgtatatctctacactgcatatcatgtgagacagtaaatggcctattgcttaagccattgtaggcttaagcctaagaacatttttagcccagggctaaaagaaattgggcttgatagaactttactatggtaagtgtattaggccattcttgcattgctgtaaagactgggtagtttatgaagaaaagcggttgaattgactcccggttctgcaggctgtgcaggaagcatgacactggcatctgcttctagggaggcctcagaaatctccagtcatggcagtaggtgaagtgggagcaggcacctcatacggcgaaaatagaagcaagaaagaaagatagcgaggtgccacacacttttaagcagccagatctcatgaggagtcactattctcatggaggacagccccaaggggatgatattaaaccattcatgagaaaccacccccatgatccaatcacctcccaccaggccccacctccaatactgggaattacaattcaacacaatatttgggcagggacacatatctgaactatatcagaaaggaaagataagatatgaaaattttattttaaaaatgcttagtttgctttccacttttttttagcaaaattaaagggatgtgactatgaaatgctgctgttgttgttttccaaaacttatcaaaacttccacccttgctcctctgtagtctatttatatcacagtaggcagagtaattcccctaaaatgtgagatcctgtcacttctcttctttggctcccctaactcaatgttaaagctaaagtgctaaccatggctgcaaggctcttacaacctcaccttcaccaccttacctctctgactccatgtcctacaatctgtcaaccattcaactaagcactcaaccaaccactagccacctcactgttcctcaactttgccaagcacattcctgcttcaggacctctgtttgaatgttcatccccttagcatctttgttacttacgtcctccctttagagtctgctcaaatgtcaccatcttggtaagggccaacctgacaacattgtttaaaatcggaactcccttccagctttccaaatttctcgtactttgctcctatacaatcttaaaccatgatagatcctttacttattttgattgttcatttggtctgtctccctccactagaatataaactcagcaggaaaataaatttcctctacttggttcattaatgtatccccagtgcctgaaacagtgcctgatgctttgtggttggtactcaataattatttggtgactaaatttataaattcaaataaatgtttttcatttcaaagtaagcactttattaggctgtatacatattcccatgtatacatattcaaaaggtatcacatcattatttactgaatttgttgaaaataatgctttcctttgagctggagttgcaaggttaaaaaaaaaagaaagaaaataattatttttaaaaaataaatctgatttctgggacaatccaaaagtcatgcaagagccaaatctgatgaacacattctggagcaaaatgttaaaatcccaaacctgttttcctgctaagttactgcatttgagtgggtaaggaaaggtaaaaaaacataatgtgtttgatttttctaggaggcagtaaaccaactctgagcataatttcaaagaggagttctaaaaatgtacaccaataactagttgcagaataagtactatatgttaccatttttgtttttaaaatagaaatatttatttctatatgtctgtgtgtatgtgtgaatgaatttcttccaacctgtctgaagactttcatttttgcccccattacattagaggcatctttcaaaagtgaaaatcaaattctgattccccttccctatttaagaaccttcaatggcctctcattgtatttagtaacttcccacctagccctccctggcatgatctggcccctgttccccatcctcctttcagaactcgcactttggccacaaagtgccaaccatagaggcagccttttcagttcccttggctctttgtacttgccattcagtctgcctagaaggctcttcccataaagattcaagactgattcttttttttaatcattcagatcccacctccatatataaagaaaccttctgaggcttggttttatttatgttttatttgtttccttgctgtgatctttccccttcaactaaaacataagccctctgaagggagggtccttgttggtcatgtttgcctctgtagccccagctcttcagtgcctgagataatgatgagattgagggccaaaaagatgaagagctgacacctcatcggaaaccacggaggccagagcctgtggaatgacatatccaaaatgctgaaaaaaaagaaaagttaaccaagaccttctagcaaaaccatacctcaagaacaaaggagatattaacacatccccagataaacaaaaacagaatttgttggtaacagacctgccctacaagagcttctaatgggagtcaatcaggctgaaatgaaaggactctaagcagtaacttgaacccatgcaaagaactaaagaacacaggtaaagataactacacaggtaaatattaaaaaggctgggcgtgacagctgatgcctgtaatccaagcactttgaaaggctgaggcaggaggattgcttgagcccaggagtttgaggctacagtgacctatgattgtgcactgcattccagcctgggcaacagagcaaggccctgtatcaaaataacaacaacagtaataataataatgagattgggaggaaggcagaaaggagcaaaggaacatttgtcttaccttttattaacttgttatatgaatttttataagcatgtattatagtgatcttaaaatattttaattttgctgtaataaataggctctgattttaatatgcattaagctaatgacccacactttattctactcatatgttttcctcaggaacaagtgtttcaagtaccccagccagcattcaggccacagtgcttctactaacatgcatattcacatttggataataatgggccaacttataaaggctttcttctgtaatgcataccatctgggttatttcaataggagcaacaatttctggatctggtagagaacatttcctgttagggccttatgctgtaacagatgagaatatgggctgagtcacctctgcttaacggccccacttttattaattctgtgttctggccaggactacttttccagaaataacagaatgaataaacaaagtctttctgaatactgtgctaggcactttcatatccatggcttcattttattagcaagaccaactttaggctgtttataatttactgcaaaacagtatggggcagagtccaagggccaatagacttcagagtcttctcagtgggctagaattatcagggagtactccatggaagagaaaaatctagacaagggccttggggcaatcttgactctgcaagcttcacaatagttctgtgagttaaaaaagcttcgagaccagactgccagctctgctttctgacttctaaaacatggccttaaacttagctgggattgactcctctgactatcttagtgaatttctgcatcatgctgcatttccaaagatgattcatttctagctaatccctttggatttgggccagtagtagtagtagttgaaatgacagtatgtgccacttacaaagtgctgactgagtttgcaggaaaaacagaccactgctgttcactcttcctcccacctccagccaggtgaaaatctccagaaaaggaaactctccctcctccatcctgccatttccccaccccactaccacccaaccctgtcatacacaaacacacagatcagcagacaaatgcctgggtgttccattctcctgggtgttacattcttagtacttgagttttttgactgatctgctgagtgttttgccccatgatttcttctaaaaggactctttttgagtaagaacacctgatgaattttatcaagagctaacacattagttcccaactctccaaatgtcccaaaagtgatttattagttttaaatatgacatgtgaaatttgatgatgcatacattaaacagttgataaggtatcatcatagaaaggtggtcagggtaccaaagagagtagttttcaaactgtatttccaagagagaaatatatcacctttagtaaatgcagtgtgcacatatgcaaagcatgggtgcacacacacacacacatgcacgcacacatgataggtaattgttttaaggatttaggtggactgtccaaaattctgatataacatttcaaccgtgttaacccaagttcttgacataaactcatcttcatcagtatccaacaataccaagtatcatataactttcatagatttactgaaaacttgtgggtctcatcacacagcctataacatttcactttttaaaaaatcaccagcaaacataccacttctcgggtctctcctccaactattttgtgtttgatcaattcctcttcctttccagcacacacacacacacacacacacacacacacacacacacacacacacacacagagagagagagagagagagagagagctaaccttgctgactccagagtcagcctctaaacctttctcacacagagcaatttagctcagtctacttttctaaagttgcaaatttaaacccagagtcttattcagccaacaaagtttgctctaaaaaaaatgggggactataattgacccaaaatgtcttccagttatactgaagtctctttaaaaactacagaacacagagatccagcattaatttgaataatcttaattgatttacttctgtacctaagcacctttttatttcacatagttctagtttccctcttcctgtttaaaattgatctcactggtttaataaatatttattgattaactatgtgtcaagcactgggaaatataaggaaagaaaagatctctgcccaaaacaggaactcagtctcctaggacagagtagtgaaactgtaagtattgcagagaagaagtagagtgtgccatgtgcacataagtcagactgcctagacaaatcagctcagccacctgggtccatgttgatagcactgagctcccgaaccaacatggggccaccttcctctgggcattctgtttagtaaacaataaatgctttgagttctaaaatgctactaggttgtctgtacttgcagccaaaagcatccctgatagtacactgaaaaaaggacattcatgaagggacctgaggctatgatatttcatttcattggtacaaatatgcttaagtgtcacagatggaaacagtcaagtgagcaaaaaaagtcggtgggaaatgaagtatacaagttgttacagagcactgcatgaatggaaaaattaaataagaaacaggaaatatgtggggctctttatactttatattatcagcatatatctaagatatgaacatttttctgaatcatatcttttttctttgctaattaggccagacaaattaaaatatattgataaatacaacttttcacaaaatgattttttcctttctgaacttttcaggccacagcactatgttttcttgctagtacttgctttatgtaatagatattttccaggaaaagtcgtgtgtaaataatgcacttataaatcaaatcatattctaaatgtactagcgaagctagatgtttaaaagaaaactatggtaagtctttttgcatgatgaataacacctttgtagaacacatagtctctttatcatttatctattctataagatcatattttaatatgctggatttcctttctttccttacctattatttaaaatcagacttttgtgcaattattttaatatagagttttctgtaatgcgaatcacactacagaaggctaagatgttgcaaacagttcatatgtttttaatctgtaattctcaatttaatttttatcttgtttataaatttccatttgctttcattatttgtatttcactaggcaaagtttctttttcttcattctcagtgaagaagaaatctgaaggcttgattcctgatggattacactttctgctttgtaaacctttatcaataatgtcatcaagtaattgctcaaattgaaatatagtgaaatagaatcctctatgtactgagtaaaacacccacataaaattttagatttgaaaatctttgatgtcaattaaaatatactatgtttttaaataacagtttaagacttaaatcttatataagtctgcctgtccctttaagaaacgaaatcacgtcttgcttgctgggctctcttggatttattttatcttagcagctgttcctgaagtcgatgttattcagatgcgggtttttaagctctttgttgtgtttttcagcttactgtatatgctatcgaacataaaacccagatttagaatgaggtagggagggggacagctagaaatgctagaaaaaataaaataatattgggaaaaggacctctaattttcatgtaataaaactgttgaacatgatctgcttgaagccccagtaaaagctgcaaggcaaaacccctgaacctctaagcaccaaaagttggatgatatatttagtagtaagtgtgtgtgtgggggggggtgggggttggggagaagtatctgaaatgaaataatggaaatttctgtggttataaaaggtaaggaaagaacacagtgaacacttttgctactttggaaataagcatactataaattttgcttaacatatgctactttgatctagaaagaaaaattttacaacttatacacctcttatatcatttatttttgtttcatttatttttcaagaggcaggataacatagtccttaacagtggaaactctgggtaagaatattggctctgccacatacttatggtggaaacttatacctttttgtttagtttacaaattaaagcagttagcttaggtaatagcaaagtacatatcaaacttatgtgggggttattgtcctaatttttatgtcatatataatcatttccttgtactaatgtgatgatttattgcatgattactaattgtcaagcactgctctaagtactttacatattagctcatttaatcctcacaacaaccttcttaggtatcattattgctttcatttccagatgaggaatttaacagggagaggttaaataatttgcacaagattatatatatagttagttaatttcagagctaggatttaccgagttctccttttagccaccatgtcattaccaatctgtttaggactgcttaatctcttttgctctctgtcatttttattcaaaagatgatgattaagaaacggacatcttcaaactgggataaacctgcacttccccgcagctcccaacccccagcccctcccccaagatacatgaagactctcctccagtggtgcagagcaggatagtttcaagagaatcaattccatgtccttgatccttttctacgctttcctaaaaccgatctgcctgagaatgtgcatgtggtctccattccattcccctttcacaatggccatttcccacttggcaaaaagtcattcttctcacagatcccacatcttactagagtgtattgtcccaggtgcacacaatatggcaaagtagaagcctgtgcgggcattgagaaagagaacgcctgtgatgactggggagcaaaattgccacctgatagagcattagaaataatgtaaataatctatcattgcatgatatttggcatataattgaaaggaattcacagaattgagtaacactgctacaacaagttctcccattcccatctactcaatttctgtgaacaaagtaccttagcatttatatctacaaagacagagtcaaacacatgaatacaattggggaggagctttgtttccttctagctataaataatattcatccatcactaccttggaaaagaaaaagttccttccatataatcaatgcatacacttttattttttgttaaatatacttgttaatttataatatagttactgtttgatcaattgtatattactaataattataaggataactccacccagagatacttttaacacctcaatctttagagtcacaagaaagtaaaattatataaatatgtagttataatgtctgttgtaaagaatgacatactgatcaataaaaatttttcaagcatgaaaatatcaacatgataacattctgtggggaaaatgcagtgaaaatatgagttcaagaagaaaagggaacaatgcaaattttctgactgtgaaagaagaactggttcatgtatatttaaaatgaataatgttgagtaacaaatcaccgtgggatttagattcttcagggtaaatttaaaagagtgagctaacagctttattttaaaatatcatgaattgcaatatgctggaaataacaccctttgcaaacttgtgatgaaaaattatactgtaggtggcaataaaagatgtggaagggatgcaaggttttccaaggtttcgcagagcagcatgtgggcaaaaatgtttgaagaccactgatcttgaagaccacagaagatctccacaggatgcttaaaatctagtccagataattattaacacaaacattttacatagaaaaacatagatcccatgtgaaataaaatgctattggtttctgctttgaatgcccaaggaattcagccaaatgcttacaaatgagaactgggctttgagctgtggcaatcactttttcctgtgctatccttttatctcttcagtcactgtgtatagctatgtctgccacattgtgagtttcaggaacacaataacacaaacatagcctttaagataaagaaaagtgccacaagatttccatgtgaattccctgtcagtatatgcctggcctgtaagctattggagatatatgttttcctaactccagtttaggacccaagacctgatacatgaaattgttccttggaggttaaactggcagtttactggaattggaaatttcctgacaatccagagccctggaacaaaataagtagatataataggcatcatgtctgctatcttagagtgaccatcttataacttaccctagtacaaaagttggactctggaaagtttgggttctcatttaatgctgctaactagttgtgaaatcattagtaaataactctgggcttcattttctttttctgtgaaataaatgtgaatacttacatttattttgcttcccttctgcacagaaactctatttgttcacgaattcaacaaatctctatgagcccttcctctgtactggcaccgtgcaaggggctggagattccaaattgagttagacaaagtctcttccctcaaggagcctctgggctgtgaggatggtaggactgcttgcttgtttgcagatacttaacaatataaagtgataaacgctgccaccgagctgtgtggagggcatgatggtagctcagtggagatgagcatcaaggtagagaagacttacagaggaggaaacacttgactctttctttctaggggtctatttaatgcttaaattttttttcaattccattgcttaaaaaaatgaagtaatatattcatagagtataaaattcaaaatgtacaaaaggacatgctgtgagaagcttctcttctactcctcaccaagccacccagtttctcttctcaggaacaaccaggagtgtctgtttcttgtttattctttcagggacttgaattatttcttaaaagatgtatgcaaggtactcaagtgaaaaagaggaagctgagcattgcagacaaagagaacagcatgagactgttggggagtaggacccatgaggcggaaggcagtgagagagtcctctccaggaggggccttaccatgctaaggaatttggatctgatcctgaagcattaggaaagccattagtagatttagagcagaggatctgcctgatgaaattaatgatttacaaggaacactctggcagaaatgtgaagaatggattggagagaggcgagatcagtgaaagataccagttaggaggcaattgtaattgtccaaggaagaactaatgaggacttaaatcaagacagaatcggtgtggattggaaggggggccaactctggttgttaaggaagaaggatgaacagcatttttggatcaattggattccaatgaatttaattcctgttctctccttatctaagaattgcctaagagtcacatgccaagaataatcagaattaattgccctctccctttaagcagtcaccaaggcacccagtcttgtcttaaatatctagctcagtgaccttaagatatctaagcctcccaggtcaaatttcatcactcaaatctctattccccgctgtcatcagaaaaacccctccaaccacactcctctctgaacagtcccttcaccttgcagctcgaaaggaaactttcccctgagcactcggaattccctgcagtggtggccagttttctctcacctgtcacttcccactgttccagaggtgatgcagatgtcttccctactcctcactgtcacttccaaactgctgtcccttccttgccctcccccatcgggtcctttgccactcatgccatcaacctgctcctccctacaggcctcctggctgtagccctcccctgtcctcctgatcactaccacacatttcttggaaatgtcaacaccaagtttattgtctttctctcttgcattcttttgtcattattcctggtgatttcagtatctacacagatggcccatccaagcccatggcttctccattcctctatctctttattccagtgcatctggtcttccaccattccccttcagccaccatcctccatggttagctgcagaccttgtcatttacaacaattgcattctctcacttatattagtttcaagcatctcatttgtatattttcagctcatgcttgtaccccagctcaaaaaattcttttactccactaggtaccttgttcatgtgactcctgaccctgaaggggataggggtttaagtaatgaaataaggtcactgagataaatatttaagacaagaccgggtgccctggtggctgcttaaagggaagggggcaattaattctgattattcttggcacttgatgcttaggcaattctaaggtaaggagaggacaggaattaaattcattggaatccaattgatccaaaaatgattttcactgtttatctccatccctcaaaacccattctctccttgcctggcttagattctgtggtcctttatataatcactcctttaaatatgctcttagctttcttggccctgtaatatcccattatgttattctgaacaaagtcccaactctggtaatagttccatctctaccttctgtgctccttctcctgagaatctaaatgtgtctcaggagaaacatggttaccctgacctcaaacattaagtcggccctcaaagctgcttggtggtccttcagcattttcctagtcaatttattctttgactctcccagactatttcattccttctccaaactccatcaccctcctcatcaattatgaatcttatttctctcagaaatatataagcaacagaagaggctcttagtatcacatttacccccttctttcctctcttcctctatccacactctgcttttccttctgttgcaatggatgagctgctcacctttctgcctaaaaccatcaacttcacttgtgcacaggatgctccctctttatctcactcccattgttacccattgctttcctatattatatgttcaaatttttatctctcagttgaatcattcccactagcaaatgaacatcatttaaaaaaagcctaccttaactccatagctcctccaactaccacatcatttttctgcttctctttatagaaaaactccttaaaagattgtcaatgctcagtgactccacttctttactaattaggcttacattccaccatggaaacctcttttgtcaagttcatgttaccaaatcaaatggtcagtcataagtcctcaacttctcatcttactcagtgagtgacacagttgaaacaatttttttcacttcatttacataccccagcaatctcctgttttcctcttttctcattggccattcttctgtttatcttgctcattcttattctttgaccactaaagtttggagtatacagtagacacactctaaggtgaggctcaatggatcatgccttgtataatacacaccccttaagtgtaagtagaacttgtgtcttgcttctagccaataaaatatggcaacaggggagggactttgcagatataattaaggtcccaaatcagttgaatttgagttgactaaaaggagattatcctgagtggggcctgaccgtaattcttttctaagaatggtagcctaaattccttttaggcataagctcaggggttatttttatggtgggatgggagatgggtgagggtaagctgggatagagagtttgaagaagtgataagggtttagaatagctgttgtaaagaatgagtttcacaagaatgccaagtccttatagcagtggtctacatggaatatctggcatcctctaagtagttaaaattcctaggcttttactgaataaaggatatacagtaaagaaagtaataaatggtggcttaattaaatacatgttatcaaattcctcatcttgaaccattttaaaggttgtaggttatgtcctttaacttggcaaataaactaaacccttatatacaatttatttttataacataaacctttctattgcagtgtatttttcactgtgatccttccagccctgatggtatccaaattacctatccttcaaacttggacttgaaggcaaacaaggcttcgatattgaaggcagaggaaaaaggaactcggagcagtgagaggagcatgaataaaggctggtagcgacggctctgcttgcattagtcagaattccttctgttgtaggtgtcaggaattcaacttaaaccaacttaagcaaaaactgaaattggatttcaaaactgggaatactagagatggatctggtcttaggcatgattggatctagcatttcaaacagtgtcactgggaccccctgcagtaggactgcccttacactctggcaagcaaggcccctctgctgagccctgagcctcagggagtcctgtcacttggacatccttggacacattttcaagtcttcctttgaattagcagtgccaatggggcagagtaccctgggctaagaccagataccatatgcatcccagctgctggaaacatcttcatcagaatgttttaagtcctgtctgtgactgggattgaccagggccagtagagttacctgaacctggatcaggatccaagtgggccccttcccctgttttgtgcttttggggtggtctcaaacctgctatcctgtgtgtggagtcaaacagatgccccaactagctccaggactcatactcctagggtcatccttaggttctgaggctgggccccagttccgggaaggcagcctgatgagaatcattcccattggccagagtgttaattcttttgtgggattgtgtgagattgggatgccagaatgatgctgacacactgattttggatgacactcagtcacttcagacaagatgaattcaggtctttggggtactaacaactcaagttaacccttagtttgagctgcacatatgggctcttgggtcacctgttgtccatccaagtttcagccacagtgctgctttcaggttatagtacttgagggtggcttggtgatggcagacatcctttaccttgtgcccccaccactggcacccagggcagtcatcccaccctctctgctgactccatactttgggtcaggcaatcctccagggtggccatgcctcttctctgagtacttttgagataattaccatgcaaagccattggatcattaggatcaatgtccacacttgccccaacttgataagggctgtgctcttctaagtcagtcttaagctgtgctagactaagggcatgcattccttgtgaaaatgagaccacacttatcttctactccacgagttcattgcctatcccctgttgtcagaagtatatggaggacatgggtgtggtcaagatagaaagaggtcacattctacaaatggagtgattatgtccaaaagaactcaagagaaaatgtagttgaaatatgtgctgttatgtttatgctttaaagttacaaatggtaagtataacatgagaagaaaaacaagtgatcattcatattttcctgcatacactggataagacttgtgttcgtggccatcatgcatgaagcacagtaaccacctctgagagagtcattggaagtcactcttcatgtgtggcaccatggatgatgcagcttaatgagcaatcatgcaattagcattaagtaaattgtattgggaaattcgcaggggccagaacatctatatccttccagtacgaatgaggttctaaagagccatgacagtgtgagtaatgagagcacggtcacctttttctcatggtagaagatgtactgttagtgaggaacagtgcattcagaaataacaaaaatgaagccatgattcctgaacctaagcagaaaagatggtatctggacactacaaagactctttatgtaaacagattggaccataaacaaatacaaaagtacctcttctctacccagtattctaaatcttcagcaataaacctctatacattacatgggcccaagaattttgtaaaacgtgtttggatccagtgatttatataaacaggggtcctgcaaaaattctttgcctgaattctctgtctctgtctcttacatgtgcctcctttggtacatttggcctcattctgtcctgcagacaagatttctccataaggcagggagtgtggatgcaagtgtggctcttgggttatatcttaatgagagatgagaatgatatctattccagaaaattctggaagacattgattgtttcagtggcgggggggtgtgcccactccttgaatcaattattgtgtccggaggaatgtaatcaacaactaacctagcttggatcacctactaaaatcctctgccagaggcagcattaacatacttgatagtcccaccagaaccacatggagtaaaggaggagcagttgagggactagtgctgtttccaaagtaaaagggaggcaggacaaaggaaaacaacagatgcacctactaaagttcctaacatggaataggaacctggaaaagtgggtggcagacgaaacccggaagacatgattgtagtatatttagattacaatgtatttcataactaaagtggagttggtgaaataaactaaaatgccctgtccaatcatctataacgttcataaaataatattaagcaaaggctctataaagtaaaactcaggaaatgataaaaggagtctaagttttatgttccaaattggcaacacatgagacacctacccaaatcagaacaatatgattaataatctttgcttttcatttttataagaaataaacctttaaattcaccttcacactttcctgaaaacctagtttagaaaatcaaacacacaaatgcgttcagttattcaaacaagcatggccttaagaagcaaaaataagcatttgaagtttttatctatacagaaaagttttgctatatcatttatttagtgtaagactaattgttgataataaaatgtctttttaaaaaaactatgcataaaaagcaaaacaaacaaaataaataacacaggaaactctgtaaaccctgctgaaggttttgagaggctaagttttcagaactgctgtttgcatttctaaaatatgatgaactatttataatcccaacatttccagaattcagcatatttaaatgctgctaactgactttacaagccaagggatttaagctagaactgcaagcaacatggatagaatagtcaaacgcagaccagatggctctttaatgcaagtgaagtaggctggtggtaatgaagtgttatctaaggattgggaaaaaaaaaacaaccacacacttcaaaaatatctctcttattcaagagttttggtgcctgaaactccacctttagcaaatggggaaggcaaaggacatatgttgctttttgcctgcccagcatctattcctcctactggtaacaaatccagttttgtttttccttaggaaactcctttctccagctcttcttctcttttcttttttcttttctttctctctttttttttttttttttaagaaactatgttgccgaggctggtcttgacctcctggcctcaaaccattctctcactttggcctcctgaagtgctgggattacaggcctaagtcactgcatttggcccttctagcttttcttgaagcaattaagtgtagttaattctgatgctaaatttggaagtgggcatcgtgagaggtagtcttgaccaatcagagaactgcatctttctggcctcagcaaatggttaatggacagacatataacctgatgagctcctgttgtgggattatggatggagggactgagaaagagacagtactccttccctgggaaagctagcagcaagagtgatataagcttggtttgccagagctgttccgccttctccccacccactcacttagacgaaccactgtggtgatgggattggggaacgcctttgtaggcttctgcctaggccttagagtcaaccaacatggctccccagtgacattttctagctctcttagataactaaggatgattcattgacatctgtaaagcactaacttccatgttttccaaacaaatcctaaaatacatgtttcaggagaaccgtgttaccctatgtaaatgtgtggtattaatattgctgctaatcctcacacaagagggaaaaagagatatccatttgtaaggaatcactggaatttccttatttgtatcagtcctcttggaaagaagctaaatggatattcatattttccattacaaaagtagaatataaatactgaatttactgtatatacagtaaagaagttctgtatattggaaaggtctcagagtattgtaatcaacaaggacctttgaaacaaatccattttgttccatcttggaagtcttccatagtgactcacaaagccaacagtgggaagaaaggcatggtaagattatttctctgagtttatgtctcttctccctcatttccaaatctggcaaggttctagaagaaaccatctacagtgtgaggggaggtggcttaacagtgggcccatcttataaatgtttaggagtagaatgacacgagtttgtgcatatgttttgctacttccgttcctaccttcccccaaatcgcttactgtacacctccattgagacagaggatactgtgtgacagatagtgccctaggcctcatggatacagcaacaaaaaagacagataaaattcttatctggtggaacttatactttctgttgaatgctacagggagaaaacaaacaaatcaaccaacaaggcaacttcaggtggtgatcatagtatgaagaaagtaaaataaggtgtgtgataaagaatgacgaccatgtgggatacttcaggtagggtggtcattataaaatttcagggcagagcactccaggtagagggtacagcaagggcaaaggcccagaagccagaacaaacttggcgtgttcagggcatgggagaagatcagtgagggagtatgtagtggtttcccattgctgctcaaatcatcagaaacttagtagcttaagataacacacatttgggcagggagtggtggctcacgcctgtaatcccagcatctattcctcctttgggaggccgaggtgggtggatcatgaggtcaggagttcaagaccagcctggccaatatggtgaaaccctgtttctactacaaatacaaaaattagctgggcgtggccaggcgcggtggctcacgcctgtaatcccagcactttgggaggctgaggcgggtggatcacgaggtcaggagatcaagaccatcctggctaacacggtgaaaccctgtctctactaaaaaatacaaaaaattagccaggtgtggtggtgggcgcccgtagtcccagctacttgggaggctgaggcaggcgaatggtgtgaacctgggagacggagcttgcagtgagccgagattgcgccactgcactccagcctgggcgacagagcaagactccgtctgaagaaaaaaaaaaaaaaaaattagctgggcgtggtagagtgtgcctgtaattccagctactcgggagactgaggcagagaattgcttgaacctgataggtagaggttgcaatgagctgagatcgtgacactgcactccagcctgggtgacagagcaagactctatctcaaaataaataaataaataaataaataaataaataaataaataaaaatttaaatataacacacatttattatcttacagttctggaaatcagaagtccaaaatgggtttccctgggctgaattcaaggtgtcagcagggccatactccctccaggggctctagggagaatcccctttcttgcctttcctagcatctacaagccacctgcattccttggctttggcccattcctccatcatcaaaaccagcagtgttgcagcttcaaatttctgtgactgccccctctctgccctcttcttttcctcagaaagacccctgtggctacactgggcccatccagataacccaggataatctccccacctcaagttccttaatttaaacaaatctgccccttttgccatgtaaagtaacaggttccagggattagaatgtggacattttggggaggctattattctaactaccacagagtatgaaggagaaaagtggtggggagtttgagccttagtcggctaagtgagaggggaagccatcagggtagagacttgatctgctatacatttttaacacaatcactctgaacgtagtgtggataatggaagtagtgatgccaatgagggagcaaggagaccaattaggaggcttttgctgcgggttcaagggagagatgatgggggcctaccctttgggagagctgcttggcttctctgtggctcagaagacttatcataaaataaagttaatattgcagggcagtattgagttagcaacaatccatgtaaaagattcagtgtagtacttaattccaaatagtccttaagaaatgtagctattatttttattatgctttaaaagttaagttctaataaagaatttgagcatttaagaagtagaagaaatcttcagaattaagaaaatgaaacccagagaggaaaagcaacttgcctaaggatacctcgtagttagcagacagcgatcaaacagagcatcacagacgagtaaggagaaagggccactttctgtccttacagtaaccaggaaaggaaattcagagctcagcgggaagggactcagggaggctgataccatgtagccattacgcaaaagacttgtggtaggaagggatgtacagatggcacccaaagacctagttttaaatcctattacttattggatatgtgatttggagcaagtcatttaatcgccctttacctcattaatttctcttaaaaatgggcacgacagcacactccccaggttgtcatgaagttaaaatgagaaaatataaaatagagcattttgtaaactgccaaggctatgaagttaattattattatgcctctcctcccagtagcctactttccattccctcaaacctttaaaggcatggggacatgcttcttttttcagttgggtagcaaatctcctcttttcacaggattttttcctgagtgacagccttctgatgctcctgtctagataatggttccagctatgttcaccagtttctgcttctgagtacatcattatttcccttcaaaagttgacatccaaatgcaaaatatgctttctccagtaatatggttctgggttttcatttctccaagtttttttttttttgcttgcaaattcatttattataatggaactcagaggcaataaaaataactgtactcttcaaaaagatagaatagatttgaagctatatgcaactgggaattatttatagcaaagtcagtttaaggatgtatttagctaactagcatatctatgtcttacacaatagagtttggagaggtcttagagagcattagagatgacagagttttcaggcgaaataaatggatataagccagtgctgctgtcacccaaaaggccaaagctaaaatagtaatattgcctttcactgttcacacacatgagctacagtgctgccagcttgtggatggctgatctgattagtaaaccgcaactacctgctctgaatacaacatggcactccccctcctccacctgtttgttttcaagagttcacagctgtgagtatatcaaatgctgtctagcattaggcccaccttgtttctcccaggggagggcccacttgtctgtcttctctatggaggcctgaatggagctaagtcagccattcagtacatctaatcagatgaaagtctattccctgagggatgacctcaatcccacagtgaatgaagaagggatcagcatatcgtggatcccagggcaccaggcattgtctggtaaacaaaaagaaattagaaacacaggggtaggacacaaaagtcaagacagataaatgctttatgtatgctaatgtttatctttgtttaaataaaggtttttgagacaagtggtgagtccctgggaataaatgtctggttagactacagtgtgggatggaaagggagaatgcttgttcaacagaaactgtgagatttagatttcataggtgaaagctctagaatcattaaaaataaaacagacttcctcctaccaccaaacctgtgttatacaactggtcttgattttaggcagggctccattatattgcaggcatatgtacagccgaaaggatgaagaaaacagacaaaaaaaaaaaatgagactaaagattagcagtaactacaggaatcaacagtggccaggggaggatgctaaatgatatatgaagatcaacaaaacccagaatgtagaaaattttgcaggacagatgacctagatttttcaataaataaaatgcaagaaaaaaattaaaagaggaaaggaaacctatagaataaaagagacacaagagacatatcaatcaaatgcaatatgtggaccaagtctggatcttgacttgaaaaaataagtgttaaaaaatccatgagacaactcaaaatggattaaagatttagaaatgtaaggcctgaaactataaaactcctagaaaaaaaagacatagggaaaaactacttgatattagtctgagcaatgattttttggatatgataccaaaagtacaggcaataaaaacagaaataagcaagggtaactacatcaaactaaaaacttctgcacagcaaaagaaacaataaacaaaatgaaaaagcaacctacagaatgggataaaatatttgtaaactctatatctgacaagtggtaaatattgaaaacataaggaatgtatacaactcaatagcaaaaaaacaaatagaccaataaaaaaatgggcaaaagatggtcaggtgcggtagctcacacctgtaatcccagcactttgggaggccgaggtgggcagatcacgatgtcaggagatcaagaccatcttggctaacacggtgaaaccccgtctctactaaaaaatacaaaaaattcgccagacttggtggcgggtgcctgtagtcccagctactcaggaggctgaggcaggagaatggcgtgaacccgagaggcagagcttacagtgagccgagattgcgccactgcactccagcctgggcaacagagagagattccgtctcaaaaaaaaaaaaaaaaaaaaaggcaaaagatcgtaatagacatttttctaaagaagacatactaatgaccagcatgtgtatgaaaaggtgctcaacattactaatcatcagggaaatgcaaatcataaccaaaatgacatatcacctcacatctgttaggatggttattataaaaaaaagacaaaagataacatgcattgacaatggtgtacagaaaataaaacccatttacatcattggtgggaatgtaaggctatggtagttatggaaaacagtatggaagttccacaaaaaattaaaaatagaactaccgtatgatccagcaattccactaccaggtgtatatccaaaggatatgaaatcagtatctagaagagacatctgcacccacaagttcattgcagcataattcacaatagccaaaatatggaaaatcctaagtgtccatctacagatgaagcaataaagaaaatacagtaacatgatcagtggaatattattcagccagaaggaaaagaaaattttgacatctgtgacaacacggataaacttggaggacattatactaagtaaaatacgttggacacaaaaagactaatactgtatgatcttgcttatatgtggaatctatagtcaagcccacagaagcagagagttgaatggtggttggcagggactggaagttggggaaaataggaagatgttggttaaagggtaaaaactttcagttataagatgagtaagttctgagaatataatgtacagcatggtgaatatagttaataatagtgtattttatactagaaatttgctaagaaaatagatctgcagtgttcttactattccccccaaaatggtaactatgtgagatgatggatgtgttaattaaatcaactgtattaatcacttcatgatacatacatatatcaaatcatcacattatacaccttaaatatatacaatgtttgtaaattatacctcagtaaagctggggaaataaattcatgagaactttgggaagatttgaacactggatatttgacaaaattaagccatatttcttagagacatatattgaacatttatagatacaatgatataatgttcaggatttggtttaaaatatgaaacatgattgtccatagttgatcattattaaggctgggagatggatacgtgggaattctttatgctaccctccttacttctgtatatggttaaaattttacataataaaaattttttaaatgatcaggctttgaataataaaacagaaattagaaatactttgtagtatttttaagtatttttgtataaggatactacgaatgtcaaatcaaagtttatgaacagagaagctcttttctaaatgagttaatacacatagagcacttaagatgctgggtccactacatgctgagtgctcaggaaggttaaccattgttattattttctttaatgtaatgcatctaaatcttcatctacaaacacaagtatataaggaacagagctttatttttctgcaattggacataatccctttttcaatcccactttctcctagggtggtagaaaaaaacctcagtcaattccaggattctcctgaacttttacctgtaattgtatctaaattgcaagaggctcctaaagctccaagtgttggacttggaggtatgcggggaagtctatctgatcctcaaagtcttctgttcgcatttgccatctgctgagacatccgttgtcccatatgacccactcacctgcgtgttctccctttcccccatctttgggttggatgggtctctaatctacttctaggccaatctctggccctggggagtcttctgctcctgtcacagtgatgcttccatgagatactccagggtcatttcttctctgcgttttccccactctctgaggctccatctgggaaacaagacactgatttctacttcttttgaacctcacaaacataggctagattttgcccttttgtttccctccactgcttccagtccaggctgagcccagagaactggagcagggcctcctttctttcagacccaacaacaatgatttctcacgtaccttccatttcccttcaacactacgttctcttccaacctgggaagcccttgttcttattcagctgttttccctcacctatttttctgagccctttaaaaacccaaacaccaggaaaaaggtgcctttttctctgctttctcttattatagcctgtcttcaaggcaatgattagaaaaagagtagccgactaccagaggaaaggaactgatgggggaatatgtccttaaaatatttcaattattccttcttccattccaacaatgcatgagtggaaaaaagtacacagctgagttacttaaccttattcaaactcccataattagtttagacagcctggctatgtttcagaacgtccggaatgaagatcatattgaatgtctcccctcgcttagcccctgaaagaacagataaaatctccattgtaggtttacagctacaaagatttccacttcaaaattttccaaaaacacatgaattcgattccagtagaactcataaaagctagcaagcttagaccaagaaaaatgtggccagataacattcaccagctgctgcactttgagttttagttgaagcgttcaagttttcagtaaagtcccccctccctccattcgtgcctttttaaaagacgaaatagaagctagtgaaagtaaattttaatgcgtttagttctggattgtcccatcctgctgcacatttggatctcatgtcatgctaggagttgcattcatttttccattcatgcattcactaaatatttagtgagtgtgtgttaggactgtgctgagaactcacagtcacaactaagcatgtggcagtttgcttcttcttaaatatattttgggcttgtttcccaatccaacttgaccagtctatggaaacaaatttgaaaaaccattaaactattaaatgctctggccagaaacattaattattacgggctaagaaatgtgtcatcagaaaacatgtgattaagaaaaaaaagcattaatagtggctttcagccgaacaggcagagagtggaatgaaaaggccttttattaatgtgtaactgtgcgaatgaagcacggtggtgagagtgctttgtgccatctgagtatcaggttaaatgccactgcattattactggtctaatgaattttaaaagtatcattctaaagcaaatctagtgagcaacaaagataaggaaattctgctgccacagctgaaaacattgccaccaccaaggcactttctaaaccagcatatgctcagaatggattacactttgcacccattggaaactccctcctcaaaacaaacatctctttgaacttgcagttcttaacccaagttaaagactaagaaaaaaagcactaattgtaatctaacagttcagggaccaaaaggccaggtgttcgccttagttcacagtgtcatgcatagttcactgaaagttaactattcgatgttacatttttttcttacatatcctgtattttttcctccaaaatcaaaagctgaaactctctttgttaaatttctattaattagtaataattatggggcctactgccagctgaatcagatcattggctaaaaagaaaggttcccttatagaagttgctgggttgttttattatttatagaatagttaaggggtcaaagctatttccatatgaaatctaaataaagtgggtgttcagatgagatcccatctggagattagtgactttgaaaacgcaatatataaaagagaaataagaagaaatatcctttctcaaatacttaaccagcagttacagtataaggatgaacacttctatttaaatcacattttgtgataaaagccatgtctgtgcaaatctacatgggaagtggtaaaaatgaagacagaaacagtttcttcaactaagagccataaaatacctcactatggtatttgtaagttatcaggaaccatgactcagtctgcaccaatagaaaccagactttctgatagaagagaggtttgctgactcagagtcttcttgtctccctcaaattaggccctctgcctcaaagtcccagggcttcatctacagatcaaactggtaattcttaggtaacactgaacaaaggcttagtaataaagggtgagctaattatagcctcaaatccaatgcacgttatttgacaaaggatattgaaggatagtaggtagcgcagagggtcagtagtggaggctatccttgtagagtcagaagcaaggctcaaaccacatgataggggctactctggagaagacctcatagctcatactaatagggataggactagatgccaagaactctgccgtgactgctctttaaacatgggatgtttccaaccccaccttcaccaatagatcctttcttcactgtacctacatttcattttactcacttctaaataagaggtatgcacagtgtgaaccccaaatatctgaggtaggtctcagtcaattttaggaagtttatttaccaaggttcagaatgcgcccatgacacagcctcaggagatcctgacaacatgtgcccaaggtcggggcacagcttggttttacacattttagggagacatgagacatcaatcaatatatgtaagatgtacattggttcagaccagaaaggtgggaaaatcgaagtggggagggggcttccaggtcataggtagataagagacaaatggttgcattcttttgagtttctgattagcctcttcaaaggaagcaatcagatatgtgtttatctcagtgagcagaagggatgacttttgagttctgtctgtcttttgtcagcaaggaagttccttgtgaactaattgtgagggaggtctgtagcttttttatcttagtagctatctttattagggttagaatgggaggcaggtttgccctaagcagttccagcttgactcttccctttggcttagtgattttggggtcccaagatttattttcctttcatagcagatagggctgaatcagggtcacatgcctgtaccctagctgcaaggaagaataatttgaggaagaggaaatcagtatggaaattctacaaacagtgagtgaaaggatgctaggtgatcacaaacctgaataatgctgactttagtctaccccttgactgttcaaaggtaatattcagctctccttctataccagcatttcccaactcttcattttaagagccaagaacatgctcctcttctttatgtcatacccttttcctagcaagagtcaggatttgatcacaattacttcccccaattcatactccattatcccctcttctcttgccaccattaaataaccacatggctctctgtttttgtggggttgataattcctcattgaaacagtggttatttattgttttgattgttactatattaagctttgggagggatcgggtgtgacggttaattttgtcagcttggataagatatggtggctaattttctggtcaaataccaatctagatgttgttacgaaagtattttttttagatgtggttaacatttaaaccagtagactttgagtaaagcagcttgctccataatgtggtgagcctcatctaatcacttgaaggctttgaagagaaatgacagaagtccctcgaggaaaaagaaattctgcttccagattgccttcagactcaagattgcaacatcaactcttccctgggtcttcatcctgctggcctacaggatgaaatctggccaacattcatgattgtgtgaggcaattccttaaaataaatgtctctctcttttcagctcattggttctgtttctctggagaacgctaatacaagggagaagggaggttgaaggagatattaataagttcctggcagggaagtttcaagacataatttaaaaatatatatttttaagtgtccttttgtattttttcactttagccattctattgttcagcttttctttaaaagtttggctaaaaagtttgatatatctctttccctatgcataccctttgttggaaggaagggctgggttgtaattcaagattgtagccactggcttgaatctctcccaaagtttcttgcgctctaggcttcctcggggttcagtgacctactagaaaattattctctctctcaggaaataaatctaacagtctccacttttcttcttatgtcgagggtgactcactagaatgtaagagacgaccagatacattatcattcatttattccttttgttccttcatttcttactgtgcaagaaatgtaaagaagaaatgtaagaagtgtaaggcttgtaaacccagaggttaatacggctcagtatcctaacagccgcgtgttcaagaagcacagccagggggaattctactgtttttggaatttctctaagaaccttaaatggaccctaacatacattaacacttcttcaagccacttcccactactcccaccccaccatggctccagtggctctctcctcaaactgaccctcaaaaggcttctatcctgtagcacaacattatctctatgcttttaagctcttactccagcactcatcatttattactatgcaaatatatgacaagaggtggggcaactcccagagagatctaggcttggccaaggaatcagcattgagttcccagaggattctgatagggaggtggggacagtccatgaagagtggagggaattgcacttaagacaagtaccagcgaagcaccaataaatcaagctccctccccttctcacctactagctaatctctcgatttcatccctctcttactattttccaccaaaaaagtccaaagaacaagttcatcaacaacagaaatcccctcagtgggtggagagagtggagaaagaaaaggcagaaatcaaattcactatagcaggaagaaaagaagttaagcatgcaaaaacctggggtatgggctggtagatggtgcgaaaattcaaatagtaagcatttttgtctggtctcaattcattcatttgttcattctttttgctttcttgaaaaaaaaaaattaagatgctgtcgtgttccaaggcagtggcctaagtattgagaattcaggaataaattaagagcacagtccaagccctcattaacctccctgtggtttccctgccacccaccctggctgtacctactgcgcttggggtgtttagctcagaatcgcagaattgcgccccctggctgttcccttttgcaacagcggacgttgggagcagatgacgctcccagcagagctctgttaatggtagcaggttcccaaattcccggtcccagggcctgttcctgtcagcagttctcttacggcacctgttgactctgcactttgagaaatcaattcctctttagcgtcagggctgggcgtttcggcatcacctcctaggacactgctcacagtatgtgctgccaaaaggcaacagcaatgcacatcagatcctttccaaacgtccttgcttaaagacactggaaccggttgctcaacttcggtactgtgcagacgcttttacatcccctacaacccccaggagcgtgcctgcaaaatccaagcgagagatactttaagtaacccctaaatcgattaaagtatgcatcaagtggctattatgggaaaagagaagttttatttatatacagtacataaaataatttccttttacattactattaaaatgaagatagaaaaaaatgtggagagttcaagggtcccccagaatgaccctatattgaccctatattcgaggaggtgaacctcactccactctacagcatttcactcctagcaatctcctgctgggcactcctgaagcaaaaggtggagaactcatgcaatgatggcttagagcaagcttgtccaactcattgcccgtgagccacaggaggcccaggatggctttgaatgtggcccaacacaaattcgtaaactttcttaaaacattatgagacttttttgtgacttttttaaagctaatcggctattgttagtgttattttatgtgttctacaaatgtagaacagggaagccaagaaaccggacacctctggtttagagtgaactttcatgccccaaaagagtcctctcaggactgacgtgtgcaaaggtaggtaaccagagaattggcaaaagtggagcttttcttttttgctaattcccttcccccatcctcagagggcacaaggacaccagacaaatcaagtccgagaaactatctcatcgttctccagcttatgagtggcagacactgctagcagcctacctagtaggctctatagatacctagtagtatcttttattcattactaagagattctccattttgttcaaggtaacaatgtactcaactacatttcccttgtagctaaggctgactatggtacagggttttagccttagtctagggttacaagcagtgctgctgatcagggcttctggaaagctctttaaagggcttaggtttaggaagtttttgcccttcaccctactccttctttggcatgtggaggccatatgatatggtttggatttgtgtcccgcccaaatctcattgaattgtaatccccagtgttggaggaggggcctggtggcaggtgattggatcacggggatggacttcccccttgctgttcttgtgacagtgagagagttctcatgagatctggttgtttaaaagtgtgtagcaccttcacctttcccttctgtctctcttcctccttctccagccatgtaggatgtgcctgcttccccttcaccttctgccatgattgtaagtttcctgaggcctcctcagccatgcttcttgtacaatctgcataactgtgaaccaattaaacttcttttctttataaattgcccagtctcaggtagttctttatagcaatgcaaaaactgcctaatacactatagtagaagtggaactgctgtcacttaccagggtgtggctgtgagcctgaaagccacatgctgagggtggtagggcactgagcccgagtccttggtactatatggatcctttgtactggccccagttgaaataagctatttcaacaaaacttgcatgttatcctcacagtggtatttcaagtaatatttctgtgagatgattctgaagcatgttgagttttccctcctttgagacttacaagtatttggggcaaatttgttatttttcttctctatcaaaatgaaaaacggatccatatttcctgtatcttacagttttgttgacataaagtagaattgatagtctaatatatctaaagtggatcatactgctttgtttttgtttatgggtttggattagtcaggactctccagagaaacagaacaaatagaatgtggatttatataggagatttattataaagaattggctcttgcaattatggaggctggcaagtctaaactctacactgtgggccagcagggtggagacccggaaaagccaatgttgcagttccaggagcctagagaatttcctcttggttgaggtggctggtcttttaattctactcaggccctcatctgactggatgaggcccacccacattatggagggtgctctgcttattcaaagttcactgatttaaatgttaatcttatccaaaaacaccttctgagttgatacataaaattaactatctttgtttattttttagggcagactgactcagggataaatggaatgtacatttgcagccttgccaaatccctggaattatttatttttcctctttaagaatgaaaacaatatctaaaactcatagctacctcttagtaataattatatcactcttcgctttaaagaaagttaacagagatttctgaaagtgccagtaaaaactgcatttattgaaattccccactcacctcaaaccttgccaaaatttccctaaattccagaaagaccagagttttaaattgttacaaactaacagtaagaacattcactatgaaatacagcagggtgctccaagatttaattctgtgccagagcctgacattctaactgtggaattcagtaacccacctccattttccttctcaaaataataccttaaattaccatacagttttctgcctctgagctctcaagtatcctgggggtttttgtcattagtatatgatctggctagtctacccaaagaagcataatcatgtattcaaacatctttcaaatcccacctattctacaaaggatttgggacatcttacaaaaatatttatgatatgaaaaaaattttaaataggacacttttttttaaacttctgttttggttcaggagtacacatgcagatctgttatataggtaaattgcgtgttgcaggggtttggtgtatagactatttcgttaaccaggtaataagcatggtacccaataggtaattttccagtcctcatcctccttccactctccatccgtaagtaagccccagtgtctattgttctcttctttgtgtacataaatacttgatgtttagctcccacttacaagtaagaacatgtggtatttggttttctgttcctgtgttagtttgcttaggataatagcctccagcttcatccatgttgctacaaacaacatgatctcattcttttttttggcaatgaagtattccatggtgtatttggaccacattttctttatccagtctactgttgatgggcatttagattgattccatgtctttgctattgtgaatagtgctgctatgaacacatgcttgcaagtgtctttatggtagaattatttatattcctttgtgtatatattccataatgggattgctgggtcaaatggtaactctgttttaagttctgtcagaaatcaccaaactgtttttcacaatggctgaacaaatttacattcccactagaagtgtataagcttccccttttctccacagccttgccagcatccgttattttttggctttttaatagtagccattctgattggtgtgagatggcatctcagtgtggttttgatttgcatttctctaatgattagtgatggtgagcatttttttcatatgcttgctggctgcatgtatgttttcttttgaaaagtgtttgttcatgtcctttgcccacttttaatggggtcttgtttttcttgtaaatttaaattccttatagatgctggatattagacctttgtcagatagatagtttgtaaacattttctcccattctgtaggttgtttgtttactttgttgatagtttcttttaccgcgcagaagctcttatgtttaattagatcccatttgtcaatttttgcttttgttgcatttgcttttggcatctttgtcatgaaatctttgcctgttcctatgaccagaatgatattgcctgggttgctttccagggtttttacagtttggggttttatatttaagtctttactccatcttgagttaatttttgtatattgtgtaaggaaggggtccagtttcaatcttttgcatatggctagccagttatcccagaaccatttattgaacaggaagtcctttccttattgtttgtttttatcagctttgctgaagattagatggttggaggtgtgcagcgttatttctgtgctctcatgttcaattggcctatgcatctatttttgtaccagtaccacactgttttggttactagccttgtagtatagttttaagtcaggtaatgtgatgcctccagctctgttctttttgcttaggattgccctgtctattcaggctcttcttttggttccacatggagtttaggatagtttctttctaattatgtgaagaatgtcattggtattttgataggaatagcattgaatctataagttgctttgggcagtattgccattttaacaatgttattcttattcaggagcatggaatgttttttcatttgttttgtatctcttgtttctttgagcagtattttgtaattctcattgtagaggtctttcacctccctggttagctgtattcctaggtattttattctttttgtggctatcatgaatgagattgcattttttatttggctctcagcttggatgttggtgtatgggagtgctactgatttttgtacattgattttgtatcctgaaattttgctgaagttgtttatcagatcaaggagctttggggcagagactatggggttttctaggtatagaatcgtatcatctgcaaacaggaatagtttgatttactctcttcctattcaaatggcttttatttctttttcttgcctgatttctctggccaggacttccagtactatattgaataggactggtgagagagggcatccttgtcttgttctggctttcaaggggaatgcttccagcttttgcccattcaatattatgttgactatgggtttgtcatatgtagttattattttgaggtatgttccttcaatgcctagtttgttgagcgtttttaacatgaagggatgttgaattttctcaaaagtcttttctgcatgtattgagataatcatgtaatttttgtttttagttctgtatatgtgatgcttcacatttattgatttgtatatgttgaaccaaccttgcattgcagggataaagcctacttgattgtagtggattagctttttagtgtgctgctggatttagttttcacaacctctgtcccctaggttcaagcaattctcctgcctcagcctcctgagtagctgggattatacgcatccgccaccacgcccagctaatttttgtatttttagtagagacagggttcaccatgttggccaggctggtctcaaactcctgacttcaggtgatccacctgcctcagcctcccaaagtgctaggattacaggcatgaacaacccgcttccagcctggatttggttttctagtattttgttttattgtgtctctgccaggttttggtatcaggatgatgctggcctcatataattagttagggaggagtccttctttttcaattttttgaaatagtttcagtaggattggtaccagctcctctttatacatctggtagtgtttggctgtgaatctgtctggtcctgtgctttctttggttggcaggctttttattactgattccattttggaacccattattggtctcttcagggattcaatgtcttcctggttcagtcttgggaggttttatgtgtccaggaatttattcatttcttctaggttttctagcttgtgtgcagaagtgttcatagtagtctctgaaggttttttgtatttctgttgggtcagtggtaacatcctctttgtcatttctgtttgtttttatttgagtcttctctcctttttttctttattagtctagctggtagtctatatattttattaaatttttcaaaaaaaaaaacctcctagatttgttgatgttctgaatggtttttcacatctcaatttcctttagttcagctttgattttggttatttcttttcttcttctagctttggggttggtttgttcttgtttctctagttcctctagtcctctctagttcatctagtgatgttaggctgttaatttgagatctttctaactttttgatgtaggcatttgtgctacaaacttccctcttaacactgccttgctgtgtcccagagattctggtacgttgtatctttgtactcattagtttcaaagaatttcttgattcctgccttcatttcattatttacccaaaagccattcaggagcaggttgtttaatttccatggaatatggttttgagttattttcttagtatcaatttccatttttattgcacggtggtctgagagtgtggttggtgtgatttttttgttttgttttgtttttttaatttgctgaggattgttttatgtctgattgtgtggtcaattttagagcatatgccatgtacagatatgaagaatgtatattctgttgtctttaggtggagtgttctgtggatatgtattagatccatttggtcaagtgttgagttcagatcctgaatatctttgttagttttctgtcttgatgatctgtcagtggggtattggagtctcccactattaccatgtggttatctaagtctctttgtagatctctaagaacttgctttatgaatctgggtgctcctgtgttggatgcatatatatttaggacagttagttcttgttgaattgagccttttaccactatgaaatgctcttgtttgtcttttttttaatctttgttagcttaaagtatgctctgtctaaaattagaataacaacccctacttttttctgtttttcattttcttggtaaatctttctccatccctttacttcaagcctatctcactgcaagtgagatgggtctcttaaagacagcataacattgggtcttgcttctttatccaacttgcctctctgtgccttttatttggagatatttagcccatttacatgcaaggttgttattgatatgtgtggatttgttcctgtcatatgttgttagctggttattatgaagacatgtctgtgtggttgctttatagtatcactggtctatgtacttaaatgtgtttttgtagtggctggtgtttagcattcccttcaggacctcttgtaaggcaggtctagtggtaacacaatcttctagcatttgcttatctgaaaatgatcttatttctcttttatttatgaagcttagtttagctggatatgaaatctttgctggaaatttctttttttttttctttttttttttttgagacagagtctcactctgtcacccaggctggagtgcagtggcacgatcttggctcactgcaagctccacctcccaggttcacactattctcctgcctcagcctcccaagtagctgggactacaggtgcccaacaccatgcctggctaattttttttttatatttttagtagagacggggttttaccatgttagccaggatggtcttgatctcctgaccttgtgatccgctcatctcggcctcccaaagtgctgggattacaggcgtgagccactgtgcccagctggaaattcttttttttaagaatgctgaatatttttccccaatctcttctggcttataaggtttctgctgaaagatcttctgttagcctagtggggttccctttgtaggtaacttaatcctcctctctagctgcctttaacatttttctttcatttgaaccatggagaatctgataactatgtgtcttggggatggtctttttgtatagtatttcacaggggttccctactaaaaaataggacacgcttaagggtagggggaaaataaaatcagagggaagattagcaaacaaaatgaaactcacatcattttatatgtttgctagaggtgaccacaattttggctccaatatttctgtttgttttttgttttggctttggttccaatacttctagtggtcaaaggaaagtgagaaacccaatcagtcacaggattcagaattttccataagattaagtaaaagggaacggaaatgttctacagaagaacagttttacttgattttgagtttcctaaagatatgaaatgttatggataatatacttcataatgttcctactgaaatatgcacatttatgattttcacaccactgcttatgatagggtatcttaaagtgggccaattctgtagaaaaatattctacaagggagcaaaatatatgtcactctctaacgcttaatctaggggcaaaatttgactctagaattgtggtttttttaattgtacatcttggaaactcttgaatttcagaagatgcttctagggctgccctggttttgggagcagggctgagcctgaggaatctaggctgttgttatcatctgttatcccattaatacatttctagattcaatttgctaatattttttgttgaggattttttcatctatacttatcagggatttttttttttttgatggagtctcactctgttgcccaggctggagtgcagtggcacaatctcagctcactgcaacctccaccttctgggttcaagagattctcccacctcagcctcccaaggagctgggagtacaggcatgtaccactacacccggctaatttttgtatttttagtagagatagggttttgccatgttggccaggctagtctcaaactggtggactcaagtgatctgcccacctcggcctcccaaagtgcttggattacagttgggagccaccacacctggccttatcagggatattggtccataaatgtctttgcttggaatgtctttgcctggatgatgctgactttatacaatgagttgggaaatattccttcctcttgcattttctggacaagattgtgtgaagtgactattatttcttccttaaatatttgatagaatgcctcatatttctcccttttatatccaagtctcacctgggtagggttgccagataaaataaagaattttcagttaaaattgaattttagataaacaacaaatagtttaaaatatagttgtcctatgcagtagtttagatgtacttatactaataagtacatcttgttattaatattatgaatgaaatattattcattgtttatctgaaattaaaatttaacgtaaccacaagaataaaaagcacgtgttcacacaaaaacttgtacatgagtgttcatagtagtgttattcataatagccaaaaggtggaaacaatccaaatgtctgtcaactgaggaatggataaacaaaatgcgttctacccatagtattagtcagggttttccagagaaacagaaccaatagacataaaatgtatatgcatatgcagacttattatgaagaataattaactcatgtaattaaggaggctgagagatcccacgatctgccatctacaagctggagcccaggaaagctgggcatacaattcagtccaagtccaaaggcctgaaaactaggggagccaataatgtatattttagtccaagggcaggagaagatgagatgagatgttccagctcaagcaataaggcagaaaaaaggaggaaattcctccttcctccacctttttgttctattcaggcctcaatggattagatgatgcccactcacattagggagggccatctcctttactgagtccacagacccaaatgctaaactcatctggaaatatccccacagacatacccagcaatatcgggccatcctctaatctagtcacattgacacataaaaattgtcctatgataaaatggaatattatcagccgtaggaaacaacgaagtactgattcctacgataacatgagtgaaccttgaaaacgttatactaagtgaaagaagccagacgtaaaaggtcacgtatagaatgatttcatttatatgaaatgtacagaataggcaaattcatgaagacagaaaatagcttagtgtggtcaggggctggaggaaggagagaatgaggtatagagggtagggggtatatggtttctttttggggtgataaagtattttggaattagataatagtgatggccgcacaactttgtaagtatactgaaaaccactgcatggtacactttaaatgggtgaattttatagtatgtgaattataaatcgattaaaaatatgtatgtaataaaatatttttcttcctatattattatctaaacctgggtgcatctgattggtgaaagccattacgtatctccgcattctagctgcaaaggagtctgggaaatgttgctgctggactcccaatgtggaaaacttttgaaatgtggagagactgtataaaatgtgttcagcctgtaatctcagcactttgggaggctgaggtggattgcttgaagccaagagttcaagactagcctgggcaacaaagtgagaccccatctctacaaaaaacaagcaaaaattagctggatgtggtggtgtgtgtctgtagtcctagctactggggagcgtgaagcaggagaatcacttgtgcccaggagttggaggctgcagtgagctattgtggtgtcactgcactccaacctgtgccacagaataagaccttgtctctgaaaataaataaataaataaaatgtgttgaacatcctcaaatggtggatatttactccagattctggagttgaatacctagatttgaatgctgtctccatcacttagcagttggagagctagagaaggtgatttaaccatctgcctcagttctctcatgtataaaatctgtcagtacaggtactgtaattgtttcctaacccatctccctgtttccttctgtcttctttcctgcattctttgttcaacagagaggccagagtgatccttttaaggcataagttagattgtatcacttctttggttaaaattcttcagtggtttctcagattactcagagtaaatggacagggactcaaactgaggagaaattttagggagtggaatcaaacaggagcaagacaggaacaatacagataaaggaaagttagctacaaataaaagcgtggcaggaaacagagctaagaaatctcaggaagcaaaccatcatgttttctaaactctacatgaaaaaacaaacacacaaacagaagaagcagctctgtgatgttagaaaagctctcttaacttatttcaaataaaaatgagcaatagaaaggaatcaagatcaaacaccatacagttattataaatacaaagacagtaagtaacagaattacacctgcagtcaataaagcagacaagaaagatagtgcctttaaaataaatcaaagctgttatttcaaaacaagctaaaatacattaagaaaataatataaaacgtgagagagcaagataaaccagaattagcaaaacacagaaatgagatgacagaactcaagaactcagtacaaggaatacaagaaaaaattattttagatatgaagtttataggaaggacatcagcaaataaacacaataaataatgtcttaaaagaagcagaaggtgagaaagagaaaaatgttaaaaatcaaaagctataaaggaaagtacaaatactactgatgagaggcagaaacagatctgtacatataatgggagccaatgaagaagaaaaccaatgcaagagaagagaacaaataacaaaaactgtaattcaagaaaaagtattgaaataagaaatgatttaaaagtatataatgaaaaagcacaccatttacctgacaatatcaatccaagatgaccaacatgtcatgctccagtaaaattactggactttaaagtaaaagaaaaaaatcctttagacatccaagcaaaaaagaggaagtgccttataaaggaaaggaaatttgattattttcagacctttcaataccaacacttcataccataagaaaattgagtaacatatttaaggtataaaaagaaagaaatgtaagccaagaatttaatattcaccaaaacaaatttcagtataaaaggcacaagctgttatgaacatacaaaaatcccagagaacactgttcccctgagctcttactgaggaattaactcgatgtgtgtgagacagcctaaatgatctgagaagtatcaacatatgaccggtggtgagcactgaaggtgtagaattaagactaaagaagagctaagagggagagagcattgtatgtcatggctgtattctctgatagtgtagatacagaacaactttatataatataaagaaagaaagaagaatagggataacagatataaaaaaagtttaactgttttcagtaatcataatgagtagcgatagtgttcgtactgtcattctgagcccgctgtgtatgtaatgtggaataaagcaaatgagtaagcatggcattttctaattctatcatccttgagaaccagaaatcttaccagggaagaaaggaggtttgaaatctgtagtcttggtatttaaatggaaaatatctgtatgaatactaaagtattttatttttaggaaacaatgtatgtgtgtatatgtaaacactgaaaagttttgggcacaatgaactacccagatacccacgaacacccctaatgcccagattgagagcttgaaatattattacctccttaaaaaaaaaacctagggcttcttgtttttgtagaactggatgatttcaggaatggggcaggcaatgtccaaaatgagcctgaaacaactcatgattgcagatggcaagaaagctgtcaaagactgtagggtcatgtcagaaagactcggagccaacttgcaaaggttcccactagtcaaaaacaaagatagtgtgagatttagtgatgatgataactacaatgggagaaggaggaagttcttactatttttaagtcacagcatgtggagggatttgtagagctgttgacaaagttcttttccctagatcggggtggtgattacaacggcgtttggctgaaaatacttcactaagctatatagttattttgtgtggtcttctgtgtttttgttttatttcacaataaaaagttattaaaagttactgttgattgaatgacatgatttaaaacttccgggctttgtttctttgcctgggcaatgaagaaatagcttcttatgttcactctggaactttactttatatttcaaataatgttgttcatctagtagtgatttgtcctggttatgggaaatgactgcgtgcatttcagttctccaggccagtgcttaaatcgtgtttagggagtggaggcaatagagaggactggcttaattttgacaataattgcctctatgctttccttttctctttacaactgtctaagaaacacactctctcaccaggaccccatcaaggaagaggtggaaggtataagggcgggcttctctgaggccgtaaaatatccttgctctacctcttcctttctctcaggaggatgtatatttacaatcaccaatcacactatcctgcttaagctgaaatcgtcacacagccaaaatctgctgagaaatctcatgggattcaaggttcaacaatactttcagcccaaataaaggagagctgcggctagtgatgatgcgtggcaaggtccgggcccaccgatcgcggagccgttgtggatgcggaaagctcagcagaagggccagggccgcacgggagactggagagccacagtggactggctttgccctggctgatgatagtctgctgtgtccctaagtcgtggcttagaacgtagacaaaagaaattacaaagggaattatgagggagcttgaaaccactcacctggtttaggaacatttacatcccttatttctcttccttcttcttttaaatgcatatttattcctctcatatataaaattttagtctctttattatttatttataatattttatggctttcttaaccataatattttaatatattaaaatatatttaaattatattttatttttaatattttatttttaatatattaaaatatatcttaaaatatattataaaacatatttatcttaaaatatgttataaaacgtatttatcttaaaatatattataaaatgtatttatcttaaaatatattataaaacgtatttatcttaaaatatattataaaacgtatttatcttaaaatatattataaaatatatttattttaatatattaaaatctattttaatatgttgttaaaatatatttctttttaatgtgttaaaatatatgcttaagatatattcatatttaaatataaaaggaggaaagaaattttaaatttaattttcattttaatttttattgcattttacatatgtatcagtgactgaaattaaaaaaaaaagtgtttatcaaagatagtttgagaagcactgaactagactacattaaaattaagagattgtattcattataagcctcttaaagagtgaaaaagcaagccacaaaatgggagaaaatatttgcaacacaaaacaaaggactagtatgtaaaatacttgaataattcattgaaattaattttaaaatgggcaaaaaaagaaaaccttgaatggtcactgcacataagaggaagtcccaatggtcaatgagcacttgaaagagtttaattcatcaaggaaataaaaattaaaagcacagtgaaaaacctcacactcagatcagcaaaaatttaagcctgacaattccaaatgttggttgagggcacagaagctctcatatattgctcctaatagtttttaaatcagtgaaaaaaatcgctttagaaaactctctgacatatgcatctatgaaagcttaatatacctatgccttatgagctagcaactccactcccagacatgccacaggtatttgacatggtaagtcaaatggcaggtgcaaaaattctcagagcagcattatttttaatagctccagattgaaacaactcaaacgtactatcacctgaagaacgaatgaattgtagtatattcacaacatggagcactaaacaggaatgaaaatgaacagctttgcatgacaacacagaaactcagttgtcataggaattcatcatggttctaccagagaagcagcaggatgtttcagtgcacagactggtttataaattcagatatatcttgctgccggaatgttctcgttcagagactcagcttcatcttggagctaaggtgttatgaagaggaggtgcatgttgaagtcaccgatgaattctggggctgggggagatctcagattctgacttagagtgtatggcatgaaagtcagaggtaaagaccagaactaaaaccaccagacccctctgctggagttcttgcactgacactgataggactgagagtggatgagacagaaagtcttcctgctgttagaactcccaaggggctaggcagaggggagctgcaggaacctaaggccctgggacaataggattggcagaagcagatcatgtgcccaacatcacttcccaaaggtgccatctcctaatgtcagtgcactggggatgagggtgcagcatgtgaatctggaggacataaacattcagtctatagcaatatgagactaatttataaagttgggaaatttacccatgtttcacccttctctgtcagcacaaataatgaagagttagcaaagctggctcagaaatgaaagcttttgtcattcacacagttactgctttcctgccctcggaatcactacctattttactgtaagaggcatagaactcacattccgacagaaagcctctcctgctgggccccactatagaggaaaaagcttcaaattttgcttaaaaactgtatgtgggaaaaaggttctgtttggcaaccatatgaaacaaaatgcaaaatgttatatttaattacaaaagtgagaattaactttcagttgtatcctctgtgtttctccgagggttgcagcttgctgctttttgtagctcatgtctatgtgtgattcactattgagaataagcatctctctaactcagaaacagaatggtctgctgtaaatcctgttggttcacagtttgaaagcttgttttgtgcagatgttaatactaatttgtggctttaaaaaacttcttccactacaccaattttccagtccaatatcccccatggagggctttgtctattatattactcacccccttaataccaagccttacctgacagcaagaaacacagtccacctttgaatatgctagaatgcaagaggaaagcagtctctcttctgagttagaaaaaggaagctacgcttttgaagaggaaaatgtatatatatctctatttataaataattgatttttacactgtatttttttttagacgaagtctcactctgtcactcaggctggggtgcaatggtgtcatagtgactcactgcagtctcaacctcctgggctcaagtgatcctcctgcctcagcctcccacgtagctgggaccacaggtgtgcaccagcacaccctgctaatcttttgattttttgtggagacgggatcttactttgttgcccaggctggtcttgaattcctggtctcaagtgattctcccccctcagcctcccaaagtgctgggattataggtgtgagccatcatgcctggcctacactgtatctactaattttatcaatcaaaatgaattaagaatctgtttagtacagataccatgctagggtgttggagacatgaacaaaatatggcccccaacttcaaagttctaaattgtctggcgagggtgagtacttggctactgtgcagtgatgcgatatagaactttttactcatcttttcaaattccacatttgtatctagacccatcactcatgtaagcatcagtctcttcttttagattatgagaaaggaaagcatgaacttaaatttccatcctcttgctgcagccagctatatccatgaaacattttcctgaggtatgtttgtctaaagaagagcaaatgcagaaaagtggcacccatttggtagtggccacatgttcgtgggcaagtcggcatgtggccatttgactacaaggaaggaaagcattgggatttacagccataatcactttctaaggaggatggggcttgttacatgaaaggtcttttcagcagagctctttcctgggagctgagtttagacacaggagctgcagtaagcttaattaatttgcataacagactgagaagaattaggaattctctgtgcaaaattgtgggggataagatgaagaggcaagtagagaggccaaggaggaaggagttggaggatggggaagagaagtaaaaaggctcagatgctacacagggtgaaatggccaggaaaccaccctcagtggtggaatggccaaaaggttgctgtctgagagtccgtttgaagtagttgtgtggtgcaatgaaggacccctccttcccgaaatcttccccgccctgcagtaaagtctgctactcatacccatgacttgggtgaatgggtattggagtgcgtggtagacagaataatagctcccaaatgtgtcctaagccctggaaccggtgattatgttagatggctttgcaggtgtgattaaattaaggatcgtgaagtggggagattaccctgggttacctgggtgggcccgatgtcatcataagggtcctcgaaagtggaaggggaggccgaataaaagcatttgagggagatgtgacttcagaagaaaggcacagagagatgcaacgttgctggctttgaggatggaggaagggtggggggcaactacagccctgggaaaaggcaaggaaacagattctcccatggaccccgcagaagggaaagcagccctgtgacacttaaattttagccctgagaggcttccattggacttttgacctccagaactgtaagctaataaatctgtgttttaaagccactgtttttatggtaatttgttacagcagcagtagaaaactaatacacagtgtaaatcagggagaagagctgagtgcaaagacaggaaaatctaagtatgatttagggacagtcattcggccagagggtggctgtggggagcataatagaatttaaagtcaggaaggtcagtttgagtcagactgtggggagccttacatgaaagatgaatgagttgagtcactatctttgggccatggaaagccactgaaaagttcaagggtggagtgacataagaaacagaatttcagaaaggaagaccaggggcactctctgtaaggatgcccatggctgcctggggagacagagtaatgtcccccaaagctgtcctaagccctgaaatctgtgattatgttagatgactttgcaggcatgactgaattaaggatgttgaagtggggagattagcttgggttacctgagtgggactgatgtcatcataagggtccttaaaagtggaagaggggctcaaaaaaagcatttgagggagatgtgaccacagaagaaaggcacagagagatgcaacattctggctttgaagatggagaaagggggccaactccagctctggaaaaggcaaggaaacagattctcccatggacccgacagatatggctgagtcacggcaagtaaacaggccctgggactctcatcctcacttcccctagaccccggccttgttacctgtttcatgttcagggcttccacttcaggtttcatttgaataaggcattttgtatttaagataaaatgaaaacaacaaatgagcacagctcggtgcacagagaagttcagtatcttgttccagctcacccagctatacagtgagaggacagggacttattccctaggaatcctgactcccagtcctagactattccggtggagggccagggggactggaaaggggaataaataaggccatctgttaggtgatccaggtattaattcctggactatggaatctttgagcaggaaaggaagggcctagataggaaggacaagtcccatgaatcaacatgcctgggagagccaatggacccaagagcaccagtgcttcatcctgaggccagcaggtactagtgagaaacactacactgaccccctctcaagtccagtaatctatagatggaaggaactggacactttagagctccagcatgaaggagaatcatattagcagaccccaaagagggcatactaaaagatgcagggaatgctttcgagggagggtccagtcttgggttaataaagcaagaaaatgaatgaaatgatagagcaggaagtggagacctggacttgggcttctgccaatgatcccagaagaaacacatacagcccaatctattaacttcctcatgacctcacttccaggaaactgggagaactacaaaccaataagctctgtgagggctcaaagtgaatgtttagggcctggtggttctctaagcacatctttcgattgtcagggtattactaattaaacaagaacgctataattacttgtgcattattacaatacacaaagtgatttaagcagtaaaaagggctttgatgaattagtagttcttttgattcctgtagttttgtggctcatgttcaaagacatcttttaaaagtattcagattcatgggaaagctgcaatatctcttacccaggcttttttttcctgacttcaagtctgcatgcgttactgctttctggacacgctactcacgagccccatcccaccctcctacttgacttgttcaaaatcgaaactcagcccctttcattcccagcttgctcttcttcctctattttgtacctgggtaaattgcctttccacccattcagcaaaatttggggagttatcctcattcttttctttcttgtcctgtctcctataccatcattcttcacatctatgtaacatccaccaccatgacaataaataatagtggcaacacttttttgagtgcctattacattctaagcatcttagatatattattgtgaacccttacaaatcctgcaaaatttgtactattatcctcattttataagtcaaagagcctgaggttcagagatattatttcctcaaagttcatctgcaggtaggtggcagttggggtcaggattcaaacccacatttctctgattctaaagcatatacattttatatcacacagggctgcatcccatagagcaccaacagttctgccaaatttgcccaagtcttgactaaaatccacctacttccttccctccgtaggctatttgctaccttagtgtatgctgtcattagttctcacctggactgatggcataagctttctcacttgtctctctacctccaaccttgctgtattctctagtggtatgtctgttagctgactgatcataagcaagttcctgtgtgctcaccctgaacctactaaatcacaatccccaagccttcatgtcagtcttagtaataagcacctcctgttgattcttatgaggagcgagtatagccaaaggcagttctaaaaagaaaactccaggctcaaagccttcagtggctcccgttcacctacatgataaattgaatattctttaatctgacatttaagggccttttatggtctgggtaaaactcgtcctttctaatcatgctggcacaaagaagtcactcagcaaacggacgcatagtatggcaggcagaataatgggcccccaagatgtctgtgtcctaatccccaaaaccagagaatatgttaccttacatggcaaaagagactttgcagatgtgattgagtgatggacccagagaaagggagattatcttgggttattcaggtggtaccaatctaatcacaagtcattaaaagaagaaaatcatttctggttgtgatcagtgagagataacatcatgagagaagggttagagagatagaatgtagaacgatttgaccttcatagctgattttgataatggaggaagaggaccatgagccaaggatgtggtggcctctggaagctgaaaaaggcaaagaaatagattcttccctatagtttctagaaagtagtgcagccctgccaataccctgattttagctcatgttgggcttttgacctaaagggctgtaagataataaatttgtattattttatggtattaaatttatggtaattttctatagcagcgatagaaaacaaattcacacagttttttttatggcgacttgcttatctatactttctacatgtatcattttctctgcctggagtgctctgtttggttcacttggaaaactcctattcatccttcaaaacccagctcaaaatggctgattcagacaggaatttatacatggtccttcaactccaagagcacccaatatttattcatgataaatgttaatgttattttgctttgtatttacttataaacttacctacatctctcacctccttagagagcttgtcttgctcattttatattcttatcctggcatagtgtccatagtgtctagcatatggttggtgctcaaaaaatatcttctgggtaataactacagagacattgaaggaattgtattatagaagcacctcatgtaagtcaatcaatgttggattatatgaattcttatcattagaatacgatggttttaaatatcaaaaataatgattccaaaaaagataataattccaaaaatgagtctctttgagattgacagttaatgtttattacttatacttaattactttctttcttttttttttttagacagagtctcactctgtcccccaagatggagtgtagtggcatgatcttggctcattgcaaggtctgcctcccgggttcacgccattctcctgcctcagcctcccgagtacctgggactacaggcgcccgccaccacacccggctaattttttatattttttagtagagacggggtttcatctcgttacccaggatggccttgatttcctgaccttgtgatcctcctgcctcggcctgccaaagtgctgggattacaggcatgagccaccgcacccggccaattactttcttttgagatcaaatgatttttcttttccttatatgaaaaccatttatttctactttactccaggcaggaaaggcagaagaaaaaattacgtcaattaaaagcaaatcctgggcagggagagatagttcacgcctgtaatcctagcactttgggaggctgagatggaaggatggcttgaagccaggagtcagaccagccggggctacatatagtgagacctcatctctacaaaaaaattaaaaaaaaaattaaaaaaatagccagccatggtggttcatgcctgtggtcccagctactctggaggctgaggtgggaggattgcttgagcccaggatgtcaaggctgcagccagctacgattgtgccacagcactccagcctagatgacagcacaagaccctgtctctctctctctctctaaaaaaaaaaaaggtaaattctgtatcccagtgtcattatctaggctgagtttacacatcttcccggtcattaatgctcactggtgccctcgctctacaggcatatgaagttaagaggcttgtcaggtttcctctatcacaggtaagaaagcccgcaggagctgggaaagccctagccagactaagtaagaagtgagacactcttgaaaggaatcttatgcttatatcctgcaatccctggtttggctccacttaacatccaaaggagcccagggcctgcctcagggcacaggagaggtcctaggacaggaccttaagatgccacacagacttattccctaagggacctggaaaactgttattaagtttgttttaatgagtcgcttggttctcagccttggctgcaaattagaatcacctggaggagagctattctgatgtgaccaaaggaattttttttttttttttgatggagtctcgctcttgtcacccaggccagagtgcaatggcgtgatcttggctcactgcaacctccacctcctgggttcaagcaattcccctgcctcagccttccgagtagctgggattacaggtgcccaccaccacacccagctaatttttgtatttttagtagagacggggcttcatcatgttggccaggctggttttgaactcgtgacctcaggtgatctaccagccttggcctcccaaagtgctgggattacaggcgtgagctaccatgcccagccctaggaattggtctgtgagaggtgtttttcaaagttccccaaatgatttggatgtgcactcggttgcagttcgcactaggcaatgtttttgaaatttcctttggaataagaatcactggggttgagcattaggcaccagaaggcaggcacccactggccgcgcccttgaactgccctttccctcagattccagtcagcaaatctgcagtggaacctggaatctgctggtctgatgtgcaactctagtgagtccaattcgggtaggtggtacccccctccgccccctgcagcctgccctagggagcactgataccatcagtagctgccctctgtaggcacctggacctatggggaaggactcttgactagggcctctgaaacaaaggctgcagatcctctttgcctatacagtgctgacaatgtgaagaggagagaaaaagatgagagtgtgctcacagcgcttatacagaaaacacccctcctttcacaccaggtggtaaaagctaagcaagcctttagaaagtgccctaactaccaccaatgcctgaaatctcagtgctgccctggccccaccctttcccatagccagtgggtcctttgataacatattaacatcttacattccaatgatagattttaaaggctgaatttcaaagaagagttgaagtgaacacccacacgttaactcccaccacgcattgcaaaatccagttgctttagatttatccagcttttcatcagcttaaattttgtgacaaaaatgtttggactttactgatgtaagtataatggaaattttgtgagttggtcacactcatggataaggctgttgtcaggcaggtcggctctacttggtaatctatggtttcactctggaatatttacactggcaatcctactcattacagacaagcaaatctttacttacatgaggcgggagaatgcagacttcctcacctctcacaatcacctttcctatcctattggttcaattcaggatggtgtcaggtcgccttatcttctgggaacagtgggcttctaatacaccctgtggatatgcatctggaatgatcccgacagagacttaaggcagtgataccagagtgggtcatctccagtttggctctgctcctgaggactctggggacagtgagcagttgggtcagggacttttttatgaccaagctcagtgatgccagcatttgctaagatttcagtgtttaaaataaattgttctttgaatcttccacagaaagattcaggggtcttggaacagaggaagccttggttggtgacagggtcacagtcttcaagataggttgacacaggctggcatctatggatcttcccagccctcaagcactggacatgaccacaatcctcgaggttcactccctctagttacatgaggtcacactttccccttctccaggaaaggctgtcaaacaagaactatagcattagaaaattatcactggtatatctggaatcagcaaaatttctaagaaattgtgaaagtctgaagaagtgagtaattgttaacctgaatgcacttaccagcttgttagttgccacttcatgacagccgatactgaaagcatcaagatgaatgttgactccttccctttagaatcttactggccgcaggttgcctgcaatttgtgtgaacaacatgagaactacagggagaagaggcacttgaagccatttctgcacacccttgcctgagcctcacctgcattccaagttctcctaacatgttcagacagcatatgtgtgcttttgcttaattcttgagattggtttggatcttgtgtaaaggagggcaaccactttataatagccacagatcacttgcactgctgctgtgatacaatcattcaaatatcttcatttgtttagaaatggttgaggatcattcttttttcccaaatgtattattctccataattccatccccaaaagcaaaaatgtcacaatgacttgctgaatgctcagtgtgatttgagcttactgatagcagagaccatgcttgtctatcattggatccccagcagctaccaacattctttgcacttactgggcgcttgtaaatgttcattgaatgaaagaattaatcaatgaatgacaagctgggcattacttggttctatcaaatttaatcatgcttccacggtttcacaatctacctttggaagtgaaaatgtgcggcatgcctcacattccatcaataatgcaaaggcttctatgagacactagggaagtagaaaacagtggtttattgaatcagactaaaatctgttagtggcagaagtacatatttgcaaacaactctaataaaatgacctggagggactttaaaaggctccacagctttgtgaggctctgggtgactccctggcagaaacattccgtggcactttgacttgtattttcctgcccgatgaggcacattactcagagagttgacataaacttcctttggccagccatgggaggacgtgtgcacacacgcataatgggatggagaattgagaatgtgttagtgccactccaaaaaagacatctgctttcaaaaatgtttatgtttagcacaaaaatgtattccatggaattatggcatgcatttacatattcatgggccttagaggatatccaagtttaaattaggagctttctcttcaattctatcaaagcttggaattgccatgggagtatggcaccaatactctggcaaggaagtttgtcccctgaagcctctcagagaaggatcacccagcagggctgccactattcacacataatgcttgacctataaaagctttcccttattatgcaatgcaccttaattatttccattctattctagtccatttctttaaaatgctggtcacattcactatattgattacctgacccactaatggactgtgatctgtagttggaaaaatactgcagtagaaaaatgaagagtgaccccaaactaaagactctaacaggaagccacaaagactgcttggaaggtttgggaatgttgtagtcaaatccatacccagaatgtgcttatcaagtgtggcttgcagctcgtgatctgggatgccaggctgtctggatgcactatggcggcagtatcatgggctcacaaaatggggagaagggatgggagatggctttgaattctttctcctttagcgtggtgttcaggaacaagccacctctcttagcttggaggggaggctcatagagctctgtcatccacaaggaaatctcccatcctttgagaggaaatgcaaatgtcatcatccctttccttgatgggtcctgtaagggtctactttccttgacccttacagttgaaagtcctcttttttcttaacccctagggcacataatttatttctcactttgagtacctaacactttctaaactatgctttcagcttttttcctttattgactgtatgtagcatcaggactatgatgatgtcctactcattttgtatccctgtgtctagtatgtgccttgcacatatcaggtgctcaatcagcatttaggacatacacaaagaggccagagaaatgctttgtcttataacattatccctctgtatccatggagaattggtcccaggaaccgccctcctccccaccaccaccctgcagacatccaaatcctcagatgctcaagtcccttatataaaacggtctagtaaaataatgtgtgcacatggatacagagaggggaatattagatattgaagactctgaggggtgggagggtgggaggacatgaaggatgaggatttacttaatgggtacaatgtcgctaaaaacccagacttcaccactatacaacatattcatgtaacaaaatggcatttataacccttaaatatataaaaacaaaataaaatggtgtcatatttgcatataacctatacatatccttccatatactttaaatcatctctagattactgtataccaaatataatgtaaatgctatataaatagtggatgtactgtattggttttttatttgtatattttttattgttgtatggttattttttattttattctcaagaatatttttgacccaaaattcatggatgtggagcccatggataagaagtgccacctgttctcagaacttgagaatgatttatctttgagatgatgtcactaggattctgcaggaggctcacttatcagcattggtattcccacatatcttaccttcttactcttctccttctccctccttctccttctccttcttgctccttctccttcttttttagagaagagtctatgttgcccaggctgatctcaaattcctggcctcaagtgaccctcccacctcagccccccaaagtgctgggattacaggcatgagccacctcttaccctgagcctgcccattttcccatgcatccatcctcccatccagctcttattgagaacctgctgtgttcctgtgctaatcgtggtggttactaaggtgggtagggcagtgcctgcctctagatcccaagtctagtgaggcagaagagaagtgagggggtaatgaccacaatgtgagaagcgctataaggggggcagtggcccacgtctcccaactcatgtcacagtgcagtgctctctcaccatatgctttttgactgcttctctcagacttcttttttttttctttttttttttagatggagtctctccctgtcgcccaggctggagtacagtggtgtgatctcggctcactgcaacctccacctcctgggttcaagcgactctctccctcagcctcccaagtagctggaattacaggcgcctaccaccacgcctggctaatttttgtattgttagtagagacggggtttcatcatgctggccaagctggtcttgaactcctgacctcatgatccacctgtcttggcctcccaaagtgctgggattacaggcgtgagccagcgtgcctggcctctcagatttcttaaactctgccccaccagcaaagattttgttaagctttatatcccatagtttgtattaggaaaacaatagctgtgttaaaaaattaaattgttataatattgaatatgcattttctaagtgttcacgtgtctaaagcaacaggtgatacagtgggaactgcaatacggtgtgaaaaggaaattatttaaacaaataataataatcgaattatcttcaagacatttcctttggccaggaataacatctgaacagaagcgtgaccctggcctaaaggtttctgcatgatccggtccctacctgctcatccctggccacaacctcttccctcattgtgcagcagccctggtgggcttcgctgtccctcttcttcgtacactcttcacctatcccttccaggtccacggcccttcttatccttcaggtctcagcctaataagtcatcagacaggtcttctctgacgactttgcaaaaaagctgttgcccaccttagtctccatcctaggagtctgatcttttccttcatagacctaatcacaaagtgtaattatttcatttgtttggttgtctctcttgctagactgtgaactccacaaactgttcaccagcctatccccagagactcgcatggtttctggcacatggcagacactataaatacattttgaataaatgcatgttagggcggctcacagaaagcatctacttgaaagggaggacatctcaccagcgggggacagcgctgcagaacccagcagcggaacaacagcgacaccaagtggccagtccgcattacccacagcagctgttccttgccagaaatctcaggccttggaaggctgatgcttgtaatttaatgtggatactaatccattaagcttgtttattcatttccttaatttaaaaaaaatctagaaactgccctcaaatatctcccactatagagtaggacacttgaaagcatgtggccactagctagacagactttaggagttgctatggtaacttttcccttttttgctaaccatttggaaaccttacatttttcaaatctgcatgctttgaaaaggcctgcttgattctactttgtttttcaagctttgctttgatttactgtatttaatttgcttcaccttctaatttgttaaatgacatgttattaaaattccccagggggccagcaggaatctgtgccgctgagagacagcatgcattctggaagtcggtgattcacatctgagcactcagaggagattttggaaacccattaggttagcagagccgctctgggcagaatcagcgctggcagggacgctgcatttgacaactcaagtctttaggtgatgctgaaaagcctgccctagcttctcatttcctccgtcccccagcgaatcgttctttgctgctgctgtcctcggtgtgaaaaggtgacccccccactgcccatcgcacctgcttgctatctctcgtcggtcaccccctacaagaccggaaaacaggtctaaaaaagccagagcgttccgcgctcaattacaatgacgctaaaatgcatcctgaggcctgtccatcgcggatttgagaagagccgcagcagcagaacacgccattaggcgataatggcccgggcccgcttcagtcatagggccgggaaatgagggtgatttagtgacgctgccaatgcccgacaccatcgccgcggtaggcaaatggcagcaaatggaggtgttaagtaaaggaagtgcagacaaaccatggttgcagaaaggctcctaatattgatagagctaacccaggaggaaagctggggtaaaatttctttacattgcgagaaaaaatagatcccagcgctctcctaaacattattatttgctttagggtccatcttgtccttcatatgaaaatggagacaatttctctcagcgaagaccgaagccccggtgcccattttgctagcggcatgtgcttccactccactccgcaccccgctcattttatttttaaaaaataataaatatgtgttcattgtttaatcagatgcatgtcccttatgtaagaaaaaaggtcatatgacagggaactgtgaaagtatgaaagtgaaagtcgtgtgtgtgtgtgaaatacacatacacatttataaatatatgtgtatatatacatctgtacacatacatgtatacaatttaggcgtaaaattccacttaatgatgcaattatctcgtgctatttctggagtgcagtcttgactgttctttcgactttggtccagtttgagtctcaggcacacaactttttggtctgtaccgctttggcctgtcccagaatctgacctcctcccacccccgcagcaccttccgctggcctccctacacctcatcccctgggctctgcctgttggatctgtgcatcgcgaatgggctgtctggattttcttcattcctgccgccctttggttttcttgaaaagcacagctttgacagtgaccacatgctcccaaaatcatttcacccgaggaaaatccaccccttcttttaccccacccactgtcacaaaagtctccagcagcttccatgatgtctccttatctttgggtgggacacaaaattcctagtgtgtcttccacccgcaaactcttttggccaagcttcttgtcatcttgctgccttaacacttgggcttggctcttccagccctagggtttcacaaatttggttaagtccagagcacattcatgtgtacgtatgcaatctatctggttggcgttttgtgtttattacatgacgatggtcattttcctcgagaataaggaagaaatggaccatcgttgcaaagcttgcacagtagcttcacaatgaaattattttgccatttgcttctaagtagaattgtaatgttggcttctaggtgcacctcccacttcctccttcatttttacctataatttctttagcatcgattgagaaagtgtttattcagggcataaccctgtgataggtactgtgagcgatatgaaaaaagccatggggccaactcttttaaaaaggtgttaattggatttttcccatataaaaccccccatagcattttatttcctaactctgcttctcaccgtcaacttcatttgcctatttaatgcaatttgcttctcatgataagattctattaagtgattattaagacattctgagttacctcagccaagtacatctataatcattacctacctcctgggggtgatttgaggtgtaattagttaaagctcactgttacctcccaacatctgaacgacaaacagagaccacttctacacagccagtctgtgagcctggtgcagcctgttcacatttacataaatcccatagatccaggtttcacgagagcccatgttgggtctgtagaaatagagagcatactgaaaattgcctacctctatttatatcaaattgtacccctgagggttaatttcttttggtttctaagtgatattatttaatagccctaacgttagtgttaataaaacaaacacaataaacctccactaaaaattgagatatgctggaacaaatcagcctagcacgaccctcaaacctcttattctttcagtccttcagaaccatttattgaacttctactgtatgtgaagcattggactaggctctaaggctgtgaaattcagaaagaaagtcacttgtcctcaaggaatttatagtcagcaaatttcacagatggtgataatgacttttagaaaactttcacatttactcaaaagcctatctagtattgagggggtgagggggggtgagagagagggtgagagggggggaggggggagagagagagaaggggagagagagaagagagcgagcaggaggctccaagtggtttaaatactttattgatgaaagttctcaagtcaaataccaaaggccccagggctcctgggatcttttctcatggagagctacttttagcccatggaagattagagacatttaattaggaggaggaggtgaactgtttcagtaggcacacagacaagaagaaggagagacatggatagcatccttgtaataagtaatcaggtagaaaaactgaaagaaaaaaagaaacaagaattcatggagcattgcagtgtggagatatttagtataaaggcaaatagctttgtaaaccccaatggtcttgagggtttcaatttgcattacagcacagtacaataatttattttcataatgactggaacacacgaaggcaactttagaacatggctactaggcagtagaatagggaatagagaatgatttccatcaaaaactatttctagaaatttaaatcagtcttaaaatgatttaaatcagttcttaaagtaatgcttcagttataagatacagtaggcaaattctaattcaatataaaaaagtgctttctagccattttagcctcctttaaagcggatttattgaccttgggaggtggtgagctttctgtggcttagaggaacgtaagctaagtgcagacagccacctatgagaacgctgcagagggactttgaaagtccacctgctggtcaaatccagactgccgcaaattttgtacagcctgagagctaagaatagtctttacattttaaactgaaattgtaaaattaaaaaaagccttttagtgagaatagttgttcaattttgcctccacccacaaagcctaaaatgccaactatctgctcctttacagaaaaactttgccaacccctactctaaggagttgctctttcccaactctgaggctccgggagctgaagcacacctcattttctcatgaaggctcaatgaaaatgactcgatattaaaactgctttactctggccagggtagagcatccttttagatactgacagtctctggaaatcggccttgatctagtgttaggtaacgcttgctgggatatacaaatatcagatttcgtacttctcagtcttacaaattaaattttatactttcagattttattcactggctagggagaaagacaactccatgcgcttcactgagtaaatagcagaaacagggcgtatttcaaagccacccagacctccccttatgtcaatgccacaaacaaggcccagtgagctctgggccattcttaggggttccaccagggaagatggtagaggtgaggtcatcgtctcttgatggtagatgcacaggccagggaccattatattatttttaccctaaaagagaaatgcccttaggaaacaaaagtgttcatagttttctcaaattttttctcctatgtttttccctctaagtctgggagtaaaaaactcttagcttagagaaatgccatctccacctattctgcctttgctgagagattagcaacccttgaaaggctttggtctccaggcatgccgggggcaggaagaaaatgtctggtcttgtgactctcccaggtgtgaagtgatggtttcagtaatgtcagtgtgattcctgggtcttagaaagaaaaataaagcagaagaaaaccctggcataacccagtgaatggtagcttaatgtcataaattccatggctcaagtcagaacaacagtctttggaggatttcattctctccaaggacaaatacgtgtttccagttggttttataaatgtgtatctatgtgtgtttgcatctttcctgtggcagagtgcctagacacgggcaagtcatctgtggataacagcatgcagcatgtgacatgaaaaatcacacattgtatgtttaattgcttcaaggcattacacacacacacacacacacacacacacaccccagcttagtgctgtgtgacttctgccactgcctcctaccctatttgtcagattacagggacacagagcaaagtttactgcacacaaaaaagccaaactaatgctacgagccatgcatggattctccctgtcttccatttagaaatccccgagtaaaaaaggattatggtcctatcacattttactaaacattcattctgtgacccaaatagctcctgaagacacagttatcacccactgtgggtgctttctttgtgactattttcaaaggcatctgcgggataggctagaaatatcaaaatatcatttggagataaactgtggtcaggacctataaatagctgcttccctttagtgtctccgcccccctgttccctggtccccccttcgctccatactgctgcccttcaccttctttttttctcacacacaggatcacatgctcctcccggggaatggacttggaccacgtgcataagaaatggcaatctggacgggcacatttcctctgtcacagaactgtgtcttgtatcccagcatcctccccacctccttcccgtggccctgtttcacaattagaatgcagctcggagtggaaagaactggcacccagcagatggctgcaggcagtaccttcacgcagccccgacgcccactcctcggcagcaagaactggggagcgccatatgtcagagctgccgccgatgccagcagaagggaggctttgttcttttgatgggtttgttttgaaaggggaacataaataatacacacccacctctccttccccagcaatctgggcagagcttgccggcagtccttgtggctcaaagtgccccaattgttccctgaacatggctgagtatgagggctggtcttggccaccagatggattaagtctgattaattttcaaccgtaaataatgcttttctcatatttaatcagtgaatacttaatcagcttttccctgggaaaaaaaaatcatgtttccctaaaaaattaagatatttgttttcacacaatccaaaaagcttcttgcaaagtctattggagcgatggatggcccacccccttgactaatgtgtgtgtgtgcaggcgtggaggggaaggctgaggccggagtgtgtgcagaagggagaggagcggggtcagaatgacctcgtggctcttgaggaaaacagtccagtgaaggagcgtccaggtctgtcctgccaccagctggccaggtttgtttctcctccagaaatcctgcatgttctcaaagtcactcacttcaagctgtgaagagcgtccctaagccccgagaaggcagcacaaccttgctcaccacttattcaggccgggcagtgctgggcacatcataaatcctcagtaatttcggttggataagtgaattgtggttaaatgaatgactgcttcttgggttaaattcttgatagcttaaaatgtgttttgggaacacatggttgtgtgtgtgtgtgtgtgtgtgtgtttgagtgtatataagtatacaaaaaggagctaaaataatccatctatagaatgtacagcaccaagagtgaactgcaatgtagactatagactctgggtgataatgatgtctcagtgtaggttcactgattgtaacacatgcacccttctgaggaggaggttgataatggggaagctgtgcatgcatcgtgcaggaggtatttgggaattttctataccttctgctttaattttgctgtgaacctaaaactgctctaaaaaacaagttatattaatttaataaaataatctattcaaggtattaatcatgtttaatattatttattgctagtctctattttctgtttttcatgtattgtttttattattagaaaaaaattagctttatttggaaaaggaagcaaacatgtaacatttgtcttacgagtctcagggctgaagagtatgctggtaagaaggaaaaataaaccaaagcaatatcaatcatcatcatcacagtagttgcaatttataaagaaactagagtggatgccctgtggaagacactgttttattttacatgcatgaactcatgtaatccttatgaccgcactatgaaatagtaactgttattaacgctttccacagaaagaaaatccattaatgcaaacaatttatgtttttaaacagtgtgcatagtgcaaaaataaatgaataaacacaaaatacaattttgcaacactagcatgtaactgacaaccaggctctgaggtactagcagcatcaggaagtccacctgagggacaacacctgccttgttggttttgagaggaataaataacatatagaagtttcaggcactgtccctggctttgagctgggacttaatgaatggtggctgtttcctaaaaccagtggtccagtctttcccacagtttctctgggattttttaggggatgaattggtaacatcttaggcttcaactgcagcatctggaaataccaacaacaacaataacaacaacaataaaatgaccacttttgagacttaagtgtgggtcaaccctgtggtaggttttatagctgttacctcagtcatttctgtctactaactgtgctggtccagtagcaacctgtattaattccatgtgccagacacagtgatatcaactgggctttctgtaaacaccatgagattgccaaatgccttctgaagaaccaccacttcctaaaattcatgttccatgccattgcagtgtaaaattgattttctttgaaaaatgttacctctttcaaagtcagtaatctgtacagagttgtcacgtccactaattcaactatttgctgaaagttcacagatcatgcactcaacgaatagaatgggcagctgtgagattctgtagagggtagagagcactcaagttcagaagacccagtattaattctgactctgctgctcacaagttgggtaacatagggcttcagttttccctaccatccatttgcttccagctaggacatttcatgagtctgagctaacagagcctttaggggaaaattaggcagcaaacctttcctctaagacaggggcattatgtaggcccaaatcccataggttcatgaagcctgtgctctggcatgatggcttggtctgcctgtcatcagaaaccctacgcttattaactcaacaaacttctgtgggtgcctgctgtgtggcaggcatgggacagtactagaatgacagaagatctggtccctgccctcagggagcttgcaacctagtgctcagtctagattgggccaggtcactggagggctcaacatcccctgacttttgggaaatggagcagaagagggatcttacaactcagaaaaaggtatctcagacaatttaaagattaccagcccagaaatgaacggatcaagcagctctgcaatgttgcaggaggaagggagatgaaggaattacatctttcttttaagatatttgattcctttctccaggcccctttgtgcaaacccccctgcaagctctgacagagttactgttctaaaacgttgatagctttgggttgctcttcaacaacaaatcattggctctccattcgccataggaaagtcccagcacagcattcacggccccctacacaatgacttcagcctatctttctagcctcatgccccttctcatccttttgtatcccagaatatctcagaagtgtagcggggttttttttgtttgttttttgtttgttgttttcttgaaaccaagccttcctctgttacccaagctggagtgcagtggcacaattggggttcactgcaacgtctgcctcccgggttcaagcgattctcgtggctcaacctctcaagtagctgggattacagatatgtgccaccatgcccagctaatttttttttgtatttttagtaaagacagggttttaccatgttggccaggctgacctcgaactcctgacctcaagtgatccgcccgcctcagactcccaaagttctgagattacaggcgagagtcccagaggtgtactctcatcctgttggttgtttctcatttcctgaaggtctgtactccctcttctcctcataggtccaattcaaatattatctttcttgataagattacccctaacttacacacacatttgttccgcttagctcaacaaaacattcactgtgttccttttcttccagtacctagcacattgccttagacatgcaggcatcctcatgaggcaaatcctcagatcatgaagtgattttgaatgaaatcactaatagatgactctaatttgcagaccagagttttatcttgcatgccaaaccctgtcaattgatagcagcttgctggagcacagtgcaaagaaggattttaatgcaacattttggtataccaggaaaagcatggtgattgattcatgatgtctattgcagtcacaggagggaaggagggaacgacaacatgcatgccattttctatcctttcactggatacttccaaagggcacatacctttttgtggttgttaatataatcttaatcgtttattttcttttattttttagagacagggattttgctctgtcacccaggctggagtacagtggtaagatcatagctcactgcagccttgaactcctgggctcaagcgatcctcccacttcagcctcctgagtagctaggaccacaggtgcacactattgtgcccagctaattttttaaaaattttttgtagggacagggtcttgctatgttgccaaggttggtcttgaactcctggactcaagcaatcttcttgtcccggcctcccaaaacactggattacaagtgtgaaccactgtgcccagcttgtttatgattttttttttctgtcagtataatatgctgttggttgctacagttattcttctgtgtgttgttctcattgacttcatccacatttggcctatagatgcttgcaggcttgcacttctataaaagttcctgtcatccatagctcgggctaaataataagcaaaaataaatcttttaaaaagcagctgtattaataccttccattgatatttggaatgattaaggtataattacttggaatttttgttttcaatgctctgagcctcgaatgctgctgattgcataactaatcctgcctaatgcgtctctacactcaattaataacatgttctggatgcctaacaatgaagcacagtctgattttcatacagctatttggagagcaaaatgctcttgcaaaagactaaatatacctcttcccatccttatttgggtgcccacaacagagaaattcatgcctgaagctcaagccagggcccctgactctgtagaggtgattcgcaatgaggtttctttctaatgcaagtcaggtggccacgcagtgtcctgtgatcaaagtcaactcaagtaaaagaaggaaacctcccgagttgaggctaaaagcaggttttattccctctgtgttttttgttttgttttgttttgtttgtttttgattttttttccactttctccgtaggctctgaaagtgattatcttcccaatcagggaacaaccactgcaaaggaatgcaatccttgtaaagccccggggcacacaggtttctctaaccagcagcatgcttcccagtgtgaggggctgcctgggatgtctccactgccaagggacgagggagggaacagaacacagctcggatgccaatgctccgctggaggggaggcggctgccatttgaattgatgctttttaaaatctcctgctggggagaaatggggaagtgctaatggacctaatgaaccaagcctcccaaggaagcgagagagagcggtcccatcagccggatcatttaaaactagagcaaggaaagcacttcggaacaatatagtatgggcaggaacacaacataggcaggaactcagaaattgaggaactggccatcagccctttagccctgaaacaagttatgtagtgtatttccagcacagagactgcttgtgggtgattagttgcaaacaggggtctccacgtgccttgggaaggcaaggagagttcgcaactctagcctgcagtacagggggatgagggagggcgcagggcagctggggctgtgtcctcacccagacagccccctccctgagtgcacgtcccctgaccatctcagccttgtctgtgggcatcaacggggcacctgcctcccccttggccccttgaattagtttcctatgctgctgtaacaaacttcaatacactgagtggcttaaaacaaagcacatttattctctcacagttctggaggtcagaagtccaaaatgggtctcatttggttaaaatcaaggttgttgacagggtttcgtccattcaggagactctaagagacaactcattaccttgacttttccagctcctagacaccacctacattccttggctcatggctccttcctccatcttcaaagtcaataacgtagcatcttcaaacctctctctgaccttcctgcctcccttttgcttttataaagacccctgtgattacattgagcccacctggacaatttccgtatcttaaaatccttaagcgcatcagtaaagccccttttgtcatgtaaggtaacatattcgctgaatccagggtttaggacatggacatctttgggggccatgattctgtccaccccatctccctacagtctcagcagccagggtgtcagaagcactaggctgtcccagggttggagctccagagccacagtgagggtgagtcagataggaccagggatggcatggctagcatttctttaccagatggatggtgtggctggcatttacttgagcttgccacttcatccactgatcctgtctggctcaaatactgcaactcctgggacagcctcacacttctgccaccttctagatggacaattcaccaggagtgtagaccccctctgcccatacccatgagtttgggccccctcaggcataactcttccctgctatgcctcaagtttgccttctccctagggcttggcagatgtagagaattaataaactattttccctgccctctcttcctcatccacttgctagaagcagtccttgaatctctgtgacacaaggcgtgcttgagtccgggcataccctgtcagaaattaaaatacactttccaataaaaacagcattaataatcacaaagagaaatcactaaaattgtactgtgctcaaggtccattatgtgctaaacggatttgttgggtggctgagacatgcccttcaccttcaccttcatttctacggcaaaagtgctgctgagcagcagacatgcatcggctggcctcatctgaatggtggttttccagcgactgtgatgaacttactatttcactgcatcgcctggcccacactcatccctctattactgctctgctaaatcactcccttcctaggggttttattatttcaatggtcacttcagttacctcactatgttgtagagacacggcacgtgcctctttgccttacagaaagaatttacaacattgggacctcaatctaaggttaatggaaagagcagggaagtacaattaatgggcaagctgttaagctccatgtagccttgtacagcggatgagaaaagtatctggtggtgattgaatctgggctcaagtcagactttcctgaaggttaatcctaattctgccatttccaagtatgtgacttggggaaacagaaatagaacctctccatgtctcagcctccttgtctgtaaaagggagataacaatataaatgcagcagaaggcaagtggttgcctacccaacagctgtgcccaaagcctcttccttgccttgaatgcagcagacacacactctttggtgtgtcttctcccttgcagctaggggcagccatgccacttagttctaaccaaggggctgaaagtggacatctgctggggaccctggggaaatcgtttcctccataatcataggcataggaggagattcctctttctcttacttttctctcccccgctttggagggtgtcaagagagaatgtgatatttggggcttccataaccatgtcaccatgaagacaaagccaagagagtgtagagatgcccaactcatgtcctggttgctaaattaccctggaactgctcacctctttgttaggggagaagattaaatgactctacgatttaggccactgtcggctgagtgttcagattcttgagtcttaatgcattctaaccaatataaattccgatctcagaagaaacaggaactcagatcatgcatatcaagtgcctggcacaaagctattattccaataaatgataacctataattctcattattaatacctggggaaaattaagatatactgttatttgctttttttcttttgagacaggtctcattctgtcacccaagttggagtgcagtggcacaatcatagttcactgaagccttgacctcccaggctcataattgcctattttattttatctttttttttttttaaacacagtctcactctgttgcccaggctggagtgcagtggtgccatctctgctcactgtaacctccccctcccaggttcaagcaattctgtgcctcagcctccctagtagctgggattacaggcgcccgccaccactcccagctaaattttttgtatttttagtagagacggagtttcagcatcttggccaggctggtcttgaactcctgaccttgtgatccacccacctcgacctaccaaagtgttgggattacaggcgtgagccactgcgcctggcctattttattttttagagacagggtttttgctctgtcacccaggctggaatacagtggtaagatcatggcttactacagccttgaactcttgggctcaagtgatcctcgcacctcagtctcctgagtagctgggaccacaggcatgcataaccacacccagctaattgttgtatttttttgtagaggtggagtctcactatgttgctcaggctggtcttgaactcctgggctcaagtgattctcctgtctcagcctcccaaattgctgggattatagtattatttgctggttaacttcccacttttcaacctcactagctcaccaatttatgcttgtgctgaaaaatgagttgaagtctcacaggttcaactgcacttgttgaatagttatatccttgtttgggtttccagaacaggaatttctcaaggccagacactgagtcttacgaatcaatgaactctgtgcctcgctcacagagtgccctccattggtgttcttggtgggtgatttggtgaatggatgaatgggtgggacagacggacaagtgaactaactccagagccagctgcagaatcccttcttacctagtgtcacgcctggtaccctcttgttctcttgttctatataacacacacacgatgaaatgcaaagtcagacttctatgggaatctggcacttctgaccttgaaaccctaaccaatgatgttttatagtctaccaagggagattcctatctgggcagagaatataatccagtgttctcccagcccagcatgagccagttgtctattactttgatgaaatgtctaaatatgctgtaaggcttttatataatgcgactttctttttccaagaggaagcagatgacttgcacagaggagttttaagaaaagtgcttactgcaaagaaaaagtgataatgttttcattatactatcagggccacacacaaaaaaattgttcccaataaccaacttctgttgaggtttctgctagatgagataatccaatttccaagtgactatagttattctctcatttgcaaatgctaaatttggggatagatgttgaatcaagggttgaggatcaatgcaaatacttataacatgctttgaagctactgatcaattagctcaggcaatagcacttgtttttttcctgtatagcctgatatccctcatctttgcaaatgagccatggggtgtgtgtgtgtgtgtgtgtgtgtatgtgtctgtgtatgtgtgtgtatgcatgtatgtgtgtgtgagtgtgtgtatatgtgtatgtgtgtatatgtatgtgtgtgtgtatttgtgtgtgtgtgtgggtgtgtgtatgtgtgtatttgtgtgtgtgtgtatgtgtgtatgtgtatgtgtgtatgttttcagtccattcttacctccaaggtttctttcttccttatgcatagaaattttacagttcaagataaagagatttacactgggatgatcagcatcagtcatcaaaattcactctgtcatatctttccatactcctgtatcagttaggaatctctattggctgctaataacagactgaaaaaaaatgtgcaataagtatatagtgtggaggtagattgcatagatttggcagttccacagtgtcatcaggaactcaagtgcttcgatctcgctcttttggcatatgatttccatcctcaaaccagcctcagtctcaaatatggctacaataactccagtcattaaacctgctttacagatagggagcaaaaaaacagagggaggggaaagaagagaaaaagatcatatttcaactatttttccctctttcaagagtcttcctggaagtcccactcagcaacatccatttatatttcattggcccaaatttagtctatgggaactacatgcaagggaagctggttgtggtgtcaccatgcataactgtagctcattattaaggaagcctgggagaataaatattccatcgaaacaacaggcacgtgcctcaccccagctttactctgcttgccctgtttcaccaccaagacccatctaagttgtgactttagatctgtttgggtttgagttcttccttaaatcagtgttttgtttttaatgtttattatttattctctgtatggattggccatttgtggctagtgatgctcttcaaccagacagactgagcaactccacccaatgaggctgtagtcttaacttaaacagaagtctaatgcctccagggtcgcctgctgttaatctgccaacaccatcaaagatgctaatgcagaaagaggcaaacaacctgttaattgagcctttattgtgccttgtttaatccttccaaccaacatctctatgaggttaatccccattttataggtgaggaaaccaaagatcagagagattaagtaagttgtccaagatcacagctgacagtgaaatttaagccttgatatgttttattctagagttttccctattatcctgtatttcagccatctctgaaaaattggagcccacaagatgtgagctatgcccagaactcaccagctctagcctggttggagtcactaatttcagaggctactcttggccctttgccaatctgcaagatggaagcaggagggggagtggatagttttctgtcgtctggttctcaaccttggtgctgttcaacttctttcccattgtggcatatgttaaaagtgataatcttcatgcagcctgggggtagcggaggctggctgatctgggctccctcctgccagaggctgaagggtccacatcttggcggactccatggtctttttctcttgctatcccctcttccaggaaaactaatgtctttttctcttgctatcccctcttccaggaaaactaatgtctttttctcccccaaggtctaatccaggatcccacactgcattttcctgtgatatctcctgtcttctccaatctgtgacatcctcagtctttcctagtctttcatgacattgacacttttcttgaagagtattgctaggtatttttgtagaatgtctcttacattgggtttgtctgatgttttctcatgattagattgagatcatgcatttttggcaggaatgccatgaaagtgatgcactcagctcatcgtggcaggcgtacatgagggcaatatgtcttattatggtgatgttgaccctgagcagtgggttaaggtgctgcctgctggttttcccactgttaagtcattactttttccctttataattagtaagtgtcttaggagagatactttgaggctattcaaatattctatttcccttcaaacttctgcccactaatattagcatccatctgtggatcttgcttatggtactctaaaggtgattttatacgatttgcattcctttttagttgtaattcttcagaaaggaagatttgtcttttctctattttattatattgtttatttatacaattattgattcatagatattaattttactctataaattataatccaatgctatggttatttattttgctgcataaattgttcccattctggccactctttcaggtaagttcccatgcttgtccaagatgccatcaacctttttggggtacttccttactttctggtaccaccacagtctccaggctcgtcttggatatttcctgtctcagtccttatccaaaaaagccctggtttcttctgttgaagaatatattagaaaataagacctaggttctatgtggcattatttatcattataaggtaatttggaatcaaaataaatttcagtttgaggatgaaaagtgtggagattagtgagggtacccgattgcccaacattacacagctcagaactggcagacaaaaagctcaaaccagggcagattctgtactcttaacctctccactagcgtaaatgcctcatttattataaatatgaattactacttggcagaaaacgtgcagatgtgccagataaatgtgatttctggttgatggagtgtccgataaagtagacttgtctataaaaacaaacttggcatccgataaatatttttagatagattttgttgaaagaatcatcattatcctcagacatttcttggtatctatgaaatttctgtagagttcagttgtacttaattcctttatggaacatggtagaacatatataaaataataatgaatatagaaatatgaaatagaacaaaaataactgcaggttcactttctggatccccatggcctttggctggaaacttgatggtggggttcactctctctttgcctgttgctttagtaaaccaaggaaccaaggcctagggacatgagcaacttgcatttggccagtggtgggcagagtggagctggaatcaagatttcctggctggatccccaaacatttttgaccctcatgatctgaccaagtaaatctcagggcaggacaacagcatccccagagactaagcccagatgggcagggccacacaccctgtatcatctaagaggccccatatcatctaagaggccaccttgtggcccacgcccgtgtatcatctaagaggccctgtccacactgctgggaagtagtcctggcaacttcactccctttctgtgtttaactctcaacaccaaacccaactcctgcatcaaatgcagttaagaatccaagacaaatatgcctaaagaggggaaaacctggtggctggatggaatgagattgactgggaggaggagactggtttctagtcctggctggagtactagagttttgcacttaaccagttgtttatgccaggcaagatctttcatctctctgagctctactttcctggcttaaaatgatacggttggattagatgacctctaaggccctattctgctttgaaatttttggaagcttcaaattcctttgcagaatttccctgagaggtccttggaccagtcagtctcaccggtagagctcttgcgccacctagtggtggactcagaggcctttttctcccttctgcgttcaggtcccgcctcaactggaacaagagaacaaagccatttcagccctttgcaggactgtggcaaactgccagacctgggaggaacacatgtttaatacatgtcctagaaagatatgctgtgtgaacacactgccactccttatggcaaaggccttagtgcggtgggcatgtggttacaaagccaggttcctgatgtcaagaacacccagcaaggtgccctgataaataccacccagaagagatgtgtttggggtactctctctgtatgctgatctgttacacactgatccttaacgctttcagctgctccctggttaacagtcattaggcaggcatgcagcactgtcatcctgggcctcagccctgctgtcagaaccctcctccagatacctgaagcaaaaagaggcaggggaccccttaggtgtactgctgatttggagaaatccttcatccgacggaaggtctttctaggttcctcccctgacactcctatctaaataaaaactacttctgaagcctgcatgacccttagagttggaatcatctgagctgtggagcacttacccaacatatcctgggatttgtcaaatgttgccggtgattccagaattgcagctgactacctaatagcagacatcatgtcactccgctcatggtgactgctgttaatctggatctggaagttccatgtcgtttgcttttggcttctatgtcctggcgaggcaagtacaggcagcactgttggtgcccattgtacgggcaagaaaaccaaggtttgaaaacaggttcggtgactccccacataaccaaagggagtggtggagttacaataacatgaaggaactctgactcccttgtccaatcacgcagggtttagtcatttgtttttatgatctcaatgaggggcctttggctcatagttcattaattttcatcacaaacactattgaaaaccattaattgcctgtgctttaaatagcagtgtggagttttttccttgcctagcaagacaatgggtgtcagtgggtagaaggagcactgggctggggaccaaaaatcctggactcttgtttgacaaggtcaccaccaaactgaggggcctgggaagtcacaaccactgaggcctccctctccccatctaggaagcgaagagggcaggagtaaggtaccttccctcccagaactccatatgtgaaagaaagggcatttctgatttagggtatgtttcactttctctaaccttggatctgtcccagtaaaatgattaagcgaggatatctgtctttgccaaagtatgacttacctggtcagtccagattgttcaggtgggcttattgctttcttgatttgtaaccttttgttttccagtgacctggactgtttttggtatagaatttcattcccaggtgataaattcctttagggaagtgatagcaaacaggtttaatcttgagggcccttcaaatcagtgagcagtggctgtcgggagctctgtgttaatgtctctgaggccatgctgtaaggcgccatgggaacatgattgattagccatgtctgctgtgggcaggggctggggaatgcagaggggaagggctgtatctgggatagcactgtggaattggagcaagggaagccatgccgagtgaaaaggcacagagctgcttagaagcagagcagggataggaatccacacctcctcccttccaattcagtggcctcccacacaagacttcctctttatttggtgtgatgggcaatcaggtgcttagaagatactttccgatgatgaggatgaaactgatggtctggcagcagctttctgcctgctctctcagcaatgtgtaaacccacacatgtgtttttccctttctgagacacagaaaggctcaacctttgacaagagattgtccaggaaacatcagtaaacacaccaaatgcctacattcccattaaaacatgcctatctccttctaggcagttccaagcgagacttctaagaggtctgccttgcacaactcacaggcagcagctgtgaggaggagaggtgcaccccaggctgtgggtgggaggacagagggaatggggaggcaggaacaatggaccagcctccttggcctcacaggaggcgtctgaatgaacgatgatggctcttggccttccaaatggcaaagacacattcccagagaggccggctgtggagggctcctgcccagatggactcgctgtactgtgaaggagcattctgtgttccctaactggcagcggctgcccagcccatcagcttgcctgactgcacaccaagggccctgacggctttctcatggggcaccccggggcttctgccccaagcagatgctgggctttatgttcccacagagaaggcttgcccgtggcggtccatccatcttcctctccttcatctgagaggcagtgtggcctgccctgagggtctgcagggagcgctctcaccaggcctgggaggatgctgccagggaggagagtgccctggagcctgaatgcctcttttgtttgcaatgaaataaaatctgcccttttaaaaagcatccacgctgccaaaatcccaggtaaagggggtgtggttgacttgctgctagggaggaattc

SEQ ID NO: 76 - DNA, 98862 bp, Homo sapiens
gaattcccagcaccttggcagagaacctagcacatcattgctcactattcctgacatgactataggcctgctcaccatttaacatatacagtgttcagcactgaggatggagagatgagaagacagcccctgccctcaagggctcaccttccagagagaaggcagacacccaaatacagcacaatgccatatctctctcacacacacacatacaaggtgaaaaaggaatacagaggaaagacctcaatctgctggagagtcagggaagggttccaaagggcaataagccaggcatagtgctgtgtgcctatagtcctagctactcaggaggctgaggcaggactgcttgagccaaggagtttgaggccagcctgggcaacatagcaagaccttgttctctttaaaaacagtaacaaaaaaaaaaggaaattgcacttgagctgagaagtctaaaaagtgaaggaattttgaaggcagtcaagcaaaggcaaatagtttgacacatgagagtgttcagagaatgacaagtagctcaatactgttggagcagagtatagaggaggcagaggcaagagatgaagctgcagacagcgaggaagccagatcatgaaagagcctgtatgtcaaaaaaaaagttttaattttactttgggaaacacaaattgtacatgggagtgacacaatcagatttgcaagtcaaatcaagcctgcaaacacagtagaagatggactggaaaccagaggccggaaggccagtaaggaggattacagtagtcttcataagagatattgagaggctaaaacagaggatgaaaaagtagcaatgatatgaaagatatttagaaacaagactatcaggcacatgggtggcaaacttctaatctctcggataacagttatgagagataatattaggatccacagatctgatggataattccaaaagaaatgctggaccccagtccacaacagcctaatagctcccgtgagacagaaaactctggactaggcctccttgccttacagattcaaactggttttgaatttgtaaactaggaaaaacaaaactattttttaagacaaaattacctcatatagattagagaacagaacagatgaaagttgggaaatgaattaaaacttgtttcaagaccaaagacttattttgaggacagtcttaatgttttctacttatccctcctaaatagcactttaaatgagcacagctttcagttgggcaaaaaaggaaactaaagggttgccaacactggaatataactctaaaaaagggacagatgtcctcttctagagatatctaactacaagataaacagtcagctactggatgtttgaaatctgtctcaaatagaaaaatattctacctctgaggtccttttaaagccaatatattatactctgatgatccaaaacacacacaaaaaaagatctctcaatgacaactttctacctctggttccttcttgaaaccatggttaagtctctcagctatgagggaatagaagaaaacagactattttcataccatcaggcccaataacaacaggttttttaaaggtttggtagcgttctgaattggtttaaaatgtactggtcaatttccaaagagcatatgctaaactaacacatgcagagggaatagaagagaatagactgccaaaaaaaaatagagaagattaaagaacatttccctccaattcatcctacatgctaacaccaattttaaatcttttcctttctttaaaaaagcaccctcagtgccgggtgtggtggctcacgcctgtaatcccaacactttaggaggccgaggcgggcgaatcacgaggtcaggagatcaagaccatcctggctaacacgatgaaaccctgtctccactaaaaatacaaaaacttagctggacgtggtggcaggcgcctgcagtcccagctactcaggaggctgaggcaggagaatggcgtgaacgcaggaggcggagcttgcagtgagccgagatggcgcactccagcctgggggacagagcgagactccgtctcaaaaaaaaaaaaaaaagcatcttcagaagctttactattacctacaggataaagtccaaattcctggccgggcacagtgactcacacctgtaatcccagcactttgggaggcagaggcaggcggatcacctgaggtcaggagtttgagaccagcctgaccaacatggagaaactccgtctccactaaaaatacaaaattcgccgggcgtggtggcacatgcctgtaatcccagctacttcggaggctgaggcaggagaattgcttaaacctgggagacagaggttgcagtgaaccgagatcgccattgcactccagcctgagaaaaaagagcaaaactccatctcaaaaaaagtccaaattccttggcctggcattcaaacatctagcacccagcactacctaatccttcaacagtatcgcctacatttccctctcccagctcactggactcctccattctcttgcaacaggaaattccacaggaaagttagaaaccccagcaccataaaaaggaacaaggctacctttgccaacaatcaaaacaaaggataagcgtccaaatttcccattaaaaccagtctccagttgatgatctaggctaacaaatggcagaagaggcaggatttaggaaagtcaatgctgtcaaaagaagggtaaatcatacccttctgtggcaactaagaattatcatgaatcccttcttttcttgaagttgctttcatttctatagctctattatctgttatctaacagatctggaaatcctaatcccccttattggccccattactaatatgcccttttactaggtttttcttcaatgacaagccacctagttcccactggagaggagaaaggcagtccagtctgccaattcaatttcagccacaacgggctcaaaaacaggtcttggcataagtgaaagtcatttgctcaaaaaaaccttctggctttattacactgataatctataactctagtccatgcccactcttcagcaaaccacattcttcaaagcatccatgaaaaatcattctagaccctagaggcttatgaaggcagggtgacttctacatggagaaggcatcttttttaaaatcagctttcagaccctgccttgctcctactcttccagacctggaaacaaaaacatcaaacaaaattaaatcaaaagttctcatcaaggttccttctccgggctggctaataaaaacatatagtaccgtggcagagggcggtgggtgggtggtggagaatacttagagcaaaggggtagtgtatctggtcggatgatggttaacacatcctgaaggcaaggacgccaccacagacaactaggtcttggtcatctaggacaaaagtcaaagatggtaactaaatatccaatcaaaaggctaatctgcaacttcagtacacaagtcattagatcctcagacctgttttaaattctaagaaatatctctggtgtgtcagaacaatgtaaatgtacaataagcattctataggtctgtaactttaagcacagcaccactgtcaccagactttttttttttttttttgaggctgagcctcactctcacccaagctgaagtgcaatggcacgatctcggctcactacaacctccacctcccgggttcaagcgattctgcctcagcctcccgagtagctgggattacaggtgtgtgccaccatgcctggctaatttatgtattttcagtagagatggggtttcaccatgttggccaggctggtcttgaactcctgacctcaagtgatctgcctacctcggcctcccaaagtactgggattacaggcatgagccactgtgccaggcctccagacaattccaatgctgtattttgtctgtaccccaactagaccataaactctttacggataaagaacatgtgccaaagcttttaccataatgcctcatattggactgaaaatacaactgatgacctgactgatgatcacactgaaaagaaaccatgaatgctggcatgttttcaaagtcaaagtagcaggtgataccagtgatagaggccacgcctgttttcagtattcactgaatccccgttgggcaagaaaagtcagattttaacaaaaattgatggagactgttctcgctaaatatagcagtctacaaggttaccaaatcctggaatcaaaaggaaaaataaggctaaaatagagttatgtgaacaaaaattgggttcaggacagtgaaataacagcttcctcaacaagaaaaaaagtagtagcagctaaaaggcaaaatcaagtaaaggatgattcaacaagaaaagcaccagtatttatattctttgcactttcattgaaacgtttcaccggagattggtaatgattaggccaagatgacagagatgattcaaggttgggtttttcatttgaaaagtctactaattttagagttgtgttaaacctaagttaaagttggaatagggttttccccggaccaatattaagtgaagtggatcaccaagtggagtagcggcacgaaggtggtttctttagacttttaagtccaactcctacggagccgtttggtattaggcatataatctaagctttctgagcctcaatttccccattcacaacaaaagggcaatgcaggctcttctcataacttcaaggggcggtggtctgatatagagtactatgaaaacaaaagcagcacaccaaagtaacacattattattatgatcacttatagaaccattacccgctaggatgaaactccccacacaagagatgaagcccgagagaaaagagttgaaggggaaggtccccacgaggagacagtaaccgaactgcagcgccccggtcagcagtatatacagcaggtacgcgtccagcaacttcagacgctgcggagtggagctcaagtactcttctaagaaccgcgaaatgacagacactaccgacgccgacataactgcacgcaaggtactccagtccgcgccccaaactcttggaggacccgtcgaccacaccggatgtgctgtttgcgcatgcgcaccctcgtgacctaactccgccctccccggtgtgccaatttgcgcaggcgctgaggccggccagggcgcgtaacaactaatgcgcagacgcggactgcatcaacagactcaactacaactcagaaaagttaatgcgtctgcgcaatggccctatcaatgagctggggacgtgtactctttctgttctgtttccgcccgtcagctcggtgacgcccacagttgctctggcaacaagacacactgggaggaagaggggaataagctttactggggaccgcgtagctaaccagaggtatccggctctctctggtccttctgagtcctggaagatttaacggtttgcatctactttgaggcaatgcctggcgttcctggggtttgataccagcctgaccctaattctgttaagggcgctgtctgcagatgtctgtcacagatcattggaacaagtcaagttcatccgcagtgagacccggcgcggccaatcactgcacaggccccagtttagacttaattacttgggggagtgagtgggtgtggtgaggggcgggaggcagggaggaagcctgacctcagcagggttctgaactggaactcgggatctggccctgcaatgccaacatttattgggcgcctccttggggcctgacgttgtactaacttgtagggactctcacgtgaatcagatatatttgcagccttaaaagagctggtgaagggagggacagctgtcgaatgtcgtgcaaaaagcatatggtcaagtttagcagctctctttccgcaagctggtatcttgaacctggtgtaatatcccgggatgtcagcgtcgaaaggcccgaaagagcatgcctggttcaaccctactctctccaactcattttgcagaagaaactgaaatggtttcaggttttgtattttaacaagtgggattattttgagggttttaactgtttttttttttttttttttgagacggagccttgctctgtcggccaggctggagtgcagtgtcgcgatctcggcccactgcaacctccgcctccctagtagctgggactacaggcacgcgccaccacgcccggctaatttttgtattttcagtagagacggagtttcaccattgttagccaggctggtcccgaactcctgaccttgtgatccgccagcctcggcctcccaaagtgctgggattacaggcatgagccactgcacccggcctgttttaactttttttaagaaattaagttctggctttcgttgcccttttaatttcacgtgaatccgaccttctagacccagttcatctcaccttttagctgtaagtttttccacacatgaccaggtactttattttcagcttcttaatattttgaactgtacgtgagcaaaattcctaaaacagcaggtgaacaacagcgttcctgccttttcactttttttttttttttttttgagatgaagttttgctcttgtcacccaggctggagtgcagtgaatggtgcgatctcggctcactgcaacctccacctcctgggttcaagccattctcctgcctcagcctcccgagtagctgggattagaggcacctgccaccacgcccggctaatttttgtatttttagtagaaacggggtttcgccatgttggccaagctgatcttgaactcctgacctcaggtgatctgcctgcttcagcctcccaaagtgctgggattataggagtgagccactgcgccggccccttttcactttttatttgcctttagactggaaactctacacgcattaactaacggatgtattatcagtggtgatcaaagccttacttaagttctagaaagaagagaaataacctaagaaacctttagagtctatttgaatagatagatttatattcatacccgtggagatttgtgcagctatatgaacataagttcagcctaaacctatgttgctgagaaagaaaaaaaaagagtggataacaagctggttcttatttcaatataatatggcaggaagcatcaatttctctgacaagttgaacctttctctctgcctcatcaacaagtaggagggtagcttcctcacgaatattcaacttcaaactttacaggctaggctgatgctttttaatcattcaggtgtggattcttcagggagtttctgttccatcagccaggctccttccagtgttttctcccttatgttttgtctgcctttgatccatgtcaactatcatcattaagatctccccaggaactctcacaggagagaagaagagatgaaaaacaccaaatggacttattgaatgcatttgtttctgagacctgctagtcacaccaatatactacactagggcttttctgaactacttaaaacagcaagaaaaggcctacttctctattcagtttatgattctataatcattgaaacatttttaactgatctgtcaataggaaattgctaacactagtgttgatttcaattagtttaaatcagaatattaatatagtttaaaattcttgtccagagtagtggataagagtgcaagctctagaatcagacagtcctaggtttgaaccttgattctgctgtttactagttgtctaatctggaacaagttactcagtctgacagtctcattttccttttctataaaacagaaataacaatacctggctcattgaaattatgtgaggattaaatgagataatgttaagcattaagctgttagcatagtgtttggcagacagtaaatgttcagtaaatgtttgctcttattaactatcattaatcctagtaattaaccatgtctgcttctcctagttctctgaatgattaaaagttagccaaactacagcgcccccaataatttgggtatgcaaaagatagcactggagggactgcaactcaaatggctcttaaagggcagatctaatttataagctgaaactgaagtcagagtatactttaggggtttcattacataaaacaatggaagagtggaggagcaagagggttcccttaagggcaaagtccatgattttacatcatacatcctctacaaaaagaaatcacattatttaccaaaagaaacacaaatcctccaaagtttgagtagacaataactcttctaaaggaaatctccgcatggaaaagaatgtcttttccatttcctttcccttgcattgtcacgtttgccttaagattcccctctttgcttctgttaactgctattgcatatataatctctaccttctaaactttggccccagtgtgaccaaaaccccctctccttgtttcctaatagaacagataaaataggttattattttcagaaataaaaatttaaggagaatcaagttgcaaacagcacaaagtcaaatttttaaagtatcaagtttctgatcaagtcctagtaaagcagtaaatatcttcagtgaacccatatcccttcatcctttcagtttctgatgaagtggaacaacttttcagctcctttgtctggtttccctccctcctagctgtttgggagtctcaaaaaagcctcagttttgcccccttgctggcacccgaaagtgagtccactatattgtcctttccaagagcagatcactcaccacaacatggggctgaaatcatcagtgcctgagcaacagtgtgcaatagaattttctgtgacaatgtctctgcactgcccagtatagtaactgctagacatatgtggctattgagcacttaaactagttagtgttgtaacccaaatgcaggttcactctctcgctgcttgcagagtccacttaacaagagtgagatctggtataaagaaaatgatattttattccaaagctaccttaggggaggaagtactggttttctgccttaagggtaccatttcacttttggagcagaaagagggtgcttttgaaatggggcatggaatgctggcatgaatggcacgaggggaggaagcgagtggttggggggtctgcatactaccttcagtgccttatctactggacagtgactgctggtgccttttgtgggcaggactgggttgtaaaagtggccaaaactctccaggtaagagaaagctttgtagcaggcatactttgggttgtagataggctgttgtctctcaaggcaacctcccggtgggtgagagttcctctctggagcttctaagcacatagttagatgaacctgccccatagggagtgtctgataaagaggaggtaaaaggctacaattgcatttctaaagagctaaggaggaagtgaggagaagggggaaaagaagagagattttttaaaaatcattaaactatctcttagaaaaatggggatacttggttacagtgtgactaaggaaattttatttggcttttatttaaatctaagtagccacttgtggctagtggctgtcattggacagaacaacttatgagctattccactcatttctatgttcagtcaaagagatataccttgttcacagtttattcaaatggcagtgatacccatttgaaacaagaataatctatagctgccaggcctgagctatcagtttatcagctccacctacttttggaatactcagtgatgacttacagtcatagaaagagggtttgtaacctcccaaggagttcaccttgcccgctgcctagacagagctggttcatcaagactgggcaattagaatggagaaagagtaattcatacacagccagctgtgcaggagaacggaattttattattactcaaatcagtctccccaagcattcggggatcagagtttttaaggacaacttggttggggaagccagtgagccacgagtcctgatggtcggggatgaaatcataaggagtcaaagctgtcttcttgccctgagttcctgggtggggggcgctgcaagatcagatgagccagttcatcaatctgagtggtaccagctgatccatcaagtgcaggggtcaccaaatatctcaagcactgatcttaggagcagtctagggagggtcagaatcttgtagcctccagctgcatgactcccaaaccataatttccaatcttatggctaatgttagtgttacaaaggcaatctagtctccaggcaacaaggaagtcagccccgggaaagggctgttatctgtcacaaaccacaaactataaactaagtttctcccaaagttagttcagcctatgcccaggaatgaacaaggacaacctggttagaagcgagatggagtcagttaagttagatctctttcactgtctcagtcataattttgcaaagatggtttcagatttgtcaaattaatttccatccacacttgttggagtctcatacttgctcatggtgtgctttgtcctgatgataaggagaaaaaaaataacttacattttctccccagaggcctgccttagagtaggctccgagagtcctctttactctgtgtaattctagcggatccatcctgatcctgagatacatcagcactggggataccttaaaaactgtggtaactttggttattaaaggcattttccatccattcaagtttcctacttccaagaaacctctactttaaagctgatttcgcacatgaaaacaaaatacaaacacttctctgcactcctgagaaatggtctagagagatctaataccagttcatgtgtagtcgtccttgcctaaaaaaatctcacaacttacaggttttcagaaaagtgggagattttattgtcctgtctgggagtgatacagtatggaattttctatttggtacaatttagaatgtagctcccaaagcctttgacacttagtatattgtttcataggtaattgtttatgcttctgcctcttcactagacttttcttcatttacccaacaaatattgagtgcctactctgccacactttgttctaggtgttgggagcacagcagataacaagacagagagggtcccccaggaaatttattctctagtggaaggaaactgataataaatgagtaaaaacaatgcaagataatttcagataatgttatgtgttatgaagaaaataaaaatagggtaatgtgacagagtgatggggggctctctttagatcctgtggtcaagaaatgcctcagatgaggggaagtttgagctgagctctgaatacaaagttatcagctctgcaaagccaagaacagcctagggtagcaacagatagaaagtctgtgtttaccactagagcaggttgtttatttccttttgataattgcttttatttattttttctttttttagagacagagtctgactctcacctaggctggagtgcagtggtgggattatagctcactctaacctctgactcctagactcaagtgatcctcctgcctcacccttcggagtagctgttacttttggtgtgcattgccatgcccagctaatttttttcatttttgtagagatagagtcttgctatgatgcccaggctggataattgtatttttagtgctcaacataattcttggcattgaataacagcaacaacaaaaataagtaatattcgtatcacaaataagtgtaccacatgtttatttgaattatcttggttagttctcacaagatacaagccagaggaagaaattaagagatgctaaataacttggccaaggatttacagtggataagtggcaaagcaaatactgaacttaaccaggcttcatgactccagaatctatacttctaaccaaccagtgagtctcgtggagcaccagtatctgcggtgcttcctaaaaatgcggctttctagcatcaagccaaaccagctgaatctgaatctcagagggtaggtgctagaaatctgaattttttttttccaagatggagtcttgctctgtcccccaggctggagtgcaatggcacgatctcaactcactgcaacctcctcctcccgtgttcaagcaattctcctgcctcagcctcctgagtagctgggattacaggcacgcgccaccacacctggctaatttttgtattcttagtagagatggggtttcaccatgttggccaggctggtctcaaactcttgacctcgtgatccatctgcctcggcctcccaaagtgatgggattacaggcgtgagccaccatgcccagcccagaaatctgaatttctaataaatccaccagatgattctatgcatactgaagtttagaaccactgtgctttgttgaaagattgaacgaagccaagtttgttggctcacccctgtaatcccagcactttgagagcccaaggcagaaagatagcttgagccaaggagtttgagaccagcctgggcaaaataacaagaccccatctttacaaaaactaaaaaaaaaattagctgggcacatgtagtcctagctacttagaagactgaggcaagaggaccccttgagcccaggagttcaaggctgcagtgagccatgatcatgacactgcattccagcttaggtgacagtgagaatcagtctcaaaaaaaaaaaaggttgcatgaaagagacaagtcctctgctagttgaactactttgtaccacatctggcaaattcctaagcccctaaactctataaatgctggttctcctaaacgttaagtctttataatgatcagcttaacactgtgttgctacaaagaagaaatctcagaatcatctgggtcctgcaggaaggctaaagaaaaatgctttgataaacccctgtgcaccagcattctctcacccatcctccaccactccccagtctggttttttttgtttgtttgcttgtttgtttttggtttttgagatggagtctcactctgtctctcaggctggagtgcagtgtcacaattttggctcactgcaacctccgcctcctgggttcaagcaattctccctgccgcagcctccccagtagctaggattacaggtgcctgctaccacacctggctaattttttgtatttttagtaagagatggggtttcaccatgttggccagactggtctcgaactactgaccgcaagtgatccacccactttggcctcccaaggtgcagggattacaggcgtgagccaccgcgccccacccctagtctggttttaactaaggggatgatctgaaatctgacagttccagggaggtcaggccctgtttaccggtacaagcaaattcagcagccagcctcaagatttagctcctctgctgagcaaactgaagtgcactcaggacctctgggccaagccagccttatctccctgtccccgcatttacataccgaaaggagacctagccttattggtgagtccttcaactgttatcctccaaactgagggtgacctggagttgagctatattttccctggaaaataggttggggtcagagtcaacatcagagcagagatatgcccattttggcagatgtcatataggtttaggtttgccagagaaaatacaggatgcctacttatgtcccaaatactgcatggcccatacttattctaaaaaagtatttgctttatttaaatctggaatttacatttaactaggtgtcctgtattttagtttcgaaatctggcatccaggccctttgtaggagcattcaaccaatggcgttgtctccacaaacatttaagcctcttactagaaggaacattaacaagggtcgatttcaggaggacacagttacaatgggaagcccaaagagtgggtgcgagcgtgcaggcgtagttctaccactttttagttatgagagaagggagggctgtcggagctcctgcaaggactcccccaaatgtgtgaccaggattactgtcccattctgagaccgtcagagacatctctgccgggacacatgccagtgattgaaaacacagcaagggccccactagctgaaaccaagttgcagagttttgagggtcccaccgccgaccgccggcccgccgcgagccctgccccctgcgcggccacgcccccttgctccccgcggcctcccgggtcagctggtgctggcgtcaggcgctgggcgggctcgccaggacctggcaaggcttgtttactatggccgatgatctggagcagcagtgagttaatcctgtccctttctctctttctctctctctctctgggccatgatcctgggactgtctgtggctgaggaacagttgtagacaccttcccgctcttccttttccaggtcggcctccggggagggcggggggtgggtgcgttgcttgctttgcatttgcccagaagaggcagcggctgagcctggggagccatgggagacgcgctcgcccgcagcccggggatcctggctttctaccttagtcctcgcgagtgcccctcattctcctctggcctctggagagattccatgttgatgtgtgagatccccgaaagcaagcttgtgggacgcgggtgcggaggtagcagccaggcgtgctcgtctcgacttgccccccagaacggcagtcgtggggatggagagagcctcctccctccgcccggcaaagagaagatgtggagagactggagaggtctccatcgcgctgaaattggtgtggaacaacgggcttgcaagtttctttagctgtcgcccaccgagacacgtagccgcatgtgatcctagttgataatgcttttaataatcgtaacaacatctttaatgcaatggtttcagatttagagctattgggatttgctaccactctttcaagggcatcaggtttgggataccacctgtaggtggtgtgactagcagttcgcaatctgacaggagtaagaaaaagttgctacgagaagaatgactcagctcccagccgagccttggtttcaccagaactgggcctttcctggacccagtaatcctgtttttcagacctgtagaactggaagtccggggaactaattaactttatgaccataattaatagcttgctgggcttgaaagaaatgtccaggggaatgttttactttctaagatgacttttccaagaggaaatttgcaatgctttaaaggacttagggaggcagaatattagagctggaggacatgcaggtagttcagctcctttttaaaaatgaagaagctggtgtccatagaaattaggagacttgcccaagatcacagaggtctagaacaggattctctcccagcacagaaccccttgtgcttcacccccatcaagttgacagagaccgtcctagccaggttaagttcatggctgaatgtcttttctgctccttgcctcaatttcccaccccagcccttacctcccgcatagttttgagcacatacagtgtgccaggcaccatttccagtgtttacttgtaacatttttggtgaagaaggaaagcaaagtaattctcccaccaaggactctctgctgagcagtctatgatgctgttccttgggtagcgtttctcctgaactctgctttgtacagtaacaggacaatgtgggatccaggtgttatgatctgacttgtcacagtctgtgatttagagagaaaatttgtctcttaaggctgacaaaatcctgtggtcttggtccccgtgcttcaagcctacaaggaattccagtagaatattaaaaggattctgagtctccctaggattagatcgattgatattgacaactctcatctggctaaaaccattgatgtatcactcccagctgcaaccccagtttttctttcaaacttcaaacatccactgagagttgctacttgcaaaacactgggaatgtagacaacttatgatttagctggggggaaagaaagttgattgggagtttgtgctaggcaatattctatgtgctttagatgcattaacacttttaatctttatagcaaccctatgaggtagatattattacctcccttttaaagatgaggaagctctgacacagaaaagctaaataatgtgcccacagtcacattgctggtaagtgacagtgctaaaattggaactctggccttcagagtttagatcacacctcccttgagaaaacagacataaatgtaaaaatgtggttatgttctgtgaatatttgtacatgaccttgaaaagctgaggctggaaggttcagggagagaaacctggatttgagataaggggctctagttctggttctttttttctaacttgtatgacctctttgggcatcagtttgctcatctgtaaaatacagaggctagactagttgattcctaaggaaacatcctaatctaaaattctgtgcttcaaatgatgtatcaggatgcccagtgtgggccaaggggatttggtaatggttcccctcactcccccttagagtgccctaccttgaatatgccagtgttcacaggcccttcctatagctgtagatatctgtcctgtaactcaggcagagttcaagaaaagagaaatatcatatggggttaacaaggaataatacaaactgtcattcattgagcatctcatttgtactgggcatcttacaagtgtccttacatatacagatgctcaaagacaggttatttaatgggccaaaaccattctactcatcaatgataacactatgattcacgtccagcaggggtgtgtgtgtgtgtgtgtgtgtgtgtgtgtgtgtgtgtgtgtgtaattccaaagctggtgcttttaacctctaccttgcaatgacttaaggtccctgggtatgaaggagaaaacaggatgagttatctgtgttaccgcatgtcattagaggtgaggacataggtgagctttctactcattttacaatctagaaaacaagaccagagggaacctgtgtcctgtcagtgaaccataacagaacttgaatccaggtctctcacctcctcctccctgcctaccccatctccatgggttggactgattgattacctgagagatcagttgggcacaacacagtattccacacttctaggggcttggaagagggcatacataaacaccaaccagtgccctgccagtagggcagatggcatgggaatttgtcctactgttaaggaacagctagtactggggacagcaaaggataactgaaacattagttaaaagatgcctctccctttaatctccttgaacataaattatgataatcagtaacaaggagaaattagaaagctgagataataaatgtgacagagctttgtaaactctaaagtattatatacaggatgttctgaatatctattgaaacaaggggcatgttgttaatacccatttaccaaaaagaaacaatctatcaggtagctagggaactgctgcctgccatggggggcaggtctctcaaggctaggaaacaccctgcttcctgagaactcttttgtaactctcagcaaggctaagagcatcaatgtttctttccaatgttgccaatgagtgtctctgtctcctcctcccaggtctcaaggctggctgagtagctggctgcccacgtggcgccccacttccatgtctcagctgaagaatgtggaagccaggatcctccagtgtaagtagaatggacagcttgtcccacctccctcatggagcccaagaaggattcaggatcttcccagagcctgctacattgagcccactgattcctaattaacagtgtgtatggggtgggaggaaaggatgtcagttgtgtgagggaagaggtgcatacagacggcaccatatctgataatagtgcttcctcaccatctccctagccatgtggatagttcctgccacttcctgcaacttcacctcaaaccctatgccagtgccggctaacacacacaaacacgtacattctccccttcctccttccttctcccccatttctctcttcctcccctcctctcttctcaccacacaagtacttcttagatttaccacctgcagatccttggccagcaatcttgcattctctgatgttacgattcctgtgttctacctggttttggccccccacctatctggttaccacagtagtttgtggtttgcagaccagctgtcatcggcactgttacattgcagcagggcatcccactagcggcagcagccactcgctcaaacaagccccttaagccacttcttcccatatttcccttatgatcttcaccacacccctactgccccagccatagctaccctttctcttctgggcccgagtaagtgcagacaaacagcagccagagctctcaggcctctgtccaggatccaggctgctccacccaggcagctcttcccgggagactgctgtcacaccagcagaacaagcactgccccacctcagtctctcacccgaggctcagtccacacccatcactccctccaactggctggaccacagttctgtccatccatcaagccccaagcacacacaggttcaagagcaatagatgcaagagctctgtggggttggtggtgtcactaccacctggggctaaagggagctgggcacgctgtttcaagggataagacggtcccgcttattatgtacagactacatggtctgtaaatgtgattggagttgaattctttagagtgtgtagtgttaaagaaaaagtgattctgacagattaaatcggtaaagatcattcaaaactactgcaataggggagagagatcaggctcaactcttgaatacattaaggactagtggggatttataaccaagcagcatggtgaggggggtcagtggatagaaaattgctgaggagatatcaaagataaagggagatatcaaagataaagggagttcttttcaaaccagtttaacaggatcattgctgaaggaaggtcaaaggtgagggatgaggaacttgatcaaatatgaaggaattcttactaactgatgtatgacttactcatcctgactttgcaggattcttgctaagactgagctagacatttggaagacaggccaggggccaaggtcaaagcctagtcaagaagagggctcagaagggcttgcctaaagtttggttaaggagagagttgttttcagtggtcagagggttgtgagaggaaggagctgagggaagttggggagggttcgggaatggagagaatgtgaagagtggtagtccaggcaaaatgatgatgccgtcaggaaacacttattgacttaccatgggattctttcctccccaggtctccagaataagttcctggccagatatgtatccctcccaaaccagaataagatctggacggtgactgtgagccccgagcaaaacgaccgcacccccttggtgatggtgcatggttttgggggcggcgtgggtctctggatcctcaacatggactcactgagtgcccgccgcacactgcacaccttcgatctgcttggcttcgggcgaagctcaaggccagcattcccaagggacccggagggggctgaggatgagtttgtgacatcgatagagacatggcgggagaccatggggatccccagcatgatcctcctggggcacagtttgggaggattcctggccacttcttactcaatcaagtaccctgataggtaataaggagatggctccatccctcgtgacctaattcctggccttactgggaactttccagtattcatttccaaacttctctcattcccaggcgatttaaggggctatggcaactaccagagaatataatgtgtcttctcctctttccgcctttaacatagagttaaacacctcatcctggtggacccatggggctttcccctccgaccaactaaccccagtgagatccgtgcacccccagcctgggtcaaagccgtggcatctgtcctaggacgttccaatccattggctgttcttcgagtagctgggccctggggtgagtagcctgtagtatctccttaaaggaaggctataacgttctagaaggcccacagtgtctttcccacttattcctaaaaagtggaaattggcctagccttgttatttaaagctgttaatctgaaccagatcactttgttcaaggtttgagaaggttttttgtttttttgttttgttttgtttttttgagacaaagtctcgctctgtcgcccaggctggagtgcagtggtgcgatctcggctcactgcaagctccgcctcccaggttcatgccattctcctgcctcagcctcccaagtaactgggactacaggcacctgccaccatgcccggctaattttttgtgtttttagtagagacggggtttcatcgtgttaacgaggctggtctcgatctgacctcgtgatccgcctgcctcggcctcccgaagtgctgggattacaggcgtgagccaccgcgcctggcctgttttttgttttttgtatttttttctcttcatcggcatgggaaaagcttttcctatgccaggaacaggtggagcagaatagctaccagagtctcactctgtctcccaggctgatgtgcagtggtgtgatctcagctcactgcaacctccgcctcctgggttcaagccattcccctgcctgagcctcctgagtagctgggactgcaggtgtaccccaccacacctggctaatttttgtgttttcagtagagacggggtttcaccatgttggctaggctggtcttgaactcctagcctctagtgatccatccgcatcagcctcccaaagtgctgggattacaggcatgagccaccacacccaatctgtgtgaaattttatgaaaacctgctggtgattcatgcccagtaaccactggatcccatccctgtggttcacccaacacctgcagcagggagaggtcagaaccaaagcctccaacataacccacagtggcaggcaagcccctctgaaccatgcacttgtccaggcaagcaccacatcttcacctgctctgtgtcacctagcacttggtagctgtcagcaaattctgtgggtaaaagggagaaaaggaggtggaggaccatggggagctagccataatgaatagtatcaatatctccagccttctgacctcacactgccagcacccttctccgctggggagctttttactctgatgaagtgcaaagcagaaaagtgcaatcttttccaatggaaaagattggtgatgcctgtcttgtactgatgattgtgcttacagagtaatattcaatagccaattattatgagttaattgctgatggctaagtaagagttatctctctaggtccttcaagaaaaacagaatgattccagataaagaaaaaaagcatttgattagaagataggagtttaggagttctgagagagaggaaggataccaagacacgggtgccaaaggacagtaagtgggcagaggctcccagcaccgtggtctccaacagagtctatagtcctttgccaaaaagaaggtctgctcgagctactctcccctattctcacctctggccaggctcatgcaggagcatcagagctatcatagttggggaagttggccagcagccatgagggactatgcaggagggagggccaggcccatgcagatcctcatggcacccccaacccagccccttcttacctccctcttgcttctcataaacagagagaagaccagagagaaagagagagatcagggatcagaagttgaccagtagacctcatttttacagtctgttgttgcatgtatgtataccataatgaggtgaaacgaacagattgttgtaaaacagtgccctgagtctgagacacgattgtgtttagttcacctctccacatattctaatacaggcctgaaaatgagagcgctgtcgggaggtggtctagttccatccgctaccatcagaagattaaaaggccataagggtgtctgggagaaggagaacatagctcaggctataagagaagagcatctcagccatggattctgatggggagggcttgtgattcttgcagggaaagatctcggggcttcattgagctgaaaacaacctggctcctcagtgttgttagattgtctctaaattctctggtaatgagctgactttgtgatttgaagtcacctggaccttcccagtagattcctgcactctttctgccgctgtagtgttaaatgaataaagcaaacaaacccttaggagaaataaggtttagttaaagttctcaaaacatacacaggcaggagtcttccctgccccacctcccaaattggcctgtctgtgtttttctatcccctcccagggcctggtctggtgcagcgattccggccggacttcaaacgcaagtttgcagacttctttgaagatgataccatatcagagtatatttaccactgcaacgcacagaatcccaggtgagggccgctccccaggccagcttggggcagacagttgttaggagataaaactcttagctgctggagttctgggctttatttcttcttcaacaaagctctgactcagttaggtaaacacaggcactagcaagcctgatcatttccagagagttccccagggacagacacaaaggaatacagaagataatagattaattaaacatgctgcccatctctagaggaaggccctccctgttccctacaggtatgcaattggcctgatgaacaagagtctggaaaatattaatattttaaaagatttttttaactgaaaaattgatacaaacatggtattttttttctttttttaggtcaaaaataattagcaaaaacatgatatttttcaaaaggaaaggaagtcttctcctgtcccgggcctgtagtccctacatttccttattatttccagtctaacatagcacatgtaccatttcttcagagggcctccatgtacatattcctttgtacacacatgtgactgtatctgttgaacacattactaccaatagaatttctcaatgaaagagcatgcattttaaaatttaattatgtgcatttgaaatgccttatcattgagacagaaatttttttgcatctttgggagatttgggggtgtctcgagaactttgaaaagttcctatctggggctgcttatttacacagcaggccccacaagcctacctacctgcagtttgggcaccgtggatggcagggcagtcagggaggtaatcctcttatgtggaagtgccctgtgactggctgataccacgaggccatgttggtgacaccccgagctgctgggaggtatctcagcaaaggcaagcttactgccctactcctttctagggctgtccaagtcacttgttgggagcccaaagccatgagaaaggcagagatttgcattccagcaatactgtctgaacattaacctcaaaccccaacagctgttgggcagtgtgtgagctgtctgtccagcattccacatgagctcagctaattgaagaaccctgatcaaacagtagtatagaaactcccagctcagcagtcaaatcaggttcccctgtcttcctgccgttggcccttctctcagcccccatgggctcagtgcctgtctcatacccacctgaggccccacaggcccagccctagccctttccccagaactttccccatcccagacctagttctgtacaatgtcctcccaacctaagccacagagtatataagtttataattcattcacatcccagaggaagcaaaggtgacatcagtgacaaccagctccctcacccccaaacaccgtcactcaattttgtaactccctgagttttttgactttgtaaccctgacaagctcatggtaactcttatcatttccttggaaaacatgaaatttgaccaacatgtttgagggtatctacttcatctcacctaaacttaggggctttgtatatatttttattttcctaatgatgtcctagtgaagtaggtataatactctacatttatagatgaggaaactaaagtatattctggttacatgacttgctaagaaaacacagctgaggatttgaattcatttgactccaaattccatgctttttctgccgtgctgcagtatcttaaggaaaaatttatttctgatggcctgggcagaactcaggttccctttcatctgtacatgtaaaagagaatggagatctgatggtactaaacaggccaagcctaggaggcagcagtgtccccaacctgccctatctctagcagaagctgcagaccagccccagaaagctggctctgccccagccttgtggacacctcatgatacggcctcaattcattctacctgagcaaatgaccggggagtgaaatagattacattggcatttgttgtttcttgcttaacagaaactgctgctcccccagcccttggaagactgatttttaattccagagtcttctcaggaagccctttttactactatagtactcacttttaagcgttcacctcagatgaacttctgaccatgtctctagacccccaacaggctaaatccccagtctgtgttttcatagcactcgaccaccttttcatccttcttgggaaattttaagttgttttttgtttgtttgtttgtttgtttttgagatggaggtttgctcattgcccaggctggagtgcaatggcacgatctcggctcactgcaacctctgcctcccaggttcaagcgattctcctgcctcagcctcccaagtagctgggattgctggcatgcaccaccatgcctggctaattttgtatttttagtagagatgggtttcaccatgttggccaggctggtctcgaactcccgacctcaggtgatctgcccgcatcagcctcccaaagtgctgggattataggcatgagcctccatgcctggctgttcgtttgtttttttgagacagagtctcgctctgtcacccaggctagagtgcagtggcgtgatcttggctcactgcaacctctgtctcccaggctcaagcaattctcctacctcagcctcctgagtagctgggattacagaagcgcaccaccacgccccgctaatttttgtatttttagtagagacagggtctcaccatgttggccaggctggtcttaaacccctgacctcaaatgatccgcccgcctcggcctcccaaagtgctgggattacaggtgtgagccaccgtgcccagcccaagaaattttaaattaaataacaattaatcatatgattagttacttaatgcctacctccctaacacatgagctaaagtgtgtgagctccaggagggacagcatcctgcctttcttgttcatatgtcccctttcccagtccagggcatgacagaatatttgttgagtcaataataacccatttcattctcagattcttggacagttcgtactgccatggggtttttcacaagtgttcctccgaactcttctgtgatgggaggcctctggaattttggtcttcccctaatcttaccaatatttaatgagcccagtgtggggctttgacaggaatacaaaggtgactaagattctgcctcagtctctgaagagaccaacaagttgacatattctgctgtgaagtttattgctgttttgcttttgacagtggtgagacagcattcaaagccatgatggagtcctttggctgggcccggcgccctatgctggagcgaattcacttgattcgaaaagatgtgcctatcactatgatctacgggtccgacacctggatagataccagtacgggaaaaaaggtgaagatgcagcggccggattcctatgtccgagacatggtatgttgcaccacccaaggagtggaaatgatgactgagagtcaatcacctctcagccttggggtagagaagggtgatcaaggagaaagaggaatggacagactgagatagagcagtagatttgagaagtttggaaactctctttggaatatcttttttttttcgtgatggagtctcgctattgttgcccaggctggagggcaatggtacaatctcggctcactgcaacctccgcctcccgggttcaagcgattcttctgcctcagcctcccgagtagctgggattattagcatgcgccaccacgcccagctaattttgtatttttagtagagacgaggtttctccatgttggtcaggctggtctcgaactcctgacctcacgtgatccgcccaccttggcctcccaaagtgctcgtattgtactaccttcattaggggcttcctgcttttagcccagttcagctaaaaggctggttcttgtctagcagccaggcacctgctgctactccagcccccatgtagtttctaccccaaaaccagagccatgggcagtagagtgaatagtagaggctgccatgaagcttccccaccacacctcctccccttttttcttacccctctccgccatgtgccaatgagtgtgcttaatgaggctgggtgccaaccatgggcccaggtttactggacctttggattaaatgagcagatcagtggtggggctaacacagaaggaaagacacagtgaatgtttatcaagtaagtagaatgggaaagcattggctgtcaaaggaaaataccaagatccaagcgagaaaggtggagcattatctctgataagagctcgtgggtggcaggcaagcaagtctaaggggaaaagaaatagcgtgaaggcttcccagcaccaggaataaaaggccatcccacccctgcgggttctctctccacaggagattaagggtgcctcccaccatgtctatgctgaccagccacacatcttcaatgctgtggtggaggagatctgcgactcagttgattgagctgctctctgaagaggaagaggagaaagccagagagtcactcttacctccctgtctgcttactcacccactctgtcctttcctcaccaactaacatgtgccagccaggcagagtcttgtgctgttcccagaacaggacgacagtgaaaagaacactcttgaccctacactgaaggctgaaggcagaagccacaagaggccttgagtgccacccccagggaagaacataaagggttgcacaatgccacccatccactccttgccaagtgttacccagatggtggaggatgtgaagggattgcaccaagccacattcactctctctgtggcctttcttcctctgggcaaagaagggcttccagtggcctttcctcactctgtagtgtttgtggggataggttccatgcaagaacaccttcctcctccatcccccacttcaccccatcccataccagttccatccagggtctgcttaactgccaagagcaggtcctggagttcccttcacctgcagagtccttttcatgacctaggaggtcttattcaaagccctcattgacagaggaggaaacaggccaaggcaggacatggctggaccatggtgatacagctctgtgtgattcaagttctggcagagcttgtaaggctagagcccaggtctgccgacaccctgtgcttgttgcacacttgatttgctaaggctggagacaggcaccattgccatggggctggtcctagtcactggccgaggataagcccgtccctgtcccacattctagccccactatgcgggggtgctgttgtcctgcctgtgtctcatccccagctgcctaagctagggacactcaagtgcttccttccttgccccatcttcctcccaactggaggcctctgagcctcccctgtgccttgggccctgaagccccatatgtagtatagagcaaaggtggctcctggtgaagagagggtggaaaggcccttcagccccagggccatgtctgggttctccatgcccatcagtctctgcagtttctctacctgcccccagagctgaggccatctgcaagcccctgcccatggcccaatggggagcctccagccacaagttccctgtccttatcagccactgggtggttcccactgcatgaccctctatccctgccatctgtccccatggtttccagctcaatccacccctgacccatctgtcagctttttcccagggagccgtttcaggggttctgggcagtaggctgggcctggcctcagaacctggtggctcctgcctgctccttcacttttgtaaaaccatccccttcaccagaatggtattaactcctggtgctttgtactactggtccagctgccttgggctccttttctatattaataaagaaacgagtaaaaattaccggtggggatgatgtttaaaattgctctgatcactggtggtgctgaattcgcaacagcctgtgtgatgcctgagagaagggagtcctgagggttgcctgcctacccacgactccttctccttttagtgtggcgtttgcccgctagacccagcccagagtccaggtcagcacaggccctctcagccaaccactcatgacaaatgaggagtcgagatccacagtgtggatggggcaagccccagttcacagtagagaggtggagcttagtacttcctgctgcccattagacaccctttcttcctaagttcaagggaagcccacacatgtactgctccctgcatcctgctctaacttcctctcatcctctggatctcagctcaaatattccttatgcagagatgccttcccctgattccctaaactagactcggacccctctgttctgcatctctgtggcatatcatctgccccttttgtaaaacttataaacttgtggttacttgtttagcgtctctttcctccccagaccataagcaacataaagacaaagggtacatctagcacatagttcgtgttcaataaatgtttgttttcatcatgccacgggaagtgagatataccaagtattcaaaaaagtgttcaaatcattactaacagtgcttgctctgtgctggctgagtccagctgggcccagaattccacggttctaaatggcgcatattccatgtgcataggctgattgaaaatgtattaaacctaaatttttaaaaaaaagcacatgatactacacatgtcatgatgaatgaatagacagaactcctcctgaatataattacaaagttctgatccatctcaggaccctgtgtcttctctgaggatttttatagggaggagaaggcaggtatatagagcttactacatgccaaccactagggctgcaatagtgaagaaacagagagtgtctgcctttgtgagaaattccagttcactcaaagagatgcacctagtcaaaatattatgtaaatcaatgtaaaattgctaaagtgctacccgtgagaattgagaaaacctcctgcagaagtgatggcagctgtgcctgaaggcaggaccagggaaaggggaaggactgtctggagagaggggcgactgcacaggcaggtggctgggagagaagtctggtgagatcagtagggaccagctcagcagatcctctggccacatgaagaatgttgtgttcattctaaaaagcaatggaaggaaatgaatgggggtcagggtggggtagggagtgtgacaaaatcagcctgagattgaaagagccattctggctgctctgtggagttcagatgagagggggatgagaactttgaggctgctgcagtggtccaggccagagctgatggtagtttggacttggctaggggctaatggacacagagaggggaaaaatgcaaaagatgcttagatggtaaaatctaaaagacttaatatcaacactgcatgaccctaccaccctcttgaagaacgggccaagtgaggcagtggttaccaaacccagtcacataacaaaacaacctgggggtatttttttttaaatatagattcctgagctgtattccctagagtttgatctggttaacctgaatggagtctgaccgtgaaatctacatttaaacacattcctaggagattctggtgccctgtgtctgcaggaactggtctaagggactctgtctctgacatttgacccagaaggctgggtagagtagggcctgtgcccctgagagttcattctgcttgctccagaatcactttttttttttggaggtagcacaacatgctgatctgctttttccaactcaacacgaggcaaacacattcttcaggagcagacgcaagaagagtctgagaaaggtcacccagagtcccctgtttatactacatggtctgcacgcatgggcacaagccagcacgcagacacacaccccatctgacaggaacattcctaacattccactaggtgggactaagaaattactatgaacattctacccaatcagcacagtttctgggtgggcactaaggatttatggtgacagtttgaaccataaatccaggctcctcaaatgcctagcagtttaaaaggagagattccacagacagacattaaggactgtgactcaacttaagacccaggtggtactgcagtattcagcgactagcagaaaatgtgctaaatttaacttcctcctcggtatagacaccaaagtatgtgtgctaaaaatgtagtctggtttcattgccaaaacggtggtgaaatcttgatgagtacctctttccattctgatccatgaccctgcaggtacagttcatggccagatagaaaagactcctactctttttttttttttttttttttcactctgttgcccaggctggaatgcaatggtgcagtctcggctcgctgcaacctctgcctcccaggttcaagcaattctcctgcctcagcctcctgagtaactgggaccacaggcacccgccaccatgcccagctaatttttgtatttttagtagagatggggtttcaccatattggtcaggctggtctcgaactcctgacctcaggtggtccacccaccttggcctcccaaagtgctaggattacagatgtgagccaccgcgcccagcctaagactcctactcttaactgataacaaacacaatgtccaatgaatggtgcacaagattttttctcattttgtgacttttcaattcatacagagtcctcggatgaggtctggagggtcctttctctcagtctcccttccttttctgtccttcctcagggtcctggtctatctggcagaagcaagaaagccacttgagattctgagggtctgtctcaaccccatcctggtgaaatatctcaagataaacattctcctctcgctattataatattgacggttttttgctgggcgcggtggctcacgcctgtaatcccaacactttgggaggccaaggcgggcaggtcactaagtcaggagttcaagaccggcccagccaacatggtgaaaccccatcactaataaaaatacaaaaattagctgggcgtggtggcaggcacctgtagtcccagctactcgggaggctgaggcaggagaatcgcttgaacccgggaggccgaggctgcagtgagccgaggtcacaccactgcactccagcctgggcgacagagcgagactctgtctcaaaataataataataataatattgacttttcttttttatactttaagttttagggtacatgtgcacaacgtgcaggtttgttacatatgtatacgtgtgccatgttggtgtgctgcacccattaacttgtcatttaacattaggtatatctcctaatgctatccctcccccctccccccaccccacaacagtccctggtgtgtgatgttccccttcctgtgtccatgtgttctcattgttcaatgcctacctatgactgagaacatgtagtgtttggttttttgtccttgtgatagtttgctgagaatgatggtttccagcttcatccatgtccctgcaaacaacatgaactcatcatttttcatggctgcatagtactccattgtgtatatgcgccacattttcttaatccagtctgtcattgttggacatttgggttggttccaagtctttgctattgtgatagtgccacaataaacatacgtgtgcatgtgtctttatagcagcatgttttataatcctttgggtatatacccagtaatgggatggctgggtcgaatggtatttctagttctagatccctgaggaatcgccacaccgacttccacaatgcttgaactagtttacagtcccaccaacagtgtaaaagtgttcctatttctccacatcctctccagcacctgttgtttcctgactttttaatgatcgccattctaactggtgtgagatggtatctcactgtggttttgatttgcatttctctgatggccagtgatgatgagcattttttcacgtgtcttttggctgcataaattgtcttcttttcagaagttcatatccttcacccactttttgatggggttgtttgttttttttcttgtaaatttgtttgagttcattgtagattctggatattagccctttgtcagatgagtagattgcaaaaattttctccaattctgtaggttgcctgttcactctgatgatagtttcttttgctgtgcagaagctctttagtttaattagatcccatttgtcaattttggcttttgttgccattgcttttggtgttttagacatgaagtccttgcccaggcctatgtcctgaatggtgttgcctaggttttcttctcaggtttttatggttttaggtctaacatttaagtctttaatccatcttgaattaatttttgtataaggtgtaaggaagggatccggtttcagctttctacatacggctagccagttttcccagcaccatttattaaatagggaatcctttccccatttcttgtttttgtcaggtttgtcaaagatcagatggttgtagatatgcggcattatttctgagggctctattctgttacattggtctatgtctctattttggtaccagtaccgtgctgttttggttactgtagccttgtagtatagtttgaagtcaggtagcatgatgcctccagctttgttcttttggcttaggattgacttgacaatgagggctcttttttgcttccatatgaactttaaggtaattttttccaattctgtgaagaaagtcattggtagcttgatggggatggcattgaatctataaattaccttgggcagtatggccattttcacgatattgattcttcctacccatgagcatggaatgttcttacatttgtttgtatcctcttttatttcattgagcaatggtttatagttctccttgaagaagtccttcacgtcccttgtaagctggattcctaggtattttattctcttttaagcaattgtgaatgggagttcactcatgatttggctttctgtctgttattggtgtataggaatgcttgtgatttttgcacattgattttgtatcctgagactttgctgaagttgcctatcagcttaaggagattttgggctgagacgatggggttttctagatatacaatcacgtaatctgcaaacacggacaatttgacttcctcttttcctaattgaataccctttatttccttctcctgcctgattgccctggccagaacttccaacactatgttgaataggagtggtgagagagggcatccctgtcttgtgccagttttcaaagggaatgcttccagtttttgcccattcattatgatactggctgtgggttcgtcatagatagctcttattattttgagacacgtcccatcaatacctaatttattgagagtttttagcatgaagtgttgttgaattttgtcaaaggccttttctgcatctattgagataatcaagtggtttttgtcgttggttctctttatatgctggattacatttattgatatgtgtatgttgaaccaaccttgcatcccagggatgaagcccccttgatcatggtggataaattttttgatgtgctgctggattcggtttgccaggattttattgaggatttttgcatcgatgttcatcagggatgttggtctaaaattctctttttttgttgtgtctctggcaggctttggtatcaggatgatgctggcctcataaaatgagttagggaggattccctctttttctattgattggaatagtttcagaaggaatggtaccagctcctccttgtacctctggtagaattcagctgtgaatccatctggtcctggactttttttggttggtaagctattattgcctcaatttcagaccctgttattggtctatcagagattcaacttcttcctggtttagtcttgggagggtgtatgtgtccaggaatttatccatctcttctagattttctagtttatttgcatagaggtgtttatagtattctctgatggtagtttgtatttctgtgggatcgctggtgatatcccctttatcattttttattgtgtctatttaattcttctctcttttcttctttattagtcttgctagcggtctatcaattttattgatcttttcaaaaaaccagctcctggattcattgattttttgaagggttttttgtgtctctatttccttcagttctgctctgatcttagttatttcttgccttctgctagcttttgaatgtgtttgctcttgcttctctagttcttttaattgtgatgttagagtgtcaattttagatctttcctgctttctcttgtgggcatttagtgctataaatttccctctacacactgctttgaatgtgtcccagagattctggtatgttgtgtctttgttctcgttggtttcaaagaacatctttatttctgccttcatttcattatgaacccagtagtcattcaggagcaggttgttcagtttccatgtagttgagcagttttgagtgagtttcttaatcctgagttctagtttgattgcactgtggtctgagagacagtttgttataatttctgttcttttacatttgctgaggagtgctttacttccaactatgtggtcagttttggaataggtgtgatgtggtgctgaaaagaatgtattttctgttgatttggggtggagagttctgtagatatctattaggtccacttggtgcagagctgagttcaattcctggatatccttgttaattttctgtctcattgatctgtctaatgttgacagtggggtgttaaagtctcccattattattgtatgggagtctaagtctctttgtaggtctctaaggacttgctttatgaatctgggtgctcttgtattgggtgcatatatatttaggatagttagctcttcttgttgaattgatccctttaccactatgtaatggctttctttgtctcttttgatctttgttggtttaaagtctgttttatcagaaactaggattgcaacccctgcctttttttgttttccgtttgcttggtagatcttcctccatccctttatttcgagcctatgtatgtctctgcacatgagatgggtttcctgaatacagcacactgatgggtcttgactctttatccaatttgccagtctgtgtcttttagttgtagcatttagcccatttacatttaaggttaatattgttatgtgtgaatttgatcttgtcattatgatgttagctggttattttgctcattagttgatgcagtatcttcctagcctcaatgatctttacaatttgtcatgtttttgcagtggctggtaccggttgttcctttccatgtttagtgcttccttcaggagctcttttaaggcaggcctggtggtgacaaaatctctcaacatttgcttgtctgtaaaggattttatttctccttcacttatgaagcttagtttggccagatatgaaattctggattgaaaattcttttctttaagaatgttgaatattggcccccactctcttctggcttgtagagtttctgccaagagatcagctgttagtctgatgggctttcctttgtaggtaatccgacctttgtcgctggctgcccttaacattttttccttcatttcaactttggtgaatctgacaattatgtgtcttggagttgctcttctcaaggagtatctttgtggcattctctgtatttcctgaatttgaatgttggcctgccttgctagattggggaagttctcctggataatatcctgcagagtgttttccaacttggttccattctccccgtcactttcaggtacaccaatcagacgtagatttggtcttttcacatagtcccatatttcttggaggctttgttcgttttttttttttattattcttttttctctaaacttctcttcttgcatcatttcattcgtttcatcttccatcactgataccctttcttccagttgatcgaatcggctactgaggcttgtgcattcgtcacgtagttctcgtgctgtggttttcagctccatcaggtcctttaaggaattctctgcattggtcattctagttagcaattcgtctaattttttttcatggtttttaacttctttgtgatggatttgaacttcctcctttagcttggagtagtttgatcatctgaagccttcttctctcaaattgtcaaagtcattctccatccagctttgttccgttgctggtgaggagctccattcctttggaggaggagaggcacactgatttttaaagtttccagtttttctcccatctttgtggttttatctacctttggtctttgatgatggtgatgtacagatggggttttggtgtggatgtcctttctgtttgttagttttccttctaacagtcaggaccctcagctgcatgtctgttggagtatgctggaggtccactccagaccctgtttgcctgggtatcagcagaggaggctgcagaacatattggtgaacagcaaatgttgctgcctgatcgttcctctggaagttttgtctcagaggagtaaccggccgtgtgaggtgtcagtctgcccctactggggggtgcctcccagttaggctactcaggggtcagggacccacttgaagaggcagtctgtctgttctcagatctctagctgcgtgctgggagaaccactactctcttcaaagctgtcagacagggacatttaagtctgcagagatttctgctgccttttgtttggctatgccttgccctcagaggtggagtctacagaggcaggcaggcctccttgagctgcggtgggctccacccagatcgagcttcccggccactttgtttacctactcaagccttggcaatggcgggcgccccttccccagcctcactgccaccttgcagtttgatctcagactgctgtgctagcaatgagtgaggctccgtgggcataggaccctccaagccaggcacgggatataatctcctggggtgcagtttgctaagaccattggaaaagcacagttttagggtgggagtgacccaattttccaggtgccgtctgtcacctctttctttgactaggaaagggaattccctgaccccttgcacttcccaagtgaagcgatggcttgccctgcttcggctcacgctcggtacgctgcacccactctcctgcacccactatccaacactccccagtgagatgaacctggtacctcagttggaaatgcggaaatcacccgtcttctgcgtctctcacgctgggagctgtagactggagctgttcatattcggccatcttggctccaccccaagtgtttttcatagtataagttcagcattgttatgctagacagatctttgtcatcatcctgctaaatatcactcttcactagggttaaggaggaaagaccttcctcattcctggagagaatactaaggaggattaacagatgtcagcaggtgcacagagtctgttccccaacccacaaggaccccattatcttggttggtgactctgctaaaggcctaggagatctgtagacttcaccttactgatggctgatgctccttcttcctggaatattctgaggcctaatggagagtttgtgataattcagcaaccacatattttagttggtatatatgtgtcttagtctgtttcttctgctataaaggaatacctgaggccaggtaatttataaagaaaagaaaacctgtcagttctgcaggctgtacaagaagcatggcatcagcatctgcttctggtgagggcctcaggaagcttccactcatgctggaagggtaaggggagctggagtgtgcagagatcacatgacaaggcagcgcaggccagagagaaacaagtgaggtgccaggcttgttttaacaatctctcccaggcactgctagaacaagaactcactcataaccacacagacagcaccaagccattcatgaggaatctgccccatgacccagacacctcccattaggccccatctcaacattggggatcaaatttcaacatgagatttgaagagtcagatatccaaactataacaatatgagaacaaatcacacacaaccagaagaatcctgagacatgctagtggctgaaaaggatcctgaaggatatggcgttagaggtgatattttcatcttctcagtttgaccagctgacaccatgtgttgtgtctgggaaaagaatttttgagagggctcacaacttatgatagatttatgggcctctgataaattatgaggtaactaacacaaaaactgggcatcatgtactttctaaaatgttcaaggaaagtgtccaaatgtaactgcaaaaccatatattatagcagtggcttcctacatagatccacagactggagctggtccatgataaagtatttctggttcataacaaaatagtgcctttttttttttagtatttttaaattctgaaattatatcctttctaaccctttcaggattaaactattgttattttataaaaagatgctgatattctacgattgtttgggggtgagagggaatgtcattttttgtttccaaacatatcaattttagaattttttcctgtatttgtaattaatattattaaaatcctaaagtctggggagtgctggctatattacagaagaccagagtgggagaggaacttgaattttatgacaagaagatagataagtcaatcatgtggatcccatgactggaggggaccgtggaaagataacgctgttcagaggaagtgaatctaattgaagggactcaacaatagcatgtatgccaaaaaggaaaccacagaactgaaggtggaaatgtttggatggggataaaaggagaaacaaacagaaatagatactaagataattggaggacacagatgctgctttcttagttcagactgccaaacatcaaaagcaagttacagtagtgccagaggtctccaagaatcaggacactaacatgagtctctttctgccagaagcagagcacctagtaaattcttgctctactcacaattgcgtttactagaatattgaaaaaagattgtcagatgtaatttttatagatttcaggaagtcagatttcagaatgttccaaggaaaattatctatagtgcttaaaagggacagggcattctcaaacatgaagtttcaattgtatctcaaagggtcctgctgaggaagaatgaagcggcttcagcaatcagaaagcggctgcacaggttgttttctgatatgatcaaagtgtgggcagagatgaatgtcaagtctttcacatgagaaaaatgaacctcggccgagtgtggtggctcacgcctgtaatcccagcactttaggggactgaggcaggaggatcgcttgagcccaggagttcaagaccagcctgggcaatatggcaagactccatagctaaaagtaaaaataaaaataaaaaatttaattagctgggcatggtggcatgtgactgtagtcctagctactcgggaggctgaggcagaaggattgcttgagcccagaagttcaaggctgcagtgagctatgaagctatggagtgccactgcaccacagcctgggcaacacagtcagaccatgtctccaaaaaaaaaaaaaaaaaagatagaaaaaaatgaaccaaactagtaaagcaatggcagttgatgtgaaaagattaaaccgatgtgaaggttttagtgggctagaagctctgtttatggcagtaaaggaatgaagctgccccaaaagctaatggaaagctaggtctcattccctgcattgattgggggactcaatggtttcactgtaacctgatttgagtgttgggttcaattctgagaacatttttcctttttttaaatgtaaacaaaaatttttaattgtacaaaaataagacaaaattaaaaacactttttaaaaaatctataattatactacccacaaataaccatgttaaatacattggaatatattctttcagatgatatatatgttattatatacataaatgtatatttactagaatgagagcatactaacaaagtgctttataaaaatttttaaccttattgttataaatctctttctataccaataaatatagaatccatagaaatatatcatcatttttaactgttgcatcttcttccactgtctggatttactatagttcatttacctgcttctctgttcttggactttaaattgcttccaaatatttgtatgttataaacaatgtgcgctaagtcccttgtacgtacatatttgcatatttgaccaattatttccttccttgaggtaagattgcaggattgaagggtttgcaaaatgaagctttttttttttattttgagacagagcctcactctgtcacccaggctggagtgcagtggcgcgctctcggctcagtgcaatctccacctcctaggttcacgcaattatcttgcctcagcctcttgagtagctgggattacaggcacacatgaccctgcatggctaatctttttgtatttttagtagagacagggttttgccatgttggcgctggtctcgaactcctgacctcaggcaatccaccctcctcggcctcccaaagtgctgggattacaggcatgagccaccacgcccggcaaaataaagctttttgataagcaatgagaatagtttataacaagtgatcagaaaaagaaaagcaacccagagaaaaataaatgttttatttttgtgtacatggcaagaaatatgaataagtaatttacagaagaagatatgcaaatgaccaatgaatgatcgcttctcggccttttggctctgataaagtgtacaaatgaccaatgaagccggaaccagtggctcatgcctgtaatcccagcactttgggaggccaaggtgggtggatcacctgaggtcaggagttcgagaccagcctggccaacatggtgaaacctcgtctctactaaaaatacaaaaattagccgggtgtggtagcaggttcctgtaatcccagctacttgggaaactgaggtagaagaatcgcttgaacccgggatgcagaggttgcagtgagccgagatcatgccattgcattccagcctggatgacaacagcaaaactccatctcaaaaaaaaaaaaaaaaaaaagaggccagatgtgttggctcatgcctgtaatcccagcactttgagaggccaaggggtggatcacctgaggtcaggagttcatgaccagcctggccaacatggagaaaccctgtctctactaaaaatacaaaaattagccgagcatggtggttcatacctgtaatcccagctactcgggtggctaaggcagaataattgctagaaccagggaggcagaggttgcagtgagccgagatcctgccattgtactccagcctgggtgacaagagcaaaactctgtctcaaaaaaaaaaaaaaaacaccaatgaacatatgagaagatactcaacctcactagcaatagaagaaatacataacaataagatactattttttacatgcaggttgacaaaaattttaaagattgacaatagctagtaatggcaaaaagtgaagaagttggattttttatacaatgttggtgggagaggaaattgtttccacatttttggaggcaacttggcagaatttatcaaaataattactgaaatttaaaatggtcctacactattagccataagtcctaatagcaggaatttatgccaaaaaaatttagcaccagtaacaaaatagaagaaatgtgtgttcattggttataaatgtgacatctaaaaatgaattatggaattttatgggtactgtaagccaaaaataaaattctaagcaccccgaaccaactaaatgggcccctcctctcgaccaagggcattctaaagtaaacttgaaacactagttcaggccatgatgagaatgggtggtcagacatgcctccttaaaccttcctccctttggaattcaggcacagctgaccagcattaacattaaaacagtcttataccttaagacaggcagcacagattcttggtagcaataagataacaatatgcagaccaagatagcaggccctgaaagaaaccgagtattttgctccaaaatatattgctttgacatattttgaaatggccctgcaaagctgtctctttaagtctgatgttctctctgaagcctgctacctgaagacttcatctgcataataagaacctcagtctccacaacccatctgaacccagacactcccttttattaattccggggctttagataaactctcggccaattgctaatcagaaaatctttgaattcacctttgacacggaagcccttcttcgtccccaccctcctcaatgcctccaccctcaaccgcctccctgctttgagttgtcccgcctttccagatcaaaccaaggcacatcttacatgtactggttgatgtcttatgtctccctaaaatgtataaaaacaagctgtagcctgaccaccttgggcatatgtcatcaggatctcctggggctgtgtcacaggccgtggtcactcacatttggctcagaataaatctcttcaattattctacagtttgactctttctgttgacagtattgacatgggaagattttaaaaatcaagttgcagacaattcatataacgctttcttttttgtaaaacaaaagttatatgtgtgaatatgaatgaatatatacatatatagtataagcatcctaggctgggcaaggtggctcacacctataatcccagctactcaggaggctgagacaggagaattacttgaacccaggaggcggagattgcagtgagccaagatcatgccactgcactccagcctgggcgaccgagcgagactccgtctcaaaaaaaaaaaaaaaaaaaaaaatatatatatatatatatatatatatatgtttaactaacaatgttgactgctacagaatggaattggctggcaggacttttcatgttttactttatacacttctgtactggctaaaattttacagtgaatgtggattttcataattaaaaatattaaaaacaaaaaagttttccaaaattgattctaactttggtttacacctgtgatgtcagtttcgggaatgaggcccctcagacaggaatcaggtctgctcaccttgttttgtagggatcctgaacaaacatacgccaaaattggcaaagcaggcggacgcaaagagcattggcagaatgtctcccgcccctcctccaagcctcagggctgcgtaatggcaagtgcaaattcaaaataagtggcttgtttttctctgctgaaaataaaggaagaaacttctccctcttccctttccttacacatttacctcaaaaaatatatgagttctttctctgtctctttgaactataaataaaactttttaaatgttaactaatcctctgaacagcattacaacccaggaatgtctttcttaaggacctgggaaatatctctttgaaatcatcaaggaagatagcacctgtatgtcccagtcctggtgggaggggaggaacctcttgctcctaaactacctcctgttataaagatatgtaaagtttatttttccttgtcataaagccaattagatagaacagatgattcaccccaattaccaagtgaactgaggacaaactgtgtgtgacaagtggggttgtcaagtccttttacttgaggactagttgttgtttatctagagaaaatgtatggaattaattttattaatatgtctttataaaagggtgaaatttctttccgtctttgcaatctttttagaaaattgcctgtgatgagcattatattctggtttaatgcttattcaataataaaactgttttatttgttttctttttttattattattatactttaagttttagggtacatgtgcacaacctttgtggggcagttttctgggctgggaatagattttgtttttaattctatttcccaacagctacagagtgtcagacccccttgtacaccttcagaagccaaggccacccccggccccctaggttctgccagctgcatcctggagaaactctctggagctactgggagagtaaatggaggccacaggcagatgcaggctgtggatgccacagatatattaaagaataaaaatcatgtcatagactagagaggtctgtgacactttgacatgctcccccaatccccagactttctgggactggaccactggccatctctaaggctctgttttctaaggagtttacagcagaagctacctcccacttggtcttggaactagaatgagtgtagaattgggagcaagtacagacagctaaggcaaagtgtgcaagcagatgaacttttccctcatgcccctttccctgtatctgaacccattaccctttcctgatgctcactgcccctcagggggtcctcctagtgcctgcaggcttcttcctcctttctaaggggctggactgctttatttagtgggaatactccaacccaaatccaagctaaaatttacattttcaaaaaggacttttgataactgcacatattttcactttatttagtaaatacttactgagcatatctggtatgtgaaacactgatgtaggtttctgggagaaagggtaggagacccccaaattaatatcaaccaatcttctgcactgaaggggatttgctatttcttggggaagatgttacaggtagtcaggcatgagtggggcaggagagggctatcctccaccaactaggaatgtcaggtgatggttcaggatttgtcacattgcctctctaaaagtgataaattggcagccagggagacgccattatcctgagggtccacacctgttgcactgaagtgttaattgaatacagatgccaggaagaagcatctttttgggcatgcatattaagagacaaaatggcggagtatgaccttccaggggcactccaccggaaaagggaagaaagcctcagttgggcgtgggtacaacttcctaaacacaatgtgtgtgctcacttcccaagggtaagggaggcactgcacgtgcaggcagcacaccctaagggaagaatcatgggaaaggggccagcctatagagtcctaggatcaaggttaaacactgcactttacctcggtgcccacttggatctcttccaagcatactttcctttctttgctgttctaaagcctttttaaataaacttccacccctgctctgaaacttcccatggtctctttttccatcttatgcccctcagtcaaattctttcttctgaggagacaaggattgaggttgctgcagacccgtatggattcgcctctggtagcctggatgccttccactgctaacatatttggtgctgtgagactcaaatatttgccacccctaacaaagacagacaaacaaacacatcaaccccacaaagcatgaaaaggtctataagaaggaagtgtttgctgtgggctgagaatggaactgctaggctaagggttcaccagtggaaacttggacgtatgttgctggttttaaatccaagcttagaagcttttggtcagtggtttgaaagacttctgagacagtctatgagttctcaaatattttaagtgaaacacttctggtagaaagagcatgggttctgaggccatctcagagtcttacacagggaatcacagaggtctagcttcttcctctccactaatctgatcctagagactcacagaaatctccaaagaagactgagcctcacagtctaactgctttgccagatgtacagtaacagtgggcttcctctagaggcacaaggtgtcctcacaagccctactagccaaagagtctaaatcttggggcttcgggtccactcaaagaagcagagtctttggcacatgcaagacatcctcagtttctacagctcccattcctggcctgcaaatccccaacaacgctccgtttacctgagctcacctttcatcatctgttctcatgggatctagttttccactttgggaggattgtccttctgcttagacttaaaaatgttacatgaaatttcaaggttgtaagaactgagagactgaatataaaagtggacaacagccagaccatatataacaacagaacactgactcagaaactccgaagggaccctcaagggaagccaaaccacaaccaaacctctgaagcacttggcccagaatggccaagacttgttcgtgactgctcactttcctgttttctgaagctcccctccccttccacacttctttcaaactcaagaccaatcacataaagtcaaatatgcttcccaaaccaatcccctaagatgtcctgcttctagtttatcagagaacctgccccattagtcacttaggttcttttctattttccctaagcatcggctggtttgagaaataaagggacagagtacaaaagagagaaattttaaagctgggcagccgggggagacatcacatgtcactaggttccatgatgccccccaagccacaaaaaccagcaagtttttattagggactttcaaaaggggagggagtgtacgaataggtgtgggtcacagaggtcacgtactttacaaagtaatagaatatcacaaggcaaagggaggcatggcgagatcacaggaccacaggaccagggtgaaattaaaattgctaatgaagtttcgggcaccattgtcattgataacatcttatcaggagacagggttttgagagcaaccagtctgaccaaaatttattaggtggaaatttcctcttcctaataagcctgggagcgctatgggagactggggtctatttgacccctacagtctacagaccataaaagacgggcacgcccaggggggccgtctataggactacactcccaggcgcgtactctctttcccagggatgttccttgctgagaaaaagaattcagtgatattcctcccatttgcttttgaaagaagagaaatatggctctgttccccccggctcaccagcggtcagagtttaaggttgtctctcttattccctgaacaattgctgttatcctgttctttttccaaggtgcccagatttcgtatttgttcaaacacacatgctctacaatttgtgcagttaacacaattatcacatggtcctgaggtgacatacatcttcctcagctgacaggattaagagattaaagacaggcataggaaatcacaagggtattcattggggaagtgataagtgtccatgaaatcttcactatccacattcttctgccatggcttcagccggtccctccgtttggggtgcctgacttcccgcaacactagttagctcacctccagcttccccatgccaaaatcctccagtcagggaatactcgggcctttccctttttttctactatgaagctttccactcccctgcctgcctttgactctctgccaaatgcaagtgatggtggctgactcccctgatatagctagctctgaataagtggcatctgtgctcatttaagtagtcttcatttatgtccacagaactctgcagcagttccttaggtatgcatgtgtccttctgaccagttccacgcagagcataggggttaatttagcaaagtggatgctgcagcactggcggccaagcaagacaagaaattaaacctcagagattctgatgatattgaaaagctggtttgcactgagctgaaccacaggcccagagtgggtccaagtaagcatcccagacagtgtttgggcaccaagaattcagactaggaatgcagttaaaaacagattcttggctgggcgcagtggctcatgcctctaatcccagcactttgggagaccgatgtgggcagatcacgagttcaggagatcgagaccatcctggctaacacagtgaagccccatctctactaaaaatacaaaaattagccaggcatggtggcacgcgcctgtggtcccagctactcaggaggctgaggcagaagaatcacttgaacccaggaggcggaggttgcagtgagctgagattgcaccactgcactccatcctgggcgacagagtgagactccgtctcaaaacaaaaacaaaacagattctttccaggtgtatggagccagaaaaggggagaagctatgccttgtggagagataatgaactttgtagtcaagctgctttttggtcacaagaatctaagaccttctcaagatagctcaataaaaagggatttcatttacaggtacaggcaaaacacatcaaatccaggaataggaatcaaaattctaccagctccagccctaggaagtcatgagagaagagggctctttgtgttgtgcctttgtgttgtgagtgggctgtcatctctctcttctctgtttttctctatacatcaactgcattctctctgaggggcagactggtttcctctaattattcatcagcttgcacctggcacccaaagtggccactccagccaccaagcctatttctgcttccaggggaagcatcacacttgtgtggaataatctctgtgttttttgcttcaatttctcaaaaaagtcgtatctgtttacacagctcctctggtccagccaagccacacaggtcataggtcactggccagtctcttaggtgtgcaagtgtccctgcaggtgatgggttatgccttcagtcagattatccatccatggatcaatcattagtggctaggggaacagggccatgtcttacataacgacatgagcatattggatattatgaacatgttctattacagaaagcaatattattaaataacacagatgacatgcacccaacacaatcattgcaaatgcccgaaaaaaaaatggatatgatagtggattagagaataatgaaggttatttctaaaaagatcctgcagaggatggaaagaaagagggtccgtgcagagaagttcaggaaggacttcgtgtcaagccgatagaacagttgtgttcgggatccataaagaaatggggccaaacatgttaggactttaggaggaaataggctgcatggcccttccattcttacaatattcagtgtggatggggcttagagatcatcaagtccagccctgttgcacttcagctgagagtactgagagtcagaatggctggtgacacagctgcggtcacagattaaagtgaaaaccaaggccagcgttcaagtctctgtctccgcagtcagtctttccactatagactattcagaattccttagctagctcactctttcactaaggcagctcctctctttctaacactggagctttacagaatagacacatggtggagaagagcaagcccttccttggtggtctttgttggaggataatctgcttctcagcactgccctcatcctcttttcaaaaactcctcgaaccctgacccacacatccctgaggactccctgcactgtgtcattcctcagagtatatataaaggggttgaggaatggagtcaccacactgctcagaaccaaagggatcttgttgatctccagatattctttctgggagggagtcacatagataaacacagtgatgccactaggaatgatgactatggtcaggtgggaagcacaggtattaaaggccttcttccttccacttgcagaaggaatgcgcactatggtcaagatgatgtacgtataggaataggccacgaggactatgcagcagaggatgaccatggaagaaagcataaaatccatcagctcgatggcagtggtgtctgcacaggccagggccagcaagggtccactgtcacagaagaagtggttaatgatattggagccacagaagggcagctgggagatgaggatggttggaaagagcacagacaggaagcctcccacccaagagaatacaacggtcccaatgcagacagaaggtctcatgatggtggtgtaccgcagggggcagcagatggtggcataacggtcataggacatgaccgtcagcaggaggaactcaactgtgcccaagaaaaagtagaaatagcactgggtgatacatccggcaaaggagatggttttatccctagatcctaagttggccaacacttttggagagatgactgaggtgaagaggatgtccaggatagagaggttgcacaagaagaagtacatgggggtgtggaggcgggagcaggacagcacagtggagatgatgagcaggttccccagaagagtcagcaggaacgtgggcagcaggagcaccaggagcagcagctccacctccctgctcagggaaaaccccagcagaacaaactcagtcaccgctgcagtccagttacccatgggcctggtgggcctggctcaattctcctaacagaacaaagggagataacacttaagagagtgttcagtggatgaaaccccatggctgctcactagaaaaatatgaacatagaacatgatgactgccagctagacgtgtaatgcaagtttagcttggctttcaattatttgcctatcaaaatggacaaggtttttgaaaataataatgtacactgtcagcaagggtgtcctgagacctatgctgtcatataggtcatatgaactttctaaaagataatttagcaatgtgtgtcaaaaaccttaaaattaagcaaattcttagatttggaaattgtacttccatcctgaggaagtagtcatggatatgttaaaaagattttgccacaagaatattcaccacagaattttttacaataatgaaaatttggcaacaactttaatatccagaaatgggagatgaaataaacaaattatggtacctttaagaaataacacattatgtagccattaaaaattatattttacagtaacatataaatgacaaaacattcaaaatgtattattaagttttaaagcattattttaagcattatttaagtatttattattattaggttttaaaagtgtttttaaagcaagttacaaacttgtaatgacattgtgatgccattttgggggagagatgtaaattagcaaaggtcctagagtagccaagaagacattgctgaagaagaaagtcagggaaggagcttgcattggcagatattgagacttataaaattggaatgattaaggcaagatggcattggcacaaatatacataaaaatgaccaatggaacaaaatacagagccaagaaacagacccacacagatgtggaacagtgatatgtgtcagaagtgaaagaagctggtactgctgcttgtccataggggaaaaagtaaaattgattcccaatctcatatcagacactaacatccactccagatggacaaaaaacttttgtgtaaagatcaaaacttttagaagaaaagatagaagaatgttgtttttggcctcagagtagaaaagaacctactaaataagacccaaaaaagtgctaaacagaaaagaaaatattaataaattaagctacattaaaatgaagaatttctatttattaaaagagccttcaaataaagttaaaggcaaatcacaaacaggaagaacatatttatgccacagataatggacaaactttagtactcatgtaattaacattttgattcatacaaagcagtaagaaatagataagcaatccaatagaaagatgggccaaacatgctacctgaactccattaaagaggaaaaataaatgtacaaaaagatgcttgatctcattagtaattaaggaaatataaattaagacactagcgccctctccctctccctctccctctccctctccctctccctccacggtctccctctgatgccgagccaaggctggacggtgctgctgccatctcggctcactgcagcctccctgcctgattctcctgcctcagcctgctgagtgcctgcgattgcaggcgcacgccgccacgcctcactggttttcgttttttttttttggtggagacggggttttgctgtgttggccgggctggtctccagctcctagccgcgagtgatccgccagcctcagcctcccggggtgccgggattgcggacggagtctcgttcactcagtgctcagtggtgcccaggctggagtgcagtggcgtgatctcggctcgctacagcctccacctcccagccgcctgccttggccccccaaagtgccgagattgcagcctctgcccagccgccaccccgtctgggaagtgaggagcgtctctgcttggccacccatcgtctgggatatgaggagcctctctgcctggctgcccagtctggaaagtgaggagcgtctctgcccggccgccatcccatctaggaagcgaggagcgcctcttcccggccgccttcccatctaggaagtgaggagcgtctctgcccggccgcccatgtctgagatgtggggagcacctctgccccgccgccctgtctgggatgtgaggagcgcctctgctggccgcaaccctgtctgagaggtgaggagcgtctctgcccggccgccctgtctgagaagtgaggaaaccctctgcctggcaaccgccccgtctgagaagtgaggagcccctccgtccggcagccaccccgtctgggaagtgaggagcgtctccgcccggcagccaccccgtccgggagggaggtggggggggtcagccccccgcccggccagccgccccatccgggaggtgaggggctcctctgcccggccgcccctactgggaagtgaggagcccctctgcctggccagtcgccccgtccaggagggaggtgggggggtcagccccccgcccggccagccgcccagtccgggaggtgaggggcgcctctgcccggccgcccctactgggaagtgaggagcccctctgcccggccagccgccccgtccgggaggggggagggggggccagccgccccgtccgggagggaggtggtgggggtcagccccccgcccggccagccgccccgtccgggaggtgaggggtgcctctgcccggccgcccctactgggaagtgaggagcccctctgcccggccagccgccccgtccgggagggaggtgggggggtcagccccccgcccggccggccgcccagtctgggagggaggtgggggggtcagccccccgcccggccggccgccccgtccgggagggaggtgggggtcagccccccgcccggccggccgccccgtccgggagggaggtggggggatcagccccccgcccggccggccaccccgtccgggagggaggtgggggggtcagccccccacctggccagccgccccgtccgggagggaggtggggggggtcagccccccgcccggccagccgccccgtccgggagggaggtggggggatcagccccccgcctggccagccgccccgtccgggaggtgaggggcgcctctgcccggccgcccctactgggaagtgaggagcccctctgcccggccagccgccccgtccgggagggaggtgggggggtcagccccccgcctggccagccgccccatccgggagggaggtgggggggtcagccccccgcccggccagctgccccgtccgggagggaggtggggggggtcagccccccgcccgaccagccgccccgtccgggagggaggtggggggatcagcccgccgcctggccagccgccccgttcgggaggtgaggggcgcctctgcccggccgcccctactgggaagtgaggagcccctctgcccggccagccgccccgtccgggagggaggcggggggggggggggggtcggccagccgccctgtccgggagggaggtgggggggtcagccccccgcccggccggccgccccgtccgggaggtgagggaggcctctgcccggccgcccctactgggaagtgaggagcccctctgcctggccagccgccccgtccgggaggatggtgggggggtcagccccccgcctggccagccgccccatccgggaggtgaggggcgcttctgcccggccgcccctactgggaagtgaggagcccctctgcccggccacgaccccgtctgggaggtgtgcccagcggctcattggggatgggccatgatgacaatggcggttttgtggaatagaaaggcgggaagggtggggaaaaaattgagaaatcagatggttgccgggtctgtgtggatagaagtagacatgggagacttttcattttgttctgtactaagaaaaattcttctgccttgggatcctgttgatctgtgaccttatccccaaccctgtgctctctgaaacatgtgctgtgtccactcagggttaaatggattaagggcggtgcaagatgtgctttgttaaacagatgcttgaaggcagcatgctcgttaagagtcatcaccactccctaatcttaagtacccagggacacaaacactgcggaaggccgcagggtcctctgcctaggaaaaccagagacctttgttcacttgtttatctgctgaccttccctccactattgtcctatgaccctgccaaatccccctctgcgagaaacacccaagaatgatcaataaaaaaaataaaaataaaaaataaaaaaaaaaattaagacactagcaagataccattttatacccactatattgtcaagaagcaaaaatatgacaataacaagtgttgacgaggatgtggagacttaaaaaatttacactgctaggtgaggagcccctctgcctggctgcccagtctggaaagtgaggagcgtctccgcccggccgccatcccatctaggaagtgaggagcgcctcttcccagcctccatcacatctaggaagtgaggagcgtctctgcccggccgcccatcgtctgagatgtggggagcgcctctgccccgccgccccatctgggatgtgaggagcgcctctgcccggccgagaccccgtctgggaggtgaggagcgtctctgcccggccgccccgtctgagaagtgaggagaccctctgcctggcaaccaccccgtctgagaagtgaggagcccctccgcccggcagctgccccgtctgagaagtgaggagcctctccgcccggcagccaccccatctgggaagtgaggagcgtctccgcccggcagccaccccgtccgggagggaggtggtggggggtcagccccccgccaggccagccgccccgtccgggaggtgaggggcgcctctgcccggccgcccctactgggaagtgaggagcccctctgcccggccagccaccccgtccgggagggagatgggggggtcagccccccgcccggccagccgccccgtccgggaggtgaggggcgcctctgcccggccgcccctactgggaagtgaggagcccctctgcccggccaccaccccgtctgggaggtgtgcccaacagctcattgagaacgggtcaggatgacaatggcggctttgtggaatagaaaggcgggaaaggtggggaaaagattgagaaatcggatggttgccgtgtctgtgtagaaggaagtagacatgggagacttttcattttgttctgtactaagaaaaattcctctgccttgggatcctgttgatctgtgaccttacccccaacccggtgctctctgaaacatgtgctgtgtccactcagggttaaatggattaagggcggtgcaagatgtgctttgttaaacagatgcttgaaggcagcatgctccttaagagtcatcaccactccctaatctcaagtaatcagggacacaaacactgcggaaggccgcagggtcctctgcctaggaaaaccagagacctttgttcacttgtttatctgctgaccttccctccactattgtcccatgaccctgccatatcctcctctgtgagaaacacccaagaattatcaataaaaaaataaattaaaaaaaaaaaaaatttacactgctagtgggagcataaatttatataattgctttggaaaataatttgtcattaccttgtaaagatgaacattcacatactctgtgacccaataattctactcctaggtagagaaacttgcacatatgccccaggagacaaacaagaatatgtatagggaagggggagagggggagggagggaaaagagagagggagggagggagggagggagggagggaaggaaggatggaaggaaggaaggaagcaaggaaggaaggaaggaaggaaggaaggaaagggggaagggaggggaggagaggagaggagggtagaggggatgggaggaaaggaggaaggaagggggaaaaaagagaaggagggaacagtgtccaaagacaggagaataaatcatgatatgctcacagagttgaatatacaataaagaaatgaataaacttcagctcaaccaacagtgagaatgtattttttttttttttttttttttggagacaaagtcttactctgtcacccaggctggagtgcagtagtggtagcatacagcccacttcagactcagcctccctggatcaagtgatcctcccacctcagcctcccaagaatctgggatcacaggtgcatgccaccatgcccagctattaggttgttgcaaaagtaattgcggttttgccattacttttcgtagctatgggatctcactatgttgcccaggctggtctcaaactcctgggctcaagcgattctcctgcctctacttcccaaagtgttgggatcataggcatgagccaccacacccaggctcttcttgatattttcagtatttttttttacaatgaacaaatattccttttatataaaagaagttaagctgggcatggtggctaacgcgtgtaatcccagcactatggaaggccgaggtgggaggatgacttaaggtcaggagtttgagactagcctgggcaacatggtgaaactctgcctctatgaaaaatacaaaaattagccaggcatggtgccatgcagctgttgtcccagctacttgtgaagcaaaggtgggagaatcacctgagcccaggagcttcagtgagccatgatcacacagcactgcactccagcctaggtgacagagtgagactctgaagaaagaaagagagagagagagaaagagagacagagagagagagaaagatgaaagaaagaaagaaaggaaggaaggaagaaagaaagagaagaaagagagacagagaggaaagaaagagagagagagaggaaggaagaaaggagggagggagggaagaaagaaagaaaggggggagagaagaaagaaagagagagagagaaaggaaggaaggaaggatggaaggaaggaagaaagaaagagaaagaaagaatgaaagagagagaaagaaagaaaaagaaaggaaggagggagggaggaaagaaaggagggagggaagaaagaaggaaagaaagaaagaaggaaggaagaaataaagaaaaagaaaaaagaaagaaagaaggaaagaaaattattctaaaaggatatatatatatacatagttggattgaaaatgtatattagcaaacacatattgagtgccaactatgttgtggggcctgcgattgatgaaaggttgcagagatggtaaaaaaaattgcatgccctcgcacagctttcagtctaaaagagatgtgaagaaacctgatttcagaaaaatcacagaaacagaggaaaaattaagggacggcaaagttttttcatggatatttgtcctgggccattagtctggaaagcaaaccaactaccaggaaaactgatagattccagggacaaggtcaaatagggcttctatacctaggaaggactctggatagcagaggccacgtaattaccagtgactaagaagaatacggattggactaggaaaaacaagaataatctagtaaaggaagaggactgcagaaatcccgaggactgagttgacctctgcccatctaagctgagtcagaacatcagccactcctgcacagaacctgtcctcacgacctgccctaccttcctatagccttggcacatggacagtctctccagacaactcaccacatttgcattgccaaggatcttttctttcttaacagctttattgatatataactcaagtaccatacattccacccatttaaaatatacaattcaatagcttttagtgtattcacaaaactgtgtgtccatcaccacaatcaacttaagaatatatatatatatatatatatttgagatggagtctcgctctgtcacccaggctggagtgcagtggcacgagctcagctcactgcaacctccacctccagggttcaagcgattctcctgcctcagcctcctgagtaagctgggattacaggcgtgtgccaccatgcccagctaatttttgtatttgtagtagagatgaggtttcaccgtgttggtcaggctggtctccaactcctgacctcatgatcttcccgccttgacctcccaaagtgctgggattacagggacaagccaccatgcctggcagatttaaggatattttaatgatccctcctccattccctggaaactatttttctactttctgactatggatttgcctattctggacatttcatataaatgaatcataccatatgtggtcctttgtatctagcttctttcacttactataatattttctttatttttatttttaaattttttttagagacagggtcctgctctgtcagtgaggctgtagtgcagtggcatgaagatagctcactgcagccccaaactcctgggctcaagtgatcctcctgcctcagcctcccaagtagctaggactacaggtgcacaccatcacacctggataatttttttttttttttgagatggagttttactcttgtcacccaggctggagtgcaatggtgcaatctctggtcactgcaacctccgcctccccggttcaagcgattctccagcctcagcctcccaagtagctgggattacaggcgtctgccaccacgcccagcagatttttgtatttttagtagagacagggtttccccatgttggccaggctggtctcgaactcctgacttcaagtgatccatccacctcggcctcccaaagtgctgggattacaggcgtgagccaccgtgcctagcctaattttttttttaattagaaaataattttactttttttattttttgagacagggtctcactctgtcacccaggctggagtgcagtggtgcaatcataactcactacatcctcgacctcccaggctcaagtgatcctcccacctcagactcccaagtaactgggactacaggcacacaccaccatgcccggccaatttttgtattttttgtagtgataggggttttgccatattgcccaggctggtctcgaactcctgggctcaagcgatcttcctgtcttagcatcccaaagtgctgagattacaggtgcaggccacttactataatatttgtaaaggttcatctatgttatagcatggatcattgccaaggatcttaaagaaccaatgtagcaggaggaaaggccacagccccaagaagaagccctgacccctggcatggcagaaacacacacacacacacacacacacacacacacacacacacacacacacagagagagagagagagagagagagagagagagagagagagagagacagcagttactaaatgtagatatatgcacagtctgtaaaatctagaagaatagtatggaggatgaatttggacttggtcaccaaatctggaaatggtaggatgagggatcaagacttaattcatttaactctcaaaatacatctttgcataaggtgcaactgcacccactggaaaatcatttcctcacatcagaaatattaagaagcttaatgaaggcaaagatacacacctgagattataacaggaacagctgctcccagccagcccccaaatgccaaacgattggtctgcactcacctcggctagggttgccttatgccacctccacggctcagtctgttcacctgggatttgctgccacctaggatcttccacggtaattatcttgaccaaaaagccacagtgcattccacatgagagcagcagtgtttgacaggtgaaatgagcccttcccaactcatgtggattgttgccttagctgtgacctcttgtccgacgagcatgcacttgtgttgtagacagctggaaggtacatgttggatttttacactgctgaggaagttacaaggtatgacatccattccagcatagagaggtctacaaatcctcttgccctaatcctgagtgtgtgaggaaatcaccttcggttaagcattgaccagctgcacctcccacactgtctacacaatctgatccagttggggagagaaaaggggcactctccactaagctcctggatggtgctttattctcctctcctgctaccatctttcctgcaccctctccagtcttctgctcagcccagtcttctgggtgcttcttgattccagagaaaatgggaaaagaaacactgtgttacctgatggacaacagccatcaacctgcttcttcctctgtcccctcaacccaacgtgcactaccaccaccaccatccccatcatatttttttcagagactggcaggccaagcgtcccaaggactaaacttcctctagggttactgcaggatagtcaaatcctgttgaggggtagctggtgcatgagaaaactctggacttgaagccaagagtctgggttcaagtcccacctgtgccttttaccattcttgagactggaaaaattgcctccattttcatactatctgcaaatgaatcctcatgtgacaaacagcggtaatgctcttttcctcctcttcctcatgaggttgagaagcacaaaacggaaaataagataactcatatgataatcgatcattgccaaggatcgtgaagaacaaatgtatgataattcatatgatgtgtgaaatcataaaacaccatattgctttattttctagaacccctcctattctgcaatactggaaaagaacaaaccttatcttccttgtccctactgagatattgatcatcccaccctagagggaagaatactgtcccttctggctctggaatacatctcatcaggcccatgcttctgccttaatcaactattctccccttggacagcatatctggttggctacaaagtgtgaagacaaagggaagatgcttctctacatgggaatttcggttgcccaggattcctggaaatgaagaaactacttcctgtcctccaccatctgcactctacagaggagtcagtaagctggaagggattcagcgggaggactcagaaatactcacatttgcctaaataaggtagagggggctggcccccagcatatcctgcccacacagctgccccaggcttccgtgctgggcgctgaggcttgcgttgctgcaaacagactctgcactgtcagggctgaagggggcatactctagaagggtcccatgtttggaccccacttgggagggttggggtgggattggctcaggtgagagcatgcactttctgagaaacatccaaacatggggcactcctcaggggcacattacgaagctgtccctgaacaccaagcctgagtctgatgcccctgaggcccacttaggaaaggatgcaaacctaaacatctacactaacaagaactgggaacagaacactagccaagatcaacacccccaggcctatctcagagagcctcacagcatacagtcctccatccaccccctctccagccccactgtgacagttccatccatccctaccactccatttacccaggaccctcctcttcaacatcctaatacactgtgatcaatatgccaaagcttcagtaaccttgcactatgtgaaacaaaaggtcccacactgcatagcctggcactcaagaccccctaatcccagtctcccttgaattaccgcccagactcagctcctgtcttacacatcaccttgcgcatcttttacttcggttgagccactctattcactgtgccccacgctggccctcactttcttactgcacactcgggccccaagtgtcctaccattgggaccatcttctccaccgcctagtctctaggccctactcttgtcccttttcctagcctaagctaggttctccctctttagatatccttttcttgcacttggaatcaggaatccacagtgtagaactggagtgtttttaaccttttttaatttaaatataacacatgtacagaaaagtatacaaatcataagctcaatgaattatcaataaagtgaacacattcatgtaaccaccaccctggtgaagaaacagaatggtactagcaccccagaaatccttctcaagctccctccccacatcccagctgtaaccattatcttgatttctaacaccatggattagttttgcctgttttggaaattcatataaatgaaatcatctaataggtcttgttttgtgtctgacatctttttctcaaccttatagttttgaaattcaatcatgttgtggtgtgtgactcatttttattgccatatatttcatcatttcatttgtggttatttagcctctgggcagatttttaagttccttgggaacagggatttttttcataaaattatttttgaatccccataatgcctaactggaaaagcaaaagttgctcagtatatatgaattttagtccaaaaagcttctaatttcaatctcacatcatatacccccatgaacaggcaatagtatctaacaatttcagcaatttctttttctcacatctcatacccaattcattagcaaatcccactggctctacctttatatatatgtcaaatccaaccacttatcaccatccccattaccctagttcaagtcacaaacattgtagaagaatagataatgaagtaaaaagagtgttgcaaaatagtataaatgacatcatcctttttttttttttttttgagacagagtttaattcttgttgcccaggctggagtgcaatggcatgatcacggctcaccgcaggctctgccacctgggttcaagtgattcttctgcctcagcctcccgagtagtggaattacgggcatgtgccaccatgcctgactaattttgtatttttagtagagacagggttctccatctctggagaactggtctcgaactcccaacctcagataatgcacccaccttggcctcccaaagtgctgggattacaggtgtgagccaccgcgcccagcctctcttttttttgagaccaagtgtcgttctgtcacccaggctggagtgcagtggtgccatctcagctcactgcaacctctgcctcccagggtcaagtgattctcatgcatcagactcttgagttgctgggagcacaggcatgcaccaccatgcccagctaacttttgtatttttagtagagaggaggtttagccatttggccaggctggtctcaaactcctgacctcaagtgatccacccgcctctgcctcccaaagtgctgggattacaggtgtgagccaccatacccagctgattccattttttaaagacatatattaatgcatagataaaagaatataagtatattaactaaaatattaattgtggttatttctgcatgccgggatctattctttcttttttttttttttttttttttttttgagacagagtcttgctctttcgcccaggctggagtgcagtggcgcgatctcggctcactgcaagctccgcctcccgggttcacgccattcttctgcctcagcctcccgagtagctgggactacaggcgcccgccaccacccccagctaattttttgtatttttagtagagacggggtttcaccgtgttagccaggatggtcttgatctcctgacctcgtgatctgcccacctcagcctcccaaagtgctgggattataggcgtgagccaccgcgcctggcctattctttcttatttttatattattgtggtagataggtcaatcattgtgttccccacccagagccctaactgcagtgttcctacatatgagttggccacccatccgattgggtcacaggtaggcaaacaacccaggagaaactaagccaaaggtggggataaatgcagcagatttcctcaagaaattgaaccaagaggcacagaaactatgatagacacctgttgttttaaacattctttcttattttcttctattaaccactacctcattcccttttgggaagcagctccttctccattacacaaaccatgtgattctaatgggactatataatatcacaatataaagccaaagttcatgaaagggaacacgatctattataatatccatcacccaaccacagtgactgatccaaagagtgaccatccaacccaaggcaggccaggaatccctcctttagaatccatatgttggagcagagttaggaaaagctctctcctctgggctcaaaagctgtgatgatgtaaccctgagctgccagtagatctacacccagcctcacccttccactgttgcacggagagagcctttctgctgtctggattcatgaggacaacacaccaatggaaatgcagctaagagacagagatagaatttggacactgttgtgtatgactggatcagtcatgcctgaggcctgccaacaatatcctttctgattgtacaagccaaaaaatcctccgtttttcttaagttcatttgaattatggtcttctgcagtcataagagctctaacaaacacagagactaattagtaagacgctggtgggtacttttctgaaaagttgtgtagagttggggctggagtaggtgccatagcaaaccaaagtgattcctaagctgaagtcataggggagcaaataaaccatcagtgatagtagagaccttgtttcaaagagaagtgtaacagtagcttagactcagagacaagtaatgactgagggaacacgggcccaccggaaaggatggtggcagcctgagctgctgactttcttgttccaatccctgtgtgccttgttcctactcttggatgcccatgagagactgcctgatgtattctttctacaatcttacacatacacacacacactcacatacacacaagactttagtcaactagcttgagtaagcctctgttttttaaattcaaagtatcaatgagtaagaaaatagtgttcatacatcacatttctaatcagaaagttatttttaagatccaaacaaacttttgctctacagaaatttatttaacataaatgacatttataaatttatagattaaggcaaaaattcactttaaaggtcaatgacctttggacaatttctgtacaaggacaatacttccagaaagtttaaggctgtcaaccttattctgctttaactccagccactctcatgtctgccttcccttacttgagcatggtaatgggtctggcaactggctaattataataggcgacaaggatgaatatgttttaggcccaaccaacaattttatgatgtactagcaactctcatgaggatgtcattcataagttggtttttttttaagtactagttccactatataattgatgttttatattagccatctccccctccccacaattgtatatgatcataggaatagaattttgaagatggaaggaccctagttctataacctcctcatgtcacagaagggtgttaagtctaacacaggtcaaatgaatcacccaaggtaacaaaactttgaaggcaaaaactccagctttcttgaccagagcagtatagagaagaaaatcaatgaaagctagtggtacaggcacaggattcatggaagatgtgagattaaaatcaagacttagcctttcaatacagggcaatgagtaccaccagactatgagtagaaagagccaggtactggctcaggctatgccttatccatttatatgactccctgaaggtagaaactaggttttattcttcgtggtattccctacgcccaatatcataacaaagacatgagagaaactcaataaaaaagtgaataaggagtgggtgagtaagtaagcaaatagataggaaacctaatactctggagaagtctatgtagaaaaggaaaaaaagggccgggtgctgtggttcatgcctgttatcccagctactgaggagactgtgcccggaggatcccttgagcccaggagtttgagaccagcctgggcaacatagtgagccctcatctcagaaaatgggaatagagcctcggtgaaagccttcagttaaaaggcaggagaaggagtcaccactgggaacaagagaaagagtagtgagaaagcaaaccaacagaaagccagtggtacaggattagcaagcaggggaggagaaatccaagacgtaggtatgtcagcagtgccagaaactaggaaaaggttatgaaacatgagagcgaaggaaaagtcattggataaaaaatttttaaggctaagtgtctattgctaagcaagactagcagcatattttggctaggcaagaactggggttccagtgtggctgagaagagcagaaaacatccatccccagcctcgcaccactggcatgcttcctgaacccacccctcagaatatctgcttacattagtgcctctatttccacagcaaatagagataagaagagtccctttatatctatttgcatataccaaattatgttaaaaatcaggattctcccaggggtaaaaacggactggaaaaaaaaaaaaaggactggaacgttgatcctcatttagattcaagaacataaaaataggtctgatgtatgcaagtgcccgtagtctgaggttaggttacagaaaaggattatggagcctctaagaaggaactcaccacaagggaagaaggactctgaactggtgagctgtgttcaggcacagctccttaagtacactgtatgtctgcgatcctggcagtgtagagaatcagtgagcatgtgggcatgtgatactggtggacctcttccatgaatgcctctaatactttgagacacagttcatttcactctaaggtcccatacctgtcagaactcacagcatagttaacagcaggcctgtggtttctagaagaggcaatggcaacagtggcccctggctccttcagtggtggtggcagagacccatgaggtgaccaaaaccagctgttgtggtgactcagcccacaacacccatcaagcaccctcctggaacacggtagaccaaagatgctcaataaaagcagcacagctgaatgactgaattcagagaggcatttaggagcaattggtatcaaagtcactgcaaatattgagtagcaatgcaagaaccttccaagtgtcattcctcatctcttccctgtgagaaaagaaaaatagctgaaagcagcctgagctctgtgaggcatgcaaaatttatcaggtccagggacacatgagtgtgggacctcagtcacgcccactgtcccccaccatccccatgaccaggggcaagtgtttaaaggtgttttggtcttgactagctgccttgcctattatcttcatgttcctggcatttgtgatacaaagcacaatgcatagctaattaatagcttatgttattttgatgcaacttcttggcaaacaacttaggaactgcctctttaaaaactcacatgtaactgctgctaactaatctcagcacatagtcagggcaacctgaatctatgcacccaaattgtagtcctcaaatctggcccaagtaaactccctacttttattaattttgtctcagtttttgtcctttaggtcgacacctgtgtcctggatctcagttcactagattaggtcaggaccagtgggttaggagagtgaaggtttcacattccatcagccctggcactaaatgtcaagaagaatagtgccgggctgggcgcagtggctcatgcctgtaatcccagcactttgggaggccaaggagggtggatcacttgaggtcagaagttcaagaccagcctggccaacaaggtgaaactccgtctctactaaaaacacaaaaattagccaggcatggtggtgggtgcctgtaatcccagctactcaggaggctgatgcaggagaatcgcttgaacccgggaggcggaggttgcagtgagccaagatcgtgccattgttctccagcctgggcaacaacagcgaaacgtcatctcaaaaaaaaaaaaattgaaaaattgaaaagaaaaagaaaaatagtgccagggatgcaagtactgccagcctcaaagcacctcgaggcactgatgccgctggcatttgcacacctcagcctggactctgcagcggctgacaggcacgtctgcatcttatcacttaataaacattcattgacacctcctatatcttaggcacttttggtacatgctggaacacattagagaacaaatccagtccttcccctccaggcatttttagtctagagcagaagcttcagagtgttctagcttcagaattgttcttcaattatacaaaaaaggccaggcacggtggctcatgcctgtaatgggaggccgaggcgggtggatcacctgaggtcgggagtttgagaccagcctgaccgacatggagaaaccgcgtgtctactaaaaatacaaaattagcccagcttggtggcacacgcctgtaatcccggctactcgggaggctgaggcaggagaatcgcttgaaccagggaggtggaggttgcagtgagctgaggtcgcaccattgcactccagcctgggcaagaagagcaaaactccatcaaaataaataagtaaatgaataaataaaattatacaaaaaattgtgtgtttatgtagattgagagggagatgagaacagtcaaattctcaaatggctttttgacccagaaaaggttaagagcctcctagttgggaccatccatatccctcatttctaaattcttagcaactaccccagcacttactgacagcacctcttgggcatctctaaccttttgcagtgttcacagtgccttcctcaccagctcgtggcagactcctggtggaagaggagggaagcacacctcattgttgacattgcctcctagttcccggggagctccattccaggaaggaatttaaccagggagtggctgtccctctcttttggataactttgggcttatccagcggacaaaccactgcctattccctgacaggcagactgactcggggacattttttccctgccaaagtactgcttgcttcccaagacttctccagactaaacatccattgactgagatgaaatattacacttttcttttccaaagggtcaaagggatttcagcaaggttcagactaaggaaaagagggctgatttgtgaatacactgggaagagcattttggtctaatggtcttatttctcatccaaattaataacatgtcactcttgagaacatttttgttaatgacgcctcaaaacacaacccacccagccccagactgtgagccttcaaagacaaagacaggtccccggccttcccttggatggccctaccgttctcttcccagatgttttacgagcctgctaatttttgtaagatgtaataaaatatatttaagggagaaaaaatgtactagactgttttaatgagcttgagcatctatatttttgaaaatgtaatgtcaagaagccagggaaagttgttttttaaattaccaggaattttctgattccacttttggaggagactttgtttgtttatttgtttgtttgtttttgaaaaacacttcaatggctttatggcagtaaagccaaaatcatattctcagtagcttaagaccgtgctgagctacacagctcaccttcatgacgctgagatggcctgcactgtgggaagagatccctctctacaggttaggatgtgtcttgagaggtgagtctggggccaccatggggttttcccttctcactgggcctcctgatcagggtccagcacctggcaggggagtcatagcaaatggaccagtgacagacatgagcaaagacactccacgacagaagataagtctcatgataatgtggcagcagaaagagagatgagcagtgggagagaaaaaacaaaataccctatccagatgaatggctggtggactttaagaacaataatctcctatatctcattggattttttccctctttcctacacaatcccctcctgttattccaaagctttcaatgaaacaggggttacaatgggcctgacatactcggcagataatgtcatggcattggtaagagtgtagtagtcaggatgatcagaggtcactctcattgccatcttggttttggtgggtccgcacttggtatgaggaggggcggggaaaacaggagcagttggagaaactcatcacaaggtagccagaagtgaccagcagatccccagaagcagcagggatctgcaggaaatgtaagccttcgctgatggttacatgtgaggggaaccagaaaactgctaaagttgcagtggctgatcacgacaagggcttagactagtaattgtaagcactaaaggaaagggtggcttttgtagaccaaagaaatcagactttggagttagtttcttaaattgtatcaaaacaattcatggccaaatgttgtgaatgttatgaacagtaagatgcaaaggagtttagaagaaggagggagacttaaaggagttcttccccatgatggctgggaaggcttcacaaaagaagaattcgaactagatcttgaaaagggggatcttagaaagggggaggaggagaagaggactccttgtaggagaaatggaaagagctaaagcatgaagatgcccaagtggaaggtgtgctttaagcagggaatggccctgtctgactgaagtcaaatctatattcttgagcatccatccttcatacttcattttgtcagaggcgtttgaaccagagacactccaccttgagtaagggctggataaaataaggctgagatctgctgggctgcattcccaggaggttaaggccttcttagtcacaggatgagaggaggtcagcacaagataccagtcataaagaccttgctgataaaataggttgcagtaaagacgctggtcaaaacccaccaaaaccaagatggcaatgagagtgacctctgatcatcctcactctgatcatcctcactactacactcctaccagtgccatgacggtttacaaatgagatggcaacgtcaggaagttaccctaagtgacctaaaatggggaggcatgagatcctcctcttgtttagcatataatcaagaaataaccataaaaatgggcaaccagcagcccttcgctctgtctatggagtagccattcttttattcctttactttcctaataaacttgccttcactttatagacttaccctgaattctttcttgcgtgagatccaaaaaccctctctttagggtctggatctggactcctttctggtaacaaactcactttaggacccatttttttttttttttgagacagagtctctttcagccacccaagctggagtgcattggtgcaatctccgctcactgcaatcactgtctcccatgttcaagcgattctcccgtctcagtctcccaagtagctgggattacaggcacctgcatcatgcctggctaatttttgtatttttagtagagacgtggttttaccatgttggccaggcttgtcttgaactcctgacctcaggtaatccactggcctcggcctcccaaagtgctaggattataagcatgagccaccacacccggcctgttctttttctttttctttctttctttttttttttgagacagagtctcgctcttgtcactcaggctagagtgcagtggcgggatctcagctcactgcaaactctgcctcccaggttcaaaccattctcctgtctcagcctcctgagtagctgggattacaggcacctgcgaccacgcccggctaatttttgcatttttaataaagaccagtggccatgttggccaagctggtcttaaactcctgacatcaggtgacccacccaccttggcctcccaatgtgctgggattacagacgtgagccaccacgccaggcatttagggcccattcttgaggcccagggatggaaacatattaagctagtcttcacagaacaatcaaagttgttgacaacatcttaagttagccagtgctagcactcagagagaggccagccatcccagaaggacaggaagtggcctagaattcacccttggttttctcatgcctcccttcttagaaggctctcctgtttagaatgccccaaccccctgcaaagtgctgcaaaaagtgcccatgtctttatcagccctaccccacaggctacttgatttgtgacagactccactgggcaagaggcatgttgcctttttaaactgatcaaaaaacattcattcagcacctactttatgtcaagcactcttctgggcacaagggcacagcaataaataggtcaaagtctctgccctcaaggagttttctttctagtagggaagacaaatacaaatatgtaaataaaacatcaggtagtgctatgaacaaaagtagagcaaggtaagggaagagagaataacaaggaggggggtctttttaacagaagacaggaaaagttcatctatggaggtgacactgagcaaaggccacagggctggggccccaggctctgagatgggcgctagtgatgtgcttgaagaacaagaaggcctctatggctggatcaagctcaatgagcatgggggataaagaggtggaggggcagaggaggaattaccctgcagctcctggcccagcatggccacacggtgcacacggctcctgcccatagccataaccccagtggccccagcccttgcctgccatattttcctcaggccttcaacaagactcattaaactttatctaaagttactgtgttctgcagctgggggaaaagggcaaacttccactccttaagttagagcaatcaacagccaagggatttggaagtggctggggccttgttatcttaaggttgtaatgagcctcgtgagaatacccacaacttcgctccagagagggggagcttccctcagcagatccatactcgggattccaagtttcaaaattccgtagaaactgggaagcaatccaaatacaccaggcctgcactagatgcacagagtcacaaagtctccccagaatggcttgtaccaaggctttgtcggggatgttgctctaataatccagcaggctccctggggctgcctgtggctgcgcttgatgaatctcattatccacagttacacttttacctcaagaggaaaggacatgggatgattcactagctgctacctcaccaacacaacccaaaagcaagggtcagagtcctctcatctaagaatttaatattttctggggctagagaagcaggaagctcctgggagcctggaaaccccctccagctgggtgaccaggaaaatccaagagtaagtaactgcttctcagccctgaggtaagttggggcctgtttaaggtagctgagctattggaaaataaggagcgtgtggggcatatcaaagaggatacaatataatcatgctaataaataataataccttggaatggtggctcacacttgtaatctcagctacttaggaggctgaagcaggcagatcacctgagcacaggagtttgaggccagcctgggcaacaaagaaagactccatctctaaaaataaaaacaaaaaccaaaaagaaaaataataatagtcaacacttactgaacacttactgtgtaccattccaagcattttacatgttatttcaacctccaagcaaactctaggagctaggtggtgctattgtaatacccagtccaccaagaaggaagctgaggcacagagacattaaggtacttgcttccaaacttacacaactaattaatgggagagtcaggatttagattaaggtcagaatccagaagtggtatccataggtgctgtgcgtgtggcactctggaaactatcccattgcctaaatatcctggatatagtcagcaacaactaatcttttgcacaaattatttttcaatggaaatgtgcctgccccatgtcttgaagactgcatctcttggaaaagcccatgcttttatttatttatttatttattttgagatagagtttcactcttgttgcccacgctggaggtcaatgacacaatctcggctcaccgcaacctttacctcccgggttcaagagattctcctgcctcagtctcccgagtagctgggattacagtcatgcaccaccacggctaattttttgtatttttagtagagacggggtttctccatgttggtcaggctggtctcaaactcccgacctcaggtgatccgcccgcctcagcctccaaaagtgctgggattacaggcgtgagccaccacgcccagccaagcccatgcttttataagtgccagattggtgcgaactctgttcccagaagaataaagagctgggctctgtaaactccagagtccctccctgccttgtgctcagagtccgatggaatggctctgggtgagatgcaaggcaaagactaattcacagagagaacctgtggaggccaacaggtccactgcaaacagaacttaatctacatccccacatggtactgtctgttgttttcagggcagctggacactgtccagctaactctatagggtcttgtgagttgcagctgccctgggtctatctgaggaaccattctgctgcctcctctctccaatcaaaggaatagccaccctccataggtggcctccaccatcctagacagagagcacctatggagctcttaagcacaatcaaggacaagaagatgcatggtctcctacggaaggacattccttattacatctaagctaagtatttcctgccacctccaacccctccagcatctctgctctccctaaggaaaaacaacagagggcaatgactgtttgcttataacccaatcagtcatggcagaccctctgccttctcttaacatttttgtaacattttttcttctttttttaatagttaaatggatcatttatcctacagtgacaaactgtaaccaaaacaaattgtgaggctctagactcctgacagcaccaaaaaatcaaattgcatttttgtagcatttcttgatgtcctttgtaattatagaaatctaattttttccagcttttaattgcaaaatattcagatgtacagaaaatctttaaaaatagtacaaggaacaacgaagacccatcacctaatttcattttaaaactttaagtaagctaaggatggggcacagtggctcacacctgtagtcccggcattttgggaggctgaagcaggaggatctctcaagcctaggagttcgagaccagcttggacaatataatgagaccttgtctctacaaaaaaatacaagaattagctcatgcctatagtcccagctactaaggaggctgaggtgggggtaggaggatctgcttgagccagggagatcaaggtgcagagagccatgatcatgccactgcattccagcctgggcaacagagactctgtctcaaaaataaataaataaaactattagtaagctaaggataggaggaaatttcaaacattcataagaagcctaattaataattatattcaatgttgaaatattaaaataattctaactacaaaatcagaaaaatataagctccatattttttcatttcatcttggttagaaactgtaattgaagagaaaagctataagccttagttaacaaacaacatttggcctgtgcagtggctcacatctgtaatcccagcactttgggaggccgaggcgggtggatcacctgagatcaggagttcgagaccagcctagccaacatggtgaaaccccgtctctactaaaaataccaaaattagccgggcgtggtggcaggtgtctgtaattcccagctacacgggaggctgaagcaggagaatggcttgaaccctggaggtggaggttgcagtgagctgacattgggccactgtgctccagcctggatgacaagagcaagactccatctcaaaaaacaaaaacaaaaacaaaaaatagatcccattatgtatgagactcaatattagtttattaggttgggaagtccaagatcaaggtgctagcagcgttcgtgtctggtgagggcccagtctctgcttccaagatggcatcttaaaaggctgtgttctcacatggcggaagggatgaaagagcaaaaagggactagctagttccctccagcccttttataaggttgctaattccattcatgagggctctgttctcattatttaatcacctcctaaaggccttacctcttaatactgtagcactggggattgagtttcagcttgaattttggaggggacacaaatattcaaaccatagcacagggttacaactatccttgggactattaaaaaatattttaatattgtaggaaagctctttgaccttttagttggctgatttagacaaatgctcaattctttaagcacagtatacaaaataaaacatagatttaaatttttgagtaactgacatgtaaatgtttttgctgactgtccttatctacctaataatatgaaatgattggtttaggactttcctttctaaaagcatctatgtcagtcccctttctttcaaggcatattgtttaattttttttcttttttttttttttttttttgagatggagtcttgctctttgtcgcccaggctggagtacagtgacgcgatctcggctcactgcaacctccacctcccgggttcaagtgattctcctgcctcagcctcccgagtaactgggattacaggcacctgccaccacgcctggctaatttttgtatttttagtagagacgaggtttcaccatgttggctaggctgatctcgaactccaaagtgctgagattacaggtgtgagccaccgcacgtggcccataatgggatccattgtggatcctccattctactctaccaatttacttgctattttcatgtcaataccatcctgatttgctatgtagtttttgatatgtggcaagcatgtcattgctatttgttaatttttccccacacacacacacacacatgcacacacacacacaaaatccttgactactttgaagcacttatcttttatttaaactgtgtttgttctatacatacacacacatacacacacatacacacacacacaggttactattctaattgtaattgcattagatttaattttgaaggaatcagttttttaatatgaagacttcccaagaagaggtatgtcttttttgttcagtttttgtgtcaaattctgttcttaggctgggcatggtggctcatgcctataatcccagcactttgggaggctgaggtaggagtatcaactgagcctaggaggttgaggctgtagtaagccataattgtcccactgcactccagcctgggtgacagagcaagaccttgtctcaaataaataaataaataaataaatctgctatttgtaaggatgttatctttcttgttaaacttatacataagcattttacagttcttattgctatcattccattctgaatacattattttccccatttgcttatttccttattaattctagaggtatcttactaaatctctcaaattttctacatttatattgccagcttgaaggaatatgtttgtcttctttttcaatgattcaaccacctatttaattttgtgatgttataatttgctagaaagtctagaagataatgtcaaataacagtgttgatagcaagcgtccttatctggttcctaattttaattaaaccatatttcaattagtcttattagcatatttggtaattagttaaaaaattaaaattggtttaaaaattaattaaaattagttaaaaataattaattaaaaaattctctctattttaaattaagaatagctgccaaattttatcaaatactttttagcatctattgatatggttatattattttctatttaacctgttgttttcaaggattatatggccaccacttccacctaatttttaaaatttttttgtagagacagggtttcactttgttgcccaggctggtcttgaactcctgggctcaagcagtcctctcacctcagcctccgaaagtgctgggattataggcgtgagccactgcattcggcatgatccattcttaaaaaatctgtgttgtgtatatatgtgtacttgccaaaaatacatattctaaaatgttaattatgatatccaggtgataagcatgagggtgattttttttttttcctttctggttttttagagacagggtctcctgctgtccccaggctggagtgcagtggcatgatcacagcttagtgttacctcagactcctgggctcaagtgatcctcccacctcaacctcccaagtagctgggactactggcactcgccaccgtgatgcctggctaagttttcgctttttctttttttgtaaagacagggtcttggtgtgttacccagtctggtttcaaactcctgatctcaagagatcctcctgccttggcctcccaaagtgctgggatcacaggtatgagccaccatgcccagccttattttttttccttttcacttgtctagactttctttcttttcttttttttgagatggagtctccctctgtcgcccaggctggagtacagtagcatgatcttggctcactgcaacctccgcctcctgggtttaagcaattctcctgcctcagcctccctgagtagctgggactacacgccaccacgcccagctactgttttttgtatttttagtagagactaggtttcaccatgttggccaggccggtctcggactcttgacctcaggtgatccaccagccttggcctcccaaaatgctaggattacaaccatgaaccaccatgcccagccgcttgtctagactttctaaaattttctatgcagaacataaattattttgcatcaaaaagaaaaaaaagttattttaatatatttttccatactaatgcattcctcattgctcccaattgaaacaaggccacaaagattctatttgtcatgcttgccacaactgaatatttatttgagtgaaaatctgtttgacatcaccctcaaatcaaagtggtcaggtgcaaagacgtccttcaacgcacagtgataagaacatgatttcacagcaaaagacagataaagagaacatcatttgccagctacctggggcagcagtgacatagatttctgaagtcaaggagaggaggatctaaatcatcacagcttgacaacaaagcacaagctgagtttgtcagaggcattttcattgtctgggatgctcatttcaaattcctctgggaaggcaaagttactgctgctaaattttgtaacatctgaaaatctgtgacttttacaaccataaagaacagtcctgcaaaccttgataagaaagtttgcatcgacttcatcattacaacagatttaaaggtgagaaaacaaaggcaaacgataggtactaaccctctagtggaagttccaatccaaagcatgttcattatcattaccaaagcatgtagcaagagggccacagagaattttcctctcatttagaacattttgccttcacacaaaaggctgctgtgtatttcagaattcaaaaagacactttacaggtaaccacaatacacttccatccaatttcacttatattttttagccttgatctgcctaaacttaatcagatatttctgagaactggaagcaatttagaaactcaaaatagtgtttactccaaactgaaaaattctgcaaagggaagtgttgaaataataagaagaatggtaacatttattgaacttttccagtgtgccagacactgtattaagtattccacacatacttttcacagatcctcacaaaacctcatgaaatagtcagtaatattatctatatgcagaagattgtattttctaaatatggccgcaacagtgtctctcatcccaaatactttcccacaatgtgatcttgccactcctcccatcaacaagctggacctttggtctccgcccttttaatcccagtaggctttaaccacttgagtatagcagaatgaggtcattaactttcaaggctagctcagaaaatgtcatgcaacttctacgaggccctcttgtgatgtttgttcagggagaaaccagacaccacgccacttaagaagctctactaccaggatgtggtggctcacacctgtaatcccagcacttttggaagccaaggcaggaggatcgcttgaggccaggagttcaaggctgcagtgagctacgatcatgccactgaactctagcctgggcaatagagtgagactgtgtctctaaaataaataaataaattttttaaaacgaagttctactaccattaggccacacgctggagaggccacatgtaggtgtttccaaccaatggtgtcagcctagtcaccagccaacagccagcctccactgcaaaccacggaacatccatcttggattcccaggccagtcaagccttcagatgcctgtatcccagttggcatctgaatgcaactgcatgggcgagttgcaagaatttcccacctaagtcctttctgaagtcctgacccatgttttatgcttgttcgagtccgttcttacattgctataaagaaaacctgaggctgggtaatttataaagaaaagaggtggctgggcactgtggctcacacctgtaatccaagcattttgggaggccaaggtgggtggatcatttgaggtcaggagttcaagaccagcctggctaacatggtgaaaccccgcatctactaaaaatacaaaaataagccaggcatggtggtgggtgcctgcagtcccagctactcgggacgctgaagcaagataatcgcttgaacccaggagatggaggttgcagtgaaccaagatcatgtgacggcatgccagcctgggcaacagagcaagactctgtcaaaaaaaagaaaaaaaagaaaagaaaagaggtttgattggctcacagtgttgcaggctgtacaagaagcatagtgctggcatctgcttctgctgaggcttcaaggagcttacgatatgatggaaggtgatggggaaccagcatgacacatgtcccatgagaatgggagcaagagagagagagggaggaggtgccatactcttttaaacaaccatatcttgcatgaactcagagtgagaactcactcattactgtgaagagggcaccaagacattcatgagggatctgctcccatgacccaaacgcttcccgccaagctctacctccaacactggggattacattttaacatgagatttggaggagatgaagcatccaaaccatatcattctgcccttgctcacccctcacaaaattctcatgttcttctcacattgcaacactaatcatcccttcccaatagtcctacaaagtcttaactcattctagagtcaactcagtcaaaagtccaaaagctcatttgagattttccacctatgaacctgtaaaattaaaaacaagttatttacttccaagatacaatcgtgatacaggcattgggcaaacattaccattatgaaagggagaaactggacaaaagaaaggggctacaggtccccacacaagtctgaaacctagcagggcagtaattaaaccttaactctccaaaattatcttttttgactccatgtcctgcatccaaggcacactggtgcaagcggtgggcttccaaggccttctgctgtggctttgcagggttcagcccctgtgactgctcacaagttgaagtctggtgcctgcagcttctccaggctgagagtgcaagctgctgggggctctaccattctggagtctggaagacagtggcccccttcccacagctccgctaggtagtgccccagtggggactatggtagggtggggatgctgcaacttcacatttccccttggcactgcccttgtagagtctctctgtcagggatctggccccatggcaggcttctgcctgagcacccaggctttatgatacatcctttggaatctaggagggaagctgccaagcctcctttactcttgcattctgtgcacctgcagacttagcatcaggtggaagcttccaaagcttacagcttatgccctccagagtggtggctcaggctgtacttgaggccctttgagccacagctgtagctggaacatctgggatacagggattagtgttccgaggctgagcagggcaatgaagccctgggcccggcccctgaaactgttctttattcctaggcttctgggcctgtgatggaaggaactgtctccaaggtctctgaaatgccttcaaggccctttttccattgtgttggatattagcacttggctgcctttcagtcatactaatctctccagcaagtggttgctccacagcctgctttttctatcaccgggataggctgcacattttccaaatttttatgctctgcttcccttctaaatgtaagttccaactttaagtcatttctttgctcctgtatctgatcgtagatttttagaaacaggccacctcttgaaggttttgctgcttagacatttctcccaccaaataccctaggtcagcagtccctacctttttggcaacagggaccagttttgtggaagacaatttttccacatagtagggaggggggatggtttcaggatgaaactgttccacctcagatcatcaagcattagattctaataaggagtatgcaacctagatccctcgcatgtgcagttcacagtaggggtcatgttcctatgagaatctaataccacccaagaggcggcgctcaggtggtaatgcttacttgctcaccactcacctcctactgtggagcccagtttctaacaggtcatggaccagtactggggtctcactttgttgcctaggctggtctcaaactcctgggatcaagcagtccttcgtccttggcctcccaaagtgctagtattacagacgtgaaccattatgccctgtcagtcatcactcttaaattcaaacttccacagatccctagggcatgaacacaatggagccaagttctttgctggggcataacacaggtgaccttcactccagttcctaataacttcaacatttccatctgagacttcctcagcctggtctacactgttcatatttctatcagcattttggtcatagccatttagccaatcttaagaagttccaaactttcctttacctttctgtcttcttttgaccccttcaaactcatccaaactctgtctgttacccagttccaaagccacttccacattttcaggtatctttgtagcaatgctttactcctcagtaccaattttctgtgttagtccattcttgtgttgctatagggaaatatcagagactggataatttatgaagaaaagaggtttaattggctcacagttctacaggctgtacaggaagcatgatgccagcaagctgctcctggtgagggcctcaggaagcttacagtcatggtggcagatgacaggggaccagcatgacgtgtgtcccacaagaacaggagcaagagagagaaagggaggaggtgccacactcttttaaacaacaagatctcatgtaaactcagagtgagaactcacttattactgcaaggacggcaccaagccatccattagggatctgccccatgacccaaacaactcctgccaggcaccacctccagcactggggattacatttcaacatgagatttggaacacacgaaacatccaaaccatatcaacaccagtaagtttatggtgatttgctacataacaactgtaccaagaacaccccattttgcaaataaagaaactgaagcttaaagagtgacttgcccaaggcttaatcatcattttattctgctccaaatgtactaacaaattttataccatgcagaagaaatccttctcaaggttcatgtccatttcagcatatccatcagcagaacacactgtcaaaggaaatggacttcagtgaagtggaagcaatctattttacctgcattttgaatgaggccatattctatgtttccacctattgatccattaactaaaatatttaaaactgcttacaaattacttgcagtattacaacaaggataagtgcccccaaactactgtaggcaagcattctaataagagaaagtcccaggagatgacttagtcatctttctctaaaatcacttctagctggctgggttgaagtttcaaaggtcagttctttcagaatgttctcaaagcatgagctatatgactaatatcttgtgaaattttagagataagtttaaaacaaattttatagaacttggtttgaagaataaagtgtatgtgaaacataagtgagaaatgagtaaaacttaaagtttttgtgaagttttaaaatgcttgtgtggatgtatgaggccccagatttgatccccagcacctccacaaaaaaatagaaagaaaaaaagataagttaaaaaaataaagaaaaaataaaatgtttgtgtggaagatgtataagagaatgtacagtaaattaacccttctaagagctgaatctttaaataactttttaatgcaattcagctttatgctcttgagaagatgtcattgtggtttatcatcaaaataacagacacttaaagatgttttccagttcacagtccactccccattctctgggctgctgtggtcacatttttactacacgcctcttgaccccctttcctcagttaatcaaaccaggatagacaacagactctatctcttgagaatctggaattgggactcactgatcctagtcattctatgctcttcacttcaatagatatgaaaacccaggagatgtggctgccattgtgcagcagccatgtttgctgaggtctagctaagacagcaaaaggtggttcacagatagatgttcacagatatagagttcatagagcaaagtggaaggaagcataaacaaggtaccaaaaaaatcaaagggggagagatagacaaagagagagagagaaggacacagagagaaaagaaggcacaaagaaaggcaggcttcttgtcctccttcctttcaggtccaggacttcgtatgaaaccagacgcacctcctgcccatggaatccaggatacattctggtatcctgtggtggccagcctccaagatggcctccattaatgctaaccactggtattcatgcccttgtacagtgcctaccacattgaacagcctgggtaaccaatagaatacagtcttgcagaaatgacaatgcatgacttccaaggctaggtcataaaaccaacagcagtttccaccttgctgactccttgctcattctgggcatatcctacctggaaagaactggggcttcttgccaacggccaacaccatcttcccaggtgcgtgcgtaagccatcttggaagctttcagccccaatcaagcttccagatgcctacagccacaacctacatcttaactgcaacctcatgaaatgccctgggccagaaccacctagttaaacctcttctgaatccttaacccacagaaactatgagataagtgtttattattttaaaacactaatttcatatattgaagtcctaacccccaaagtgactgactctatgtggagacagggcctttatggaggtgattaaggttaaatgaggtcatgggggtggggccctaattcaataggactggtgtccttgtaagaaaagaagacacgccagagctgtatctcttcacacatacacagaaaacgggtcatatggagaaggacaggacaagatggcagaaaagaagtctccaccaattataccctgtgcaaggatatcaatttaacaactatctacacagaaagaacaccttcataagaaccagaaatcaggtgagcactcatagtacctggttttaattaacttcattttactgaaagaggcactcaagaagtaggaaaaacagtctggaattgctggtgccactcctctcccatcccctagcagtgattgcatggtgcaaagcacttctgtgccatggggagagggagagccagcaattgtgaggcattgaactcagtgctgcccttgttatagcagaaagcaaaaccgaaccaaactcagctgacacccacccacagtgggagtatttaaaccagcccttgccagaggagaatcaccgattccagtggttgtaacttgcgtttctgcaagcctcactactgccggctaaagtgctctggcaccccagaccaatgtgaaaggcagtctaggccacaaggactgcaacacttaggagaatcttagtgctgaactgggccctgagacagtggactggggggacatgcgacctagtgagacaccagccagggcagccaagggagtgctggcactgcccctcctctaaacccaggctgcttagcttgcagctccgaaagagacatcttcctttcacttaagtagaggagagggaagagtggggaggactttgtcttgcatcttggataccagatcacccacagcaggataggagagcagtaagagctgtgaggccccctttccaggccctagatcccagacatttctagatataccctgggccaggaaagaatccaccaccttaaagggaagggcccagtcctggtaggattcatgacctgctaactgaagagcccttagaccctgaataaccagcagcaatacccaggtactatgtcaagggccttgaatgagacactgagacttgctagctttaggtgaaactcagcactttacagctgtggtggctatggggcaaaacttctgcttgagaaaagtgaagggaaaagtaaaaaagactgtctcacatcttaggtaccagctcagccacaagaaggtggagaaccaagtgggttcttggggtccccagttctaggacttggctcttggatggcatttctggacctgccctgggccagaggggagcccattcccctgaagagtgagtctcaggccaggctgactgaagatacttcaggtcttaagggaatattggcagtagtctggcagtactccccatgggcctgaggtgcgagtgtccacagggtaagactcctctgcctttgggaatgagtgagaagcactgcatcttgtggtttgagtgccagttaaaccacagtacaatagaacacaaagtagacttccaaagtttttgactgtagccactggctcccaggcagcatctctggacccaccctggggctagaggaaatcaggaaatttcctgaagggaaagacataggcctggctggctttgccacttgtggactgtagagccccagggtttttagtgaaataggtggtagccagggagtagttatagcaggccttgggtgagacccagtgctgtgctggcttcaggtctgactcagcacagtcctgatggtggtggccacaggagtgactgtgtcattccacccccagctcccagtggctcagaacagacagagtctctgtttgtttgggagaaagtaagggaagacaacaagagtctctgcctgcttatctagagaatacttctggatcttgtctaagatgatcaaagcagtatctctacaagtctgcaataaccacagtattactgggcttggtgtccccccctaaaacagatacagcatagatcacaactcccaagttctttttttttttaaattatactttacgttctagggtacatgtgcacaatgtgcaggtttgttacatatgtatacatgtgccatattggtgtgctgcacccattaactcgtcatttacatgagatatatctcctaatgctatccctcccccctcccccgatcccacaacaggccctagtgtgtgatgttccccttcctgtgtccaagtgttctcattgttcaatccccacctatgagtgagaacatgcggtgtttggttttttgtccttgcgatagtttgctgagaatcatggtttccagcttcatccatgtccctacaaaggacatgaactcatccttttttatggctacataatatttcatggtgtatatgtgccacattttcttaatccagtctatcattgttggacatttaggttggttccaagtctttactattgtgaatagtgccccaataaacatacgtgtgcatgtgtctttatagtagcatgacttataatcctttgggtatatacccagtaatggaatggctgggtcaaatggtatttctagttctagatccctgaggaatcgccacactgtcttccaaaatggttgaactagtttacagtcccaccaacagtgtaaaagcgttcctatttctccacatcctctccagcacctattgtttcctgactttttaatgatcaccattctaactggtgtgagatagtatctcattgtggttttgatttgtatttctctgatggccagtgatgatgagcatttaattttcatgtgtctgttggctgcatgaatgtcttcttttgagaagtgtctgttcatatccttcacccacttgttgatggggttgtttgttttttcttgtaaatttgtttgagctctttgtacattctggatattagccctttgacacaccagtagattgaaaaattttctcccattctgtaggttgcctgttcactctgatggtagtttattttgctgtgcagaagctctttagtttaattagatctcatttgtcaattttggtttttgttaccattgcttttggtgttttagacatgaagtcccgcctatgtcctgaatggtattgcctaggttttcttctagggtttttatggttttagatctaacatttaagtctttaatccatcttgaattaatttttgtgtaaggtgtaaggaagggatccagtttcagctttctgcatatggctagccagttttcccagcaccatttgttaaatagggaatcctttccccatttcttgtatttgtcagttttgtcaaagatcagatggttgtagatgtgtggtattatttccaggggttctattctgttccattggtctatatctctgttttggtaccagtaccatgctgttttgcttactgtagccttgtagtatagtttgaagtcaggtagcgtgatgcctccagctctgttcttttggcttaggattgacttgacaatgtgggctcttttttggtttcatataaactttaaagtactttttcccaattctgtgaagaagtcattggtagcttgatggggatggcattgaacctataaattaccttgagcagtatggtcattttcacgatattgattcttcctacccatgagcatggagtgttcttccatttgtttgtgtcctcttttatttcattgagcagtagcttgcagttctccttgaagaggtccttcacatcccttgtaagttggattcctaggtattttattctctttgaagcggttgtgaatgggagttcactcatgatttggctctctgtttatctgttattggtgtataagaatgcttgtgatttttgtacattgattttgtatcctgggactttggtgaagttgcttatcagcttaaggagattttgggctgagacaatggttttttctaaatatacaatcatgtcatctgcaaacagggacaatttgacttcctcttttcctaactgaataatctttatttctttctcttgcctgattgccctggccagaacttccaacactctgttgaataagagtggtgagagagggcatccctgtcttgtgccagttttcaaagggaatgtttccagtttttgcccattcaatatgatattggctgtgggtttgtcataaatagctcttattattttgagatacatcccatcaatacctaatttattgagagtttttagcatgaagggctgttgaattttgtcaaaggccttttccgcatctattgagataatcatgtggtttttgtctttggttctgtttataagctggattacgtttattgatttgtgtatgttgaaccagccttgcatcccagggatgaagccaacttgatcatggtgaataagctttttgatgtgctgctggatttgatttgccaggattttattgaggatttttgcatcgatgttcatcagggacattagtctaaaatccttttttcgttgtgtctctgccaggctttggtatcaggatcacgttggcctcataaaatgaattagggaggattccctctttttccattgattggaatagtttcagaaggaatggtaccagctccagtagaattcggctgtgaatctatctggtcctggactttttttggttggtaggctattaactattgcctcaatttcagaacctgttattggtctatcagagattcaacttcttcctgggttagtcttgggagggtgtatgtgtccaggaatttatccgtttcttctagattttctagtttatttgtgtcgaggtgtttatagtattctctgatggtagtttttatttctgtgggatcggtggtgatatcccctttatcattttttattgcatctatttgattcttctctcttttcttctttattagtcttgctagcagtctatcaattttgttgatcttttcaaaaaaccagctcctggattcattgattttttgaagggttttttgtgtctctctctccttcagttctgctctgatcttagttatttcttgccttctgctagcttttgaatgtgtttgctcttgcttctctagttcttttaattgtgatgttagggtgtcaattttagatctttcctgctttctcttgtgggcatttagtgctataaatttccccctacacactgctttaaatgtgtcccagagattctggtatgttgtgtctttgttctcattggtttcaaagaacatctttatttctgccttcatttcgttatgtacccagtagtcattcagcagcaggttgttcagtttccatgtagttgagcagttttgagtgagtttcttaatcctgagttctagtttgattgcactgtggtctgagagacagtttgttataatttctattcttttacatttgctgaggagtgctttacttccaactatgtggtcaactttggaataagtgtgatgtggtgctgagaagaaggtatattctgttgatttggggtggagagttctgtagatatctattaggtctgcttggtgcagagctgagttcaattcctggatatccttgttaactttctgtctcattgatctgtctaatgttgacagtggtgtgttaaagtctcccattattattgtgtgggagtctaagtctctttgtaggtctctaaggacttgctttatgaatctggatgctcttgtattgggtgcatgtatatttaggatagttagctcttcttgttgcactgatccctttaccactatgtaatggctttctttgtctcttttgatctttgttggtttaaagtctcttttatcagagactaggattgcaacccctgcttttttgttttccatttgcttggtaaatattcctccatccctttattttgagcctatgtgtgtctctgcacatgagttgggtctcctgaatacggcacactggtgggtcttgactctttatccaattcaccagtctgtgtcttttaatcggagcatttagcccatttacatttaagattaatattgttatgtgtgaatttgatcctgtcattatgatgttagctggttattttgctcgttagttgatgcagtttcttcctagcctcaaagatctttacaatttgacatgtttttgcagtggctggtactggttgttcctttccatgtttagtgcttccttcaggagctcttttagggcaggcctggtggtgacaaaatgtctcagcatttgcttgtctgtaaaggattttatttctccttcccttatgaagcttaatttgtctggatatgaaattctgggttgaaaattcttttctttaagaatgttgaatattggcccccactcttttctggcttgtagagtttctgccgagagatcagctgttagtctgatgggcttccctttgtgggtaacccgacctttgtctctgactgcccttaacagtttttccttcatttcaactttggtgaatctgacaattatgggtgttggagttgctcttcttgaggagtatctttgtggcattctctgtatttcctgaatttgaatgttggcctgccttgctaggttcggtaggttctcctggataatatcctgcagagtgttttccaacttggttccattctccccgtcactttcaggtacaccaatcagatgtagattggtcttttcacatagtcccatatttcttggaggctttgtttgtttctttttattctttttttctgtaaacttctcttctcatttcatttcattcatttaatctttaatcactgataccctttcttccacttgatcaaatcagctactaaagcttgtgcatgcatcatgtagttcttgtgccatggttttcagttccatcacgtcagttaaggtcttctctgcactgtttattctagttagccattcaactaatcttttttcaaggtttttagcttctttgtgatgggttcgaacatcctcttttagcttagagaagtttgttattactgatcgtctgaagccttcttctctcaacttgacaaagtcattctccttctagctttgctccttggctggcgaggagctgcgttcctttggaggggaagaggcactccaatttttagaattttcagctgttctgctctggtttctccccatctttgtggtttcatctacctttggtctttgatgacagtgacatacaaatgggtttttggtgtggatgtcctttctatgcgttagttttccttccaacagtcaggaccctcagctgcaggtttgttggagtttgtgggaggtccactccagaccttgtttgcctgggtatcagcagcagaggctgcagaacaacaaatattgcagaacggcaaatgttgctatctgatcctttttctggagacttcatctctgaggggcacccggctgtacgaggtgtcagtcggcccctactgggaggtgtctcccagttacgctactcgggggtcagggacccacttgaggaagcagtctgtccattctcagatttcaaactctgtgctgggagaagcactactctcttcaaagctgtcagacagggacatttaagtctgcagaagtttctgctgccttttgttcagctatgccctgcccccagaggtggagtctacagagaaaggcaggactccttgagctgtggtgggctccacctagttcaagcttcccagctgctttgtttacctactcatgcctcagcaattgtggacacccctcccccagcctcactgccaccttgcagttcaatctcagatggctgtgctagcagtgagcaaggctctgtgggagtgagaccttctgagccatgcacaggatataatctcctggtatgccgtttgctaaggctgttggaaaagcacagtattagggtgggagcatcccaattttccaggtacaatctgtcacggcttccctttgctaggaaagggaattccccgacctcttgcacttcccgggtgaggagatgccccaccctgctccatgggctgcatccactgtctgacaagcctcagtgagatgagcctggtacctcagttggaaatgcagaaatcacccatcttctgtgttgctcatgctgggagctgcagactggagctgttcttatttggccatcttggaaccttcccccacatttttcaactccagaatttctgtttgattctttttaactatttcaatctctttgttaaatttatctgatagaattctgaattctttctctgtattaccttgaatttctttgcgtttcctcaaaacagctattttggattctctgtctgaaaggtcactgatgtggtttggctctgtgtccccacccagatttcatttcaaattgtaatccccatgtgttgagggtgggacctagtgggagttggttggatcatgggggcagtttccctcatgctgttcttgtgatagtgagtgagttctcatgagatctgatggtttaaaagtgttttgcagtcccaccaactcttgctgccatgtaagacgccttgcttccctttcacctcctaccataattgtaagtttcctaagtctgttgcaggggtagagccctcatgaagaacttttactagggccatgcagaggggaaatgtggggttggagcccccacacagagtccctactggggcactgcctagtgaacctgtgagctcttctctgtcctccaaaccccagaatagtagatccacccatagcttgcactgtgcacctggaaaagccacaggcaccaatgccagccgatgaaagcatctgcaggggctgcaccctgcaaagccaaagaggctgagctgtccagggccttgggagcccacctcttgtgtcattgtatcctggatgtgagatatggagtcaaaggagattattttggatctttaaaatttagtggctgccctgatgggtgtcaaacttgcaggggtcctgtggtacctttgttttggccaattttttccatttagaatgggaacacttacacaatacctgtatccccagtgtatcttggaagtaactaacttgttttttattttacaggcttataggtggaaggaacttgccttgtctcagatgagactttggacttggacatttgagttaatgctggaatgaattaagacattgagggattgttgggaaggcatggttggctttgaaatgtgagaagaatataaaatttgggaggggccaggggcataatgatatggtttggctctgtgtccccacccaaatctcatcttaaattataatccccctgtgttgagataagtacctggtgggaggtgattggatcatgggttgtggtttcacccatgctgttctcatgatagtgagtgagttcccatgagatctgatggtttaaatgtgtttgtcattaccccagcccccactgccatgtaagatgtgttttgcttctctttcaccttctgccatgattttaagtttccggaggcctacccagccatgcaaaagtgggtcaattaagcctctgtcctttataaataatccagtatcaggtagttctttatagcagtgtggaaatggactgatacagtcatacatctctgtttctccaggatttatccctggtgcattatttagttcattttatgaggtcatgttttcctggatcatcttcatacttgtagaagtttgtctatgtctgggcattgaagagttaggtatttattgcagttgtcactgtctggccttgtttgtgcctgcccgtttgggaaggctttccagatattcaaaagaactttggtgttcctgaaggaagcactaaacatggaaaggaacaaccagtaccagccactgcaaaaacatgtcaaattgtaaagatctttgaggctaggaagaaactgcatcaactaacgagcaaaataaccagctaacatcataatgacaggatcaaattcacacataacaatattaatcttaaatgtaaatgggctaaatgctccgattaaaagacacagactggtgaattggataaagagtcaagacccaccagtgtgccgtattcaggagacccaactcatgtgcagagacacacataggctcaaaataaagggatggaggaatatttaccaagcaaatggaaaacaaaaaagcaggggttgcaatcctagtctctgataaaagagactttaaaccaacaaagatcaaaagagacaaagaaagccattacatagtggtaaagggatcagtgcaacaagaagagctaactatcctaaatatacatgcacccaatacaagagcatccagattcataaagcaagtccttagagacctacaaagagacttagactcccacacaataataatgggagactttaacacaccactgtcaacattagacagatcaatgagacagaaagttaacaaggatatccaggaattgaactcagctctgcaccaagcagacctaatagatatctacagaactctccaccccaaatcaacagaatataccttcttctcagcaccacatcacacttattccaaagttgaccacatagttggaagtaaagcactcctcagcaaatgtaaaagaatagaaattataacaaactgtctctcagaccacagtgcaatcaaactagaactcaggattaagaaactcactcaaaactgctcaactacatggaaactgaacaacctgctgctgaatgactactgggtacataacgaaatgaaggcagaaataaagatgttctttgaaaccaatgagaacaaagacacaacataccagaatctctgggacacatttaaagcagtgtgtagggggaaatttatagcactaaatgcccacaagagaaagcaggaaagatctaaaattgacaccctaacatcacaattaaaagaactagagaagcaagagcaaacacattcaaaagctagcagaaggcaagaaataactaagatcagagcagaactgaaggagagagagacacaaaaaacccttcaaaaaatcaatgaatccaggagctggttttttgaaaagatcaacaaaattgatagactgctagcaagactaataaagaagaaaagagagaagaatcaaatagatgcaataaaaaatgataaaggggatatcaccaccgatcccacagaaataaaaactaccatcagagaatactataaacacctcgacacaaataaactagaaaatctagaagaaacggataaattcctggacacatacaccctcccaagactaacccaggaagaagttgaatctctgatagaccaataacaggttctgaaattgaggcaatagttaatagcctaccaaccaaaaaaagtccaggaccagatagattcacagccgaattctactggagctggtaccattccttctgaaactattccaatcaatggaaaaagagggaatcctccctaattcattttatgaggccaacatgatcctgataccaaagcctggcagagacacaacgaaaaaaggattttagactaatgtccctgatgaacatcgatgcaaaaatcctcaataaaatcctggcaaatcaaatccagcagcacatcaaaaagcttatccatcatgatcaagttggcttcatccctgggatgcaatgctggttcaacatacacaaatcaataaatataatccagcttataaacagaaccaaagacaaaaaccacttgattatctcaatagatgcggaaaaggcctttgacaaaattcaacagcccttcatgctaaaaactctcaataaattaggtattgatgggatgtatctcaaaataataagacctatttatgacaaacccacagccaatatcatactgaatgggcaaaaactggaagcattccctttgaaaactggcacaagacagggatgccctctctcaccactcctattcaacatagtgttggaagttctggccggggcaatcaggcaagagaaagaaataaagggtattcagttaggaaaagaggaagtcaaattgtccctgtttgcagatgacatgattgtatatttagaaaaccccattgtctcagcccaaaatctccttaagctgataagcaacttcagcaaagtctcaggatacaaaatcaatgtacaaaaatcacaagcattcttatacaccaacaacagacaaacagagagccaaatcatgagtgaactcacattcacaattgcttcaaagagaataaaatacctaggaatccaacttacaaggcatgtgaaggacctcttcaaggagaactacaaaccactgctcaatgaaataaaagaggacacaaacaaatggaagaacattccatgctcatgggtaggaagaatcaatatcgtgaaaatggccatactgctcaaggtaatttgtagattcaatgccatccccatcaagctaccaatgactttcttcacggaattggaaaaagctactttaaagttcatatggaaccaaaaaagagcccacattgccaagtcattcctaagccaaaagaacaaagctggaggcatcatgctacctgacttcaaactatactacaaggctacagtaagcaaaacagcatggtactggtaccaaaacagagatatagaccaatggaacagaatagagcccccggaaataataccacacatctacaaccatctgatctttgacaaacctgacaaaaacaagaaatggggaaagaattc

SEQ ID NO: 77 - DNA, 215308 bp, Homo sapiens
aagcttccagatgcctacagccacaacctacatcttaactgcaacctcatgaaatgccctgggccagaaccacctagttaaacctcttctgaatccttaacccacagaaactatgagataagtgtttattattttaaaacactaatttcatatattgaagtcctaacccccaaagtgactgactctatgtggagacagggcctttatggaggtgattaaggttaaatgaggtcatgggggtggggccctaattcaataggactggtgtccttgtaagaaaagaagacacgccagagctgtatctcttcacacatacacagaaaacgggtcatatggagaaggacaggacaagatggcagaaaagaagtctccaccaattataccctgtgcaaggatatcaatttaacaactatctacacagaaagaacaccttcataagaaccagaaatcaggtgagcactcatagtacctggttttaattaacttcattttactgaaagaggcactcaagaagtaggaaaaacagtctggaattgctggtgccactcctctcccatcccctagcagtgattgcatggtgcaaagcacttctgtgccatggggagagggagagccagcaattgtgaggcattgaactcagtgctgcccttgttatagcagaaagcaaaaccgaaccaaactcagctgacacccacccacagtgggagtatttaaaccagcccttgccagaggagaatcaccgattccagtggttgtaacttgcgtttctgcaagcctcactactgccggctaaagtgctctggcaccccagaccaatgtgaaaggcagtctaggccacaaggactgcaacacttaggagaatcttagtgctgaactgggccctgagacagtggactggggggacatgcgacctagtgagacaccagccagggcagccaagggagtgctggcactgcccctcctctaaacccaggctgcttagcttgcagctccgaaagagacatcttcctttcacttaagtagaggagagggaagagtggggaggactttgtcttgcatcttggataccagatcacccacagcaggataggagagcagtaagagctgtgaggccccctttccaggccctagatcccagacatttctagatataccctgggccaggaaagaatccaccaccttaaagggaagggcccagtcctggtaggattcatgacctgctaactgaagagcccttagaccctgaataaccagcagcaatacccaggtactatgtcaagggccttgaatgagacactgagacttgctagctttaggtgaaactcagcactttacagctgtggtggctatggggcaaaacttctgcttgagaaaagtgaagggaaaagtaaaaaagactgtctcacatcttaggtaccagctcagccacaagaaggtggagaaccaagtgggttcttggggtccccagttctaggacttggctcttggatggcatttctggacctgccctgggccagaggggagcccattcccctgaagagtgagtctcaggccaggctgactgaagatacttcaggtcttaagggaatattggcagtagtctggcagtactccccatgggcctgaggtgcgagtgtccacagggtaagactcctctgcctttgggaatgagtgagaagcactgcatcttgtggtttgagtgccagttaaaccacagtacaatagaacacaaagtagacttccaaagtttttgactgtagccactggctcccaggcagcatctctggacccaccctggggctagaggaaatcaggaaatttcctgaagggaaagacataggcctggctggctttgccacttgtggactgtagagccccagggtttttagtgaaataggtggtagccagggagtagttatagcaggccttgggtgagacccagtgctgtgctggcttcaggtctgactcagcacagtcctgatggtggtggccacaggagtgactgtgtcattccacccccagctcccagtggctcagaacagacagagtctctgtttgtttgggagaaagtaagggaagacaacaagagtctctgcctgcttatctagagaatacttctggatcttgtctaagatgatcaaagcagtatctctacaagtctgcaataaccacagtattactgggcttggtgtccccccctaaaacagatacagcatagatcacaactcccaagttctttttttttttaaattatactttacgttctagggtacatgtgcacaatgtgcaggtttgttacatatgtatacatgtgccatattggtgtgctgcacccattaactcgtcatttacatgagatatatctcctaatgctatccctcccccctcccccgatcccacaacaggccctagtgtgtgatgttccccttcctgtgtccaagtgttctcattgttcaatccccacctatgagtgagaacatgcggtgtttggttttttgtccttgcgatagtttgctgagaatcatggtttccagcttcatccatgtccctacaaaggacatgaactcatccttttttatggctacataatatttcatggtgtatatgtgccacattttcttaatccagtctatcattgttggacatttaggttggttccaagtctttactattgtgaatagtgccccaataaacatacgtgtgcatgtgtctttatagtagcatgacttataatcctttgggtatatacccagtaatggaatggctgggtcaaatggtatttctagttctagatccctgaggaatcgccacactgtcttccaaaatggttgaactagtttacagtcccaccaacagtgtaaaagcgttcctatttctccacatcctctccagcacctattgtttcctgactttttaatgatcaccattctaactggtgtgagatagtatctcattgtggttttgatttgtatttctctgatggccagtgatgatgagcatttaattttcatgtgtctgttggctgcatgaatgtcttcttttgagaagtgtctgttcatatccttcacccacttgttgatggggttgtttgttttttcttgtaaatttgtttgagctctttgtacattctggatattagccctttgacacaccagtagattgaaaaattttctcccattctgtaggttgcctgttcactctgatggtagtttattttgctgtgcagaagctctttagtttaattagatctcatttgtcaattttggtttttgttaccattgcttttggtgttttagacatgaagtcccgcctatgtcctgaatggtattgcctaggttttcttctagggtttttatggttttagatctaacatttaagtctttaatccatcttgaattaatttttgtgtaaggtgtaaggaagggatccagtttcagctttctgcatatggctagccagttttcccagcaccatttgttaaatagggaatcctttccccatttcttgtatttgtcagttttgtcaaagatcagatggttgtagatgtgtggtattatttccaggggttctattctgttccattggtctatatctctgttttggtaccagtaccatgctgttttgcttactgtagccttgtagtatagtttgaagtcaggtagcgtgatgcctccagctctgttcttttggcttaggattgacttgacaatgtgggctcttttttggtttcatataaactttaaagtactttttcccaattctgtgaagaagtcattggtagcttgatggggatggcattgaacctataaattaccttgagcagtatggtcattttcacgatattgattcttcctacccatgagcatggagtgttcttccatttgtttgtgtcctcttttatttcattgagcagtagcttgcagttctccttgaagaggtccttcacatcccttgtaagttggattcctaggtattttattctctttgaagcggttgtgaatgggagttcactcatgatttggctctctgtttatctgttattggtgtataagaatgcttgtgatttttgtacattgattttgtatcctgggactttggtgaagttgcttatcagcttaaggagattttgggctgagacaatggttttttctaaatatacaatcatgtcatctgcaaacagggacaatttgacttcctcttttcctaactgaataatctttatttctttctcttgcctgattgccctggccagaacttccaacactctgttgaataagagtggtgagagagggcatccctgtcttgtgccagttttcaaagggaatgtttccagtttttgcccattcaatatgatattggctgtgggtttgtcataaatagctcttattattttgagatacatcccatcaatacctaatttattgagagtttttagcatgaagggctgttgaattttgtcaaaggccttttccgcatctattgagataatcatgtggtttttgtctttggttctgtttataagctggattacgtttattgatttgtgtatgttgaaccagccttgcatcccagggatgaagccaacttgatcatggtgaataagctttttgatgtgctgctggatttgatttgccaggattttattgaggatttttgcatcgatgttcatcagggacattagtctaaaatccttttttcgttgtgtctctgccaggctttggtatcaggatcacgttggcctcataaaatgaattagggaggattccctctttttccattgattggaatagtttcagaaggaatggtaccagctccagtagaattcggctgtgaatctatctggtcctggactttttttggttggtaggctattaactattgcctcaatttcagaacctgttattggtctatcagagattcaacttcttcctgggttagtcttgggagggtgtatgtgtccaggaatttatccgtttcttctagattttctagtttatttgtgtcgaggtgtttatagtattctctgatggtagtttttatttctgtgggatcggtggtgatatcccctttatcattttttattgcatctatttgattcttctctcttttcttctttattagtcttgctagcagtctatcaattttgttgatcttttcaaaaaaccagctcctggattcattgattttttgaagggttttttgtgtctctctctccttcagttctgctctgatcttagttatttcttgccttctgctagcttttgaatgtgtttgctcttgcttctctagttcttttaattgtgatgttagggtgtcaattttagatctttcctgctttctcttgtgggcatttagtgctataaatttccccctacacactgctttaaatgtgtcccagagattctggtatgttgtgtctttgttctcattggtttcaaagaacatctttatttctgccttcatttcgttatgtacccagtagtcattcagcagcaggttgttcagtttccatgtagttgagcagttttgagtgagtttcttaatcctgagttctagtttgattgcactgtggtctgagagacagtttgttataatttctattcttttacatttgctgaggagtgctttacttccaactatgtggtcaactttggaataagtgtgatgtggtgctgagaagaaggtatattctgttgatttggggtggagagttctgtagatatctattaggtctgcttggtgcagagctgagttcaattcctggatatccttgttaactttctgtctcattgatctgtctaatgttgacagtggtgtgttaaagtctcccattattattgtgtgggagtctaagtctctttgtaggtctctaaggacttgctttatgaatctggatgctcttgtattgggtgcatgtatatttaggatagttagctcttcttgttgcactgatccctttaccactatgtaatggctttctttgtctcttttgatctttgttggtttaaagtctcttttatcagagactaggattgcaacccctgcttttttgttttccatttgcttggtaaatattcctccatccctttattttgagcctatgtgtgtctctgcacatgagttgggtctcctgaatacggcacactggtgggtcttgactctttatccaattcaccagtctgtgtcttttaatcggagcatttagcccatttacatttaagattaatattgttatgtgtgaatttgatcctgtcattatgatgttagctggttattttgctcgttagttgatgcagtttcttcctagcctcaaagatctttacaatttgacatgtttttgcagtggctggtactggttgttcctttccatgtttagtgcttccttcaggagctcttttagggcaggcctggtggtgacaaaatgtctcagcatttgcttgtctgtaaaggattttatttctccttcccttatgaagcttaatttgtctggatatgaaattctgggttgaaaattcttttctttaagaatgttgaatattggcccccactcttttctggcttgtagagtttctgccgagagatcagctgttagtctgatgggcttccctttgtgggtaacccgacctttgtctctgactgcccttaacagtttttccttcatttcaactttggtgaatctgacaattatgggtgttggagttgctcttcttgaggagtatctttgtggcattctctgtatttcctgaatttgaatgttggcctgccttgctaggttcggtaggttctcctggataatatcctgcagagtgttttccaacttggttccattctccccgtcactttcaggtacaccaatcagatgtagattggtcttttcacatagtcccatatttcttggaggctttgtttgtttctttttattctttttttctgtaaacttctcttctcatttcatttcattcatttaatctttaatcactgataccctttcttccacttgatcaaatcagctactaaagcttgtgcatgcatcatgtagttcttgtgccatggttttcagttccatcacgtcagttaaggtcttctctgcactgtttattctagttagccattcaactaatcttttttcaaggtttttagcttctttgtgatgggttcgaacatcctcttttagcttagagaagtttgttattactgatcgtctgaagccttcttctctcaacttgacaaagtcattctccttctagctttgctccttggctggcgaggagctgcgttcctttggaggggaagaggcactccaatttttagaattttcagctgttctgctctggtttctccccatctttgtggtttcatctacctttggtctttgatgacagtgacatacaaatgggtttttggtgtggatgtcctttctatgcgttagttttccttccaacagtcaggaccctcagctgcaggtttgttggagtttgtgggaggtccactccagaccttgtttgcctgggtatcagcagcagaggctgcagaacaacaaatattgcagaacggcaaatgttgctatctgatcctttttctggagacttcatctctgaggggcacccggctgtacgaggtgtcagtcggcccctactgggaggtgtctcccagttacgctactcgggggtcagggacccacttgaggaagcagtctgtccattctcagatttcaaactctgtgctgggagaagcactactctcttcaaagctgtcagacagggacatttaagtctgcagaagtttctgctgccttttgttcagctatgccctgcccccagaggtggagtctacagagaaaggcaggactccttgagctgtggtgggctccacctagttcaagcttcccagctgctttgtttacctactcatgcctcagcaattgtggacacccctcccccagcctcactgccaccttgcagttcaatctcagatggctgtgctagcagtgagcaaggctctgtgggagtgagaccttctgagccatgcacaggatataatctcctggtatgccgtttgctaaggctgttggaaaagcacagtattagggtgggagcatcccaattttccaggtacaatctgtcacggcttccctttgctaggaaagggaattccccgacctcttgcacttcccgggtgaggagatgccccaccctgctccatgggctgcatccactgtctgacaagcctcagtgagatgagcctggtacctcagttggaaatgcagaaatcacccatcttctgtgttgctcatgctgggagctgcagactggagctgttcttatttggccatcttggaaccttcccccacatttttcaactccagaatttctgtttgattctttttaactatttcaatctctttgttaaatttatctgatagaattctgaattctttctctgtattaccttgaatttctttgcgtttcctcaaaacagctattttggattctctgtctgaaaggtcactgatgtggtttggctctgtgtccccacccagatttcatttcaaattgtaatccccatgtgttgagggtgggacctagtgggagttggttggatcatgggggcagtttccctcatgctgttcttgtgatagtgagtgagttctcatgagatctgatggtttaaaagtgttttgcagtcccaccaactcttgctgccatgtaagacgccttgcttccctttcacctcctaccataattgtaagtttcctaagtctgttgcaggggtagagccctcatgaagaacttttactagggccatgcagaggggaaatgtggggttggagcccccacacagagtccctactggggcactgcctagtgaacctgtgagctcttctctgtcctccaaaccccagaatagtagatccacccatagcttgcactgtgcacctggaaaagccacaggcaccaatgccagccgatgaaagcatctgcaggggctgcaccctgcaaagccaaagaggctgagctgtccagggccttgggagcccacctcttgtgtcattgtatcctggatgtgagatatggagtcaaaggagattattttggatctttaaaatttagtggctgccctgatgggtgtcaaacttgcaggggtcctgtggtacctttgttttggccaattttttccatttagaatgggaacacttacacaatacctgtatccccagtgtatcttggaagtaactaacttgttttttattttacaggcttataggtggaaggaacttgccttgtctcagatgagactttggacttggacatttgagttaatgctggaatgaattaagacattgagggattgttgggaaggcatggttggctttgaaatgtgagaagaatataaaatttgggaggggccaggggcataatgatatggtttggctctgtgtccccacccaaatctcatcttaaattataatccccctgtgttgagataagtacctggtgggaggtgattggatcatgggttgtggtttcacccatgctgttctcatgatagtgagtgagttcccatgagatctgatggtttaaatgtgtttgtcattaccccagcccccactgccatgtaagatgtgttttgcttctctttcaccttctgccatgattttaagtttccggaggcctacccagccatgcaaaagtgggtcaattaagcctctgtcctttataaataatccagtatcaggtagttctttatagcagtgtggaaatggactgatacagtcatacatctctgtttctccaggatttatccctggtgcattatttagttcattttatgaggtcatgttttcctggatcatcttcatacttgtagaagtttgtctatgtctgggcattgaagagttaggtatttattgcagttgtcactgtctggccttgtttgtgcctgcccgtttgggaaggctttccagatattcaaaagaactttggtgttcctgaaggaagcactaaacatggaaaggaacaaccagtaccagccactgcaaaaacatgtcaaattgtaaagatctttgaggctaggaagaaactgcatcaactaacgagcaaaataaccagctaacatcataatgacaggatcaaattcacacataacaatattaatcttaaatgtaaatgggctaaatgctccgattaaaagacacagactggtgaattggataaagagtcaagacccaccagtgtgccgtattcaggagacccaactcatgtgcagagacacacataggctcaaaataaagggatggaggaatatttaccaagcaaatggaaaacaaaaaagcaggggttgcaatcctagtctctgataaaagagactttaaaccaacaaagatcaaaagagacaaagaaagccattacatagtggtaaagggatcagtgcaacaagaagagctaactatcctaaatatacatgcacccaatacaagagcatccagattcataaagcaagtccttagagacctacaaagagacttagactcccacacaataataatgggagactttaacacaccactgtcaacattagacagatcaatgagacagaaagttaacaaggatatccaggaattgaactcagctctgcaccaagcagacctaatagatatctacagaactctccaccccaaatcaacagaatataccttcttctcagcaccacatcacacttattccaaagttgaccacatagttggaagtaaagcactcctcagcaaatgtaaaagaatagaaattataacaaactgtctctcagaccacagtgcaatcaaactagaactcaggattaagaaactcactcaaaactgctcaactacatggaaactgaacaacctgctgctgaatgactactgggtacataacgaaatgaaggcagaaataaagatgttctttgaaaccaatgagaacaaagacacaacataccagaatctctgggacacatttaaagcagtgtgtagggggaaatttatagcactaaatgcccacaagagaaagcaggaaagatctaaaattgacaccctaacatcacaattaaaagaactagagaagcaagagcaaacacattcaaaagctagcagaaggcaagaaataactaagatcagagcagaactgaaggagagagagacacaaaaaacccttcaaaaaatcaatgaatccaggagctggttttttgaaaagatcaacaaaattgatagactgctagcaagactaataaagaagaaaagagagaagaatcaaatagatgcaataaaaaatgataaaggggatatcaccaccgatcccacagaaataaaaactaccatcagagaatactataaacacctcgacacaaataaactagaaaatctagaagaaacggataaattcctggacacatacaccctcccaagactaacccaggaagaagttgaatctctgatagaccaataacaggttctgaaattgaggcaatagttaatagcctaccaaccaaaaaaagtccaggaccagatagattcacagccgaattctactggagctggtaccattccttctgaaactattccaatcaatggaaaaagagggaatcctccctaattcattttatgaggccaacatgatcctgataccaaagcctggcagagacacaacgaaaaaaggattttagactaatgtccctgatgaacatcgatgcaaaaatcctcaataaaatcctggcaaatcaaatccagcagcacatcaaaaagcttatccatcatgatcaagttggcttcatccctgggatgcaatgctggttcaacatacacaaatcaataaatataatccagcttataaacagaaccaaagacaaaaaccacttgattatctcaatagatgcggaaaaggcctttgacaaaattcaacagcccttcatgctaaaaactctcaataaattaggtattgatgggatgtatctcaaaataataagacctatttatgacaaacccacagccaatatcatactgaatgggcaaaaactggaagcattccctttgaaaactggcacaagacagggatgccctctctcaccactcctattcaacatagtgttggaagttctggccggggcaatcaggcaagagaaagaaataaagggtattcagttaggaaaagaggaagtcaaattgtccctgtttgcagatgacatgattgtatatttagaaaaccccattgtctcagcccaaaatctccttaagctgataagcaacttcagcaaagtctcaggatacaaaatcaatgtacaaaaatcacaagcattcttatacaccaacaacagacaaacagagagccaaatcatgagtgaactcacattcacaattgcttcaaagagaataaaatacctaggaatccaacttacaaggcatgtgaaggacctcttcaaggagaactacaaaccactgctcaatgaaataaaagaggacacaaacaaatggaagaacattccatgctcatgggtaggaagaatcaatatcgtgaaaatggccatactgctcaaggtaatttgtagattcaatgccatccccatcaagctaccaatgactttcttcacggaattggaaaaagctactttaaagttcatatggaaccaaaaaagagcccacattgccaagtcattcctaagccaaaagaacaaagctggaggcatcatgctacctgacttcaaactatactacaaggctacagtaagcaaaacagcatggtactggtaccaaaacagagatatagaccaatggaacagaatagagcccccggaaataataccacacatctacaaccatctgatctttgacaaacctgacaaaaacaagaaatggggaaagaattccctatttaacaaatggtgctgggaaaactggctagccatatgtagaaagctgaaactggatcccttccttacatcttctacaaaaattaattcaagatggattaaagacttaaatgttagatctaaaaccataaaaaccctagaagaaaacctaggcaataccattcaggccacaggcatgggcaaggacttcatgactaaaacaccaaaagcaatggcaaaaaaagccaaaattgacaaattagatctaattaaattaaagagcttctgcacagcaaaataaactaccatcagagtgaacaggcaacctacagaatgggagaaaatttttgcaaactacttatctgacaaagggctgatatccagaatctacggagaacttaatcaaatttacaagaaaaaaatcaaacaacctcatcaaaaagtgggcaaaggatatgaacagacacttctcaaaagaagacattcatgcagccaacagacacatgaaaattaaatgctcatcatcactggccatcagagaaatgcaaatcaaaaccacagtgagataccatctcacaccagttagaatggcaatcactaaaaagtcaggaaacaacaggtgctggagaggatgtggagaaataggaatgcttttacactgttggtgggagtgtaaactagttcaacaattgtggaagacagtgtggcgattcctcagcaatctagaactagaaataccatttgacccagctatcccattactgggtatacacccaaaggattataaatcatgctgctataaaggcacatgcacacgtatgtgtgcactattcacaatagcaaagacttggaaccaacccaaatgtccatcaatgatagattagattaagaaaatgtggcacatatgcactatgcagccataaaaaaggatgagttcatgtcatttttagggacgttgatgaagctggaaaccatcattctcagcaaactatcacaaggacagaaaaccaaacaccgcatgttctcactcatacatgggaattgaacaataagaacacttggacacagggtagggaacatcacacactggggcctgtcatggggtagggggagggaggagggataacattaggagatatacctaatgtaaatgatgagttaacaggtgcagcacatgaacatggcacatatatacatatgtaacaaacctgcacgttgtgcacatgtaccctagaacttaacgtataataattaaaaaaaaagaaaaatgcaattggcatactgaagaatgcttctgtgtcttttaatagcagaattatcaggcagaagacagaattactgagcttgaagataagctattataatatttgaaaatacacagtcagaggagacaaaagaaaaaagaataaaaaacgatgaagcaggctgggcatggtggctcatgcctgtaatcccagcactttgggagactgaggcgggcagatcacttgaggttgggatttcaagaccagcctgaccaacatggagaaaccccatctttactaaaaataaaaattagccaggtgtggtgcacatgcctgtaatcccagctactggggaggctgaggcaagagaattacttgaaccaaagaggcagaggttgcagtgagccaagatcatgccattgcactccagcctgggcaacaagagcgaaactccatctcaaaaagaaaaaaaaaagatgaagcacacctacaggatctagaaaatagcctcaaatctcagagttattggccccaaagaagaggtagagaaagagatggggtagaaagtttattcaaagggataataacagagaacttcccaaacctagagaaagctatcaatatccaagtacaagaaggttatagaacaccaaacagatttagcccaaagaagactacctccaggcatttaataatcaaattgccaaaggtcaaggacaaagaaagagtcctaaaaggagcaagataaaacaaacaaataacatacaacagagctccaatatatctgacagcagacttctcagtggaaacttcacaggtcaggagagagtggcatggcatatttaaagtgcagaaggaaaaaaatttttaccctagaatagtatatctggcaaaaaatatccttcaaatatgaagaagaaataaagactttccccgacaaacaaaagctgagggatttcatcaacatcagacctgtcttacaagaaatgctaaggggaatatttcaatcagaaagaaaatgatgttaataagcaatcatctgaaggtacaaaactcattagtaatagtaagtacacagaatattataactctgtaattgtgatgtttaaactactcacatcttaagtagaaagatcttaagtagaaagatgtgagtagtttagtattagtagtattttatgtgaaaagatgaactgaacaaaaagtaataacttcaagacatagtacaaataaggtatgaattaatagtaacaacaaaaagttaaaacatggggggacaaagttaaggcatagagtctttattaattttatttttgcttgtttgctcatttgttaatgcaaacattgttaagttgttatcagcttaaaataatggcttataagatagtatttgcaagccctatggtaatctcaaaacaaaaaccatataacagatacacaaaaagaaaaagcatgaaactaaattatatcaccagagaaaaccaccttcaccaaaaggaagatagaaagaaaagaaagaagaaagagaagaccagaaaacaaataataaaatggcaagaataagtccttatcccccataataacattgaagatgtttttcctttgccgcatctactgagagaatgaagatcattctcagcaatcagactgtcaacattccagaaaatgttggcattactctgaagggatgcacagttactgtgaagggcccaaaggaaccctgaggtgtgacttaatcacatcaatgcagagctcagtcttcttgggaaaaaaaaaaaaaaagagagagatttactggcaagatagccgaataggaacagctccggtctgcagctgccagagagactgatgcagaaggtgggggatttctgcatttccaacttaggtacccggttcatctcactgggactggttggacagtgggtgcagcccatggagggcaagctgaagcagggtggggagccatctcacctgggaagcacaacgggtcagggaattttctgccccacccaaaggaagccatgaggcactgagcctgaggaactctggtacagacactgtgcttgtcccatggtttttgcaacccgcaaaccaggagattccctccggtgcctaccccaccagggccctgggtttcaagcacaaaactgggcagccatttgggcagacaccaaactagctgccggagttctttttttccataccccagtggtgcctggaatgccagcgagacagagccattcactcccctggaaaggggtgctgaagccagggagccaagtgatcgagcttggtgggtcccacccccacagagcccagcaaactaagatccactagcttgaaattctcactgccagcacagcagcagtctgagatcaacctgagacacgagcttggtggggggaggggcgtccaccattgctgaggcttgagtaggtggttttacactcacagtataaagaaagccactgggaagttcaaactgggcggagcccactgcagctcagcaaggctgctgtggccagacgtcccttctctgggcagggcatctctgaaaaaaaaggtagcagccccagtcagggacttacagataaaacccccatctccctgggtcagagcacctgggaaaacaggcagctgtgggcacagcttcagcagacttaaacgtctctgcctgacagctctgaagaaagcagtggacctcccagcatagcattcaagctctgctaagggacagactgcctcctcaagtgggtccccgacccccatgtatcctgactgggagacacctcccagtaggggccaacagacacctcatactggagagttctggctggcatctaggaggtgcccctctgggacgaagcttccagaggaaagaccaggcagcaatctttgctgttctgcagcatcctctggtgatacccagggaaacagggttgggagtggacctccagcaaactccaacagactggtagcaaaggggcctgactgtcagaaggaaaactaacaaacaggaatagcacatccactcaaagaccccatccaaaggtcaccaacatcaaagaccaaaggtagataaatccacaaagatggggagaaacaagaacaagaaggtcaaaaattccaaaaaccagaatgcctcttctcctccaaaggatcacaactcctcgccagcaagggaacaaaactggatggagaatgagtttgatgaattgacagaagaaggcttcagaaggtgggtaataacaaactcctccaagttaaaggagcatgttctaacccaatgcaaggaagctaagaaccttgaaaaaaggttagatgaattactaactagaataaccagtgtagaaaagaacatagatgacctgatggagctgaaaaacacagcatgagaactttgtgaggcatacacaagtttcaatagctgaatcaatcaagcagaagaaaggatatcagtgattgaagatcgacttaatgaaataaagcttgaagacaagattagagaaaaaggaaaaaaaggaatgaacaaagcctccaagaaatacaggactatgtgaaaaccaaatctgtgtttgattggtgtcctgaaagtgatgaggagaatggaaccaagttggaaaacactcttcaggattattatccaggagaacttccccaacctagcaagacaggccaacattcaaattcaggaaatacagagaacaccacaaagatactccttgagaagagcaactccaagacacataattctcagattcaccaaggttgaaatgaaggaaaaaattttaagggcagccagagagaaaggtcgggttatccacaaagggaagcccatcagactaacagcagatctctctgcagaaactctacaagtcggaagagagtggggtccaatattcaacattcttaaagaaaagaattttcaacccagaatttcatatccagccaaactaagcttcataagcgaaggagaaacacaatcctttacagacaagcaaatgctgagagattttgtcaccaccaggcctgccttacaagagctcctgaaggaagcactaaacgtggaaaggagcaactggtaccagccactgcaaaaacatactagattgtaaagaacattggcacaatgaagaaactgcatcaactaatgggcaaaacaactagctagcctcatattgacaggatcaaattcacacacaacaattttaaccttaaacgtaaatgggctaaatgcgccaattaaaagacacagactggcaaattggataaagagtcaagacccattagtgtgctgtattcaggagacccatctcatgtgcaaagatacacataggctcaaaataaagggatggaggaatatttaccaagcaaatggaaagcaaaaaaaagcacaagttgcaatcctaatctctgataaaacagactttaaaccaacaaagatcaaaagagacaaagaagggcattacataatggtaaagggatcaatgcagcaagaagaggtaactatcctaaatatatatgcacccaatacagaagcacccagattcataaagcaagttcttagagacctacaaagagacttagactcccacacaatagtaatgggagactttaacaccctactgtcaatattaggcaggttaacgagacagaaaattaacaaggatattcaggactagaactcaactctggaccaagcggacctattagacatctatagaactctccaccccaaatcaacagaatatacattctgctcagcacctcattgcacttattctaaaactgatgacataattggaagtaaaacactcctcagcaaatgtaaaagaacagaaatcacaacaaactgtctctcagaccacagtgcaatcaaattagaactcaggattaagaaactcactcaaaaccactcaactacatggaaactgaacaacctgctcctgaatggctactgggtaaataacaaaatgaaagcagaaataaagatgttctttgaaaccaatgagaacaaagacacaacataccagaatctctgggacacatttaaagcagtgtgtagagggaaatttatagcattaaatgcctacaaaagaaagcagaaaagatctaaaattgacaccctaacatcaaagttaaaagaactagagaagcaacagctaacaaattcaaaatctagcagaagacaagaaataactaagatcacagcagaactgaaggagagagagacacaaaaaacccttcaaaaaaatcaatgaatccaggagctggttttttgaagagatcaacaaatagatagaccactagccagaccatgcattcagaccataccaacagctttataagttctctggtacaatcttgcctggtatgcatgcccttgagtaatccctttcacactgaatggggctgactcatataagcaacaggatattgaggatatgatggtgtgtgcatttcaaagttaggtcataaaagtcattgcaccttccaacttgctgtctctcagatcactcgctctgaaggaagccagctgccatgtcatgagtcatgtaagcagccctgtggagagtattactgtaagtgagcaaaattcctcacctgttatttaaagtagataaatcaaattgcttaaagtagataaatcaagaaatagtagtataaacatattattttggaatagtagatataaccacctgtaatcccagcactttgagaagctgaggtgagcagattgcttgaggtcaggagtttgagaccggcctgggcaacatgacaaaaccctgtctctccaaaaaaaaaaaaattagatgggtgtgggtgcatgcacctgtaatcctagctatttgggagactgaggtgggcggatcacttgagcccaccaagtcgaggctgcagtgtgctgagatcacaccactgcactgcagcctgcatgacagagcaagaccctgtctcaaaaaaaaaaaaaagaatagtacacataactaacacatgaatttaaaacaaaatggtgaaaaaataataaaataataatttatttaattgatataatcaataaaaattccatttgatattaatagtaatggcagctctacaggtgagactatcagagatatcgtgggacaaaatagaaggtaaaggaaggaaactaactatattaagcacctattttgtgagtaaaatgaggttctgagagaaagggtaacccagccagcagattgcagagccagtgtatacatccatatttatctgactgtaaggtcaaagtcttttccactgtatcaagtaattgaccaagagacactagctctcagagcagcagaatgttgccacatttttattgacaaagaattaataacataaattatgtttatattgcaaagtttatttagggaaatttgatactcctttttacattttacataaatttattgagttataacactgcctgatgccaggtaaagcaaatacacatctgggttcagagactcacgtgtgcaacaaatttaactttctggatattttaaaaactcagcttaatttccctaggtgcctcattagcctgatggcagaaattaaatctcaggcaattctgggttctcccacaagtacacttttcttcagagttgtgctgaagttctgaggaggatgggaagggactaggaaatggccagtcctttgcccatctatcctctggcattctcccaccctgtcccaggttgtcagtccacacaggtggctggtgcatcactcctcattcttctcagtgaggtccttgaagcttgggcagctctccctgctacttctttacctctctcaggcactctatacctcattactctatttctgcacctctgagctgcagaaaactccttgatgctcttgaaaatcccacctgcctagaaactttatgtagcctcttctcctctgtggtattgccattgcctgaaggccctttccagaaagcaaatcacaagttttttctgttctcagacccacaactctatgtgtggttctatcatttcccctttcagacttggccaggaattaggaaaggcaaagcactatgcccctttctggagccccattagctctgaactgtcctttcttctctttcaagtctcctctttctccctagtgtgcagaatctgaggaagtaaaaaggcatgttctgacccatcagcttttttccactccatgagtcttaaacttcagaaaagctttactcttccttctgcatcatttctttcccagtctacctacccaaattgagaggaataagaaatactcataaaaaatcatggttttccacacagtggcttatcaaaacaaaatcatggttaacatttcaatctatatgatgtcaccatataagtacttgtgccagatgctggaaatacaaagaaaaatgtgattaaattcctgctgtcaggatgtgtccagggtcacattgttagtaggcggatacaaagaaaaaaacagaagtgatgatacagtatttagtgcaatatcagaactatttatagacaagagaagtatgattgggtggagggaagggggaagtacttagaaaagttttccaatggaaaactcaacctgcttttggccaaggtcgggaaaacatttcaagtaggaagaacagcatatgcaaaggcgtgggagcccaagagaatgtgataactttcataacacatgcaggtttgttacatgggtgaattgtatggtgctaaggtttggggtatgactgaacccagcacccaggtagtgagcatagtacctgataggtagtttttccaccctctcccccactccctacctcccctatcttgtagtccccagtgtctattttttccatctttttgtccatgtgtacccaatatttagcttctacatataagcgagatcatgcgatatttggttttctgtttctgctttaattcacttaggataatgcccttcagttgcatacatgttgctgcagaaaactatgatttcattctttttaatggctgcatagcattctttgttatataggtaccatattttctttatccaatccactgtcagtgggcacctaggttgactccatgtccttgctattgtgagtagtgctgcaatgaacatgcaagcacatgtctttttggtaaaacagtttattttctcttggatatatacccagtaatgggattgctgggttgaatggtagttctgttataagttctttgagaaatctttaaaaaactttccacagtgactgaactaatttacattcttaccaacagtgtgtaagtgttccattttctctgcagcctcaccagcatctgttgttttttggctttttaatatagcctttctgactggtatgagatagtatctctttgtggttttgatctgaatttctctgataattagtgatattgagcattttttcatgtttgttggctgcttgaaagtcttctttggagaagtgactgttcatgtcttttgcccattttttaattgggttatttattttttgcttgttgaattaagtttcttatagaatctggatattagatctttgttggctgcacagtttgtgaatagtttctcccattctgtaggttgtctgtttagtctgttgatagtttcttttgctgtgcagaagctctttagtttaattagatcccacctgtcaatttttgtttttgttgcaattgcttttgaggacttagtaataaattcattcccaaggctgatgtccagaatgatgtttcctaggttttcttctagaattgttacagtttgagctcttatatttaaatatttaatccatcttgagttaattttgtacatggtaaaaggtaggagtccagtttcatttttctgcatatagctagccagttatcccagcaccctttattgaatagagagtctcttcccccattgcttatttttgtcaactttgttgaagatcagatggatgtaggggtgtggctttacttatggttctctattctgttccattggtctatgtgtctgtttttgtactgtaccatgctgttttgcttactgtagctttatagtatattttgaagtcaggtaatgtggtgctgacagctttgttccttttgcttaggattgctttggctatttgggccctttttgcttccatatgaattttagaatagctttttctagttctgtgagaaatgacattgaccagaatagcattgaacctatagattactttgggttctatggtcattttaatgatatttattcttccaatccatgagtgtggaacgttttgccatttgtttgtgccatcagtgatttttttgagcagtgttttgtagttctccttgtagagacctttcacctccttggttagatgtattcctaggtattttattttttgtgtggctattgtaaatgggattgtgttctgatttggctctcagcttgaacattataggtatatagaaatgcaaccgatttttgtacattgattttgtgtcctgaaacattactgaagtcatttatcagttccattagccttttggcagagtctgtagggttttctagatggagaataacatcatctgaggaaagataatttgacttcttttcctgtttggatgtctatttatttcccttgcctaattgatctgtctaggatttcccagatttttttttttctcctccgagacggagtcatgctctgtcacccaggctggagtgcagtggcatgatctcagctcactgcaacctctgcctcccgggttcaagaaattctcctgcctcagcctcccgaatagctgggattacagacaccctccaccacgcccgactaatttatgtatttttagtagagacggggtttcaccatgttagctaggcttgtctcaaactcctgacctcgagatctgcctgcctcagcctcccaaagtgctgggattacaggcatgagccactgtgcccagcccccagattttttaaatacatgaaaagatacatattaaggaatcatgctgtccaccctgactctatccaccccaaactaccacctacaagtattacttttattggtttctggtacattcttcaattactttcaacatattggcttttttttctttttcatttcaagttttaatgaaagcttgtatattagattatttcattcctgcatcttctctattgtttcttccttgtatttgcccttttcctttcctacttggtgagattttcctttccattcaaggacatttttgcagtctttgtcccgttttagcccagtggtaaccactttgctggggtgaatgcttacatggatagttgtgccattagccttttcccactgcacccattcaatgtagatgacatatttcttcctgtaaacctggagtactttgccagtttgctgacctttatggtgtcctcatacaacctgaacttcatcatcctttcagatgggcatggatcaaacgttgtacttctatctcagctctgtggaaagagaggaagacattgtcttcctgcaaatgtgggaaggttcactgaaatgccttttgcagttcttgctttggtcagaagtcacaaagggattgaacttcattttggcttttcccacttcagtgatggtcgcaaaagggaagagcactttcaacatattgactttaatgcacacaggtggatacctttagtaaatagttggatagatgtttctggggcttaagagagatgcctgtgttcattatatacattgaatcaccaatgcgggagtaagtaagagttgaagatgtaagcacagatgagaccaccaagagagaatgggaaacctaaggacaaaactctgtaggacaccagggatgaataacaaatacaaggtaaaagggtgaagacagtaaacttaaaagtctctttccaagaagtaaactatgtgctccacagaggagcctatgttcaatcaccactgtttttgtggtgcctagcccagtgcctgaaacctagtaagtacgaaataaccattgaataaagtccagctctcaaagaagagaaaagaagtaaaagaagtaaactttagaagactcaggataagaggaagattgtttaaaatagaaaactactttttcatatttatgtgcatgtgaaaagcagcaagaagaagaaagcatttgaaggttcagcatctaagaccactaaagaatgatgtcaggaagtgaatgaactcagtccttgtgatgtcccttccttatagcttctctttgcttccctggaaatggaaagggtggtctatcattaataatgaagttgcctaatgtcacaggactcattactccaaatatatttgatttttttttttttgagacagagtcttgctctgttgcccaggctggagtgcagtggtgtgatctcggctcactgcagcttccatttcccaggttaaagcaattattctgcctcaatctcccaagtagctgggattacaggcacctgccaccacgcctggctaagttttgtatttttagtagagatagggtttcgctaagttggtcaggctgttctcgaacttctgaactcaggtgatccgcctgcctcagccccccaaagtgctggaattacaggtgtgagccactgcagctggcctatttgatttgaattggatacaagagtccatatgaggtcattccttgaaagcctctgacagtctcaggcacaccctgtgaatttgctccacttgcttgtaccaaaatgttttcactactcatagagatattgctaggcttttctgccaaatttgagacctatattggtaaaatataaaatataggtttaaaaacttgtgtattgttttatataaatgcatttcctaataccactaatgtcatcaattgactactgaatattgatgatagctataagttggaacacagctataattctgttctagtgttgtctacaccaataaggcaatggagaatgtaggctcacctaagagacataaatacatcctagcagtgcttagtcaagtcaatgcatacaacttatagcccagctatcctactcacatgtacgtatcccaggaaattgccacacatccataaggctacttctataaagacgcttgtcgcaggatattgttggcaatccagatgaccatcattgggaaaatggatcaataaaatgtggtaatgcacactatggaataaaatgcagcaattagaaacattaaactaaaagtatacatatcaataagtcttcatagtacactgcagagtaaaaagagtaagaaaaagaacaagaactatataatatttacataaaataaaaatacactttatatgttttacatagacacgtgcaaattcaattacagtgacctcttacagggcaaaagaatgagagcttggaaagtgggtggaaggcaatgaataaatacatacatacaaacatacaaacatacatgtaagagacataatggcatgccatcccatgcattgagagtgtgttgattgtatgctggagtcagctcccatcagcttttgagagctgattatgcacatttcttgccaggtctgcatttagtaacatcacattggtacttaaaagcagccagagtggggcgcagtggctcatgcctgtaatcccagcactttgggaggccgaggcaggtggatcacctgaggtcaggagttcaagaccagcttggccaacatggcaaaaccccatctctactaaaaatgcaaaaattagctgggcgtggtggcaggcacctgtaatcccagctgcttgggaagctgaggcaggagaatcacttgaaccagggaggcagatgttgcagtgagccaagagtgtaccactgcactccagcctgggcaacaagagtgaaactcaatctcaggaaaaaaataagtaaataaaattagccagaatgaaagtatttacaccatagaaatcgcaagtactacaaatcaaggcaccttttgttttcctgagagcctgttgttagacatttgccagcctctagtcctctggactagtaattccagttctaagaatttgttttcaggaaatatctcaaatatggaaaatgttttatatacaaagatatttatccaagtcctactttaataatgacaagttggaaacaacttaaatgtgaaaagggaatggttatgtaaactaatgataaatccagcatttaaaattatatttatgcgaaatctttaattacatgaaaaacacctctattgctggtttaaatgaaaaaaaaagcagaataaaaatatatatgtaaatacaatgtgatactaagcaatcacccagggttcttattaaaatagagattctgattcaggaggactaaagtgatgcctgggattctgctttttttaacagaaataatgccaatgctgctggtgtacataccactttttgagtagtaaaggcatgtagaatacaatcacactcatgtaaaaaatgtatcagaaaaataatctgatggaaaattaaagtgttaaatgtattgagctggggtcatgaatgagggatttttaaaaatatgtatttaactagagtttccaaactttctatattataggattacttgcttctatagtgtggtaaaatgacattaaaaatagtctgcttaggaggactgggcttggtggctcacacctgtaatcccagcactttgggaggtcaacgtgggcaggtttcttgaggtcaggagttcaagaccagcctgactaacatggtggaaccccatctctactaaaaatacaaaaattagccaggtgtagtggcgcatgcctgtactcaggaggctggggcaggagaattgcttaaacccaggaggtggaggttgcagtgagcagagatcgcaccactgcacttcagcctaggtgacagagtgagattccgtctcaaaagataataatagtaatctgcttagccaagtgtggtggctcacacctgtaatcccagctacttgggaggctgaggcaggaggatcactggagcctaggagttcaaggctgcaatgagctatgattgcaccactgtactccagcctaggtgacagagtgacaccctatctctaaaataaataaataagtataatttttaaaataaaaatatatatatttatgcttatgcatgtgtaggtgcagggaatatatgggaaatctctataacttccattcaatttctccgtgaccctaaaactgatctaaaacataaatctatctttaaaaatctgctttaattttctcataaacagcattaaaaattgaataaccaagaccttgtcgaagagcccaattgtacagcctggttgagaatcaagcctatgtatgtttcattcttttttcccactttcttaacgatgccttgaacgtgggtttctgatcctttttaccaaatgcttttatatttttaaccaaaggaaaaagacatttaatcgcagctttttcattttcttgcattttgtccctctctccagtactccgtcttcaaccatgtcccggccctgggagggaagggatcctgcaggacaggactggccagagttctacattacttgtgatggttccttatatccctagaacaataagactgcctagtgttacacaggagtcccctattttggaggcataatgtgattttttttttttaatttttgtagagacagagtctctctatgttgccagggtggtctcaaactcgtggcctccagtgagtccccctgcctcagcctcccaaagtgctggattacaggcatgagccaccatgcccagcctggatttattactttaactaaaagtagttgttattctcgatctgaacaaacaacagaaagttttgtttgcaaagttgtactaagtaacagccaagagacttggaaagaggctgagtggggctcattagactaactctctggggatcccaagtcccatcaaactagggagacgaatagatcccttaagaaaacaaaactgcaacccaaatcttccagccctgatattaccttcaccaaaagatgtttacttcagaaggagcttgctgaaaattgaagattttgaaacactctatactcttcagaccctttgagctgaatgatggcgccaaagaagctattcttctctgagtgaccagggaatgcaactgcccattcaggaagctttgtaagagaacaggtgttcttagaaaataccatcaaattcatgagagatacagaactcacaccaacagtataggaccagcatttagagccaacagacaatattgcaacctcaggaaataaccgtgagaagcagttatctcccgtagtcctgtgagcagtgtgtttggaatggcctgattgggagtctcccggaggactggtagacacctgaccctggacctgccaagtaatctccatcttggcacttcaggggctggcagagcagcagttgcttcctcaaacccttctcttgctggcacttgtttttatattttgtcagaaggtctggcacatcaaggacaggcactgggtctcatttgtaactttagccccacccaagtcaatgctggaacacagcagtgggtaagccaatgtttattcagtcagagccattacattactcacttgcactgagggactttgcctggcctgatctgcccaatgttgtgccatgctgtgctctgtgtaactgtcctcttggaagacacaaagctctggacaacatggaatctgggtgaaactccaaatgcttttgctttgaaggggaatatctcatcctccttctaggtgtagtggaactgttcaaaagagcatgaagtccaggcacagtggctcacgcctgtaatcccagcactttgggaggctgaggagggtggatcacctgaggccaggagttcgagaccagcctggccaaaatagtgaaaccttgtctctactaaaaatacaaaaattaggcgggcatggtggggcacgcctgcagtcccagctacttgggaggctgaggcaggagaatcacttgaacccaggaggcagatgttgcagtaagccgagattgtgccactgcactccagcctgggcaaaaaaaaaaaaagagcctgagttcctaccgtggcaggacacacctccaggtcgtgcatacttttccatggggcactacacaactgaccctaaaaacaatgaatggtctgaagtagatggtgcagccacgtccaggctctcagactgctgggcaagtctccccttcactcatcaagcatgtagaataaaggaggaaatgcctgggattcaggaagtggcctaatttactttggttctggaaggccaagaactagtgacctctgctttgaaacaggaagaaaaaaaagttcatcagcggccctggctagatgctatctccttagctggtcacaatgccttcatttatctgtgctaagctcatgactcagcatgaacctggagctttttcttctagtcccattcacagctggctctttatcaccttaatctctgttcttatgtttctcccaatgtgtaccacccaggacttgcctaaaaaatactctaatactcatcctattacttcctgatgatgtttctgggtgtcatgttcatgttggattctgcttttgtcatgggccacctggggtcatctttgaacaaaatgatgaggctacaaaaacctatttttccaattgttgatggatctagacaatgtgaagcctagaattagcccatgagaaatagccctagttatatcctcaaaggctggtcaactattttgtgttctttaataactgtcagcaaaagttagagataagggtagtttatggaatgacctagaataatgtagcctgtgctaaaaagaaggcaaaacctttctaaggtttttgttttttgggttttctgctgctggaagctccccagcaaacccaaccagacctctgtctactcactcactcaaactccagaccgtctcaaagatgtagactctcccttcagagaatgattgtggagcaatgcctccaacttgtcgtgaggaaaagcaaactctcttcagatggaccaatttcagatgagttggcatgctgctggcaaggttgctgacccctaggaaatgctacataaattacatgtcctcaaccacttgtgtgtcaaacacccaccgaatccatctctcagacatttgagatgtggcttactcattcaataaatgttgttaaagctgattatttcaagaaacttgttctaattactacagaaaatacaaaggttaatagagaaatttttgactcagtgagcaagaagtgaaaaacaactataacaatacaataaaaagatgatatataataaaattatgggaggtacagaggaaagacacatttatttggaagagaagtctttatagaaaagatagcatttattgaggaaagacttaaaggataaataggacttgaaaggctgatgattccaaactgaaagagtgacatgagcaaacacacagttgtgtgaaaatggataaagaatcaaaatattgcaaagaatctattatatccaaagctcagagtttgtggaaggagataatgaaaggagaaccttggcaacaggtcattaagaatgttgaatatcaaactcccattaaggagtgttgatttatgtggatactacttggatttttccttatttgatttgtgagaggtgtgcttttctctcacagatttcctctagtctttttatcaatccaaaaactaatgaaaggtatcaaagattctggcaatgtttaaacagcaacaccctcgaatatgaactctttatggatgaagacccaatattggtataaacacaagaacaaaagttattgaaagcaggtaatattagtataggcaaagggattcattgagaaattaggagtaaaagttttggttaagaaaagtaagaaaggataaattttggttctgagcctttcttgggccaccttgcacatcatcacactcttgtctaacacacagatgcaccagaaaccacacgtgaaacaggtaaccccagaggctctgcagataagcctgagtagtcagtggtgggaagatacatccttcacagaaataaagtacaccttcagccctctctcctttcagttccaggttgttctcaggtccccaacatcacgattcttgatgctgaacacctttgatcagccctccccagcaaaggtcagaggagccatggggaaccacaccaccgtcaccgagtttgtcctgctggggctctcagagacctgtgagctgcagatgctcatcttcctggggctcctcctgacctacctcctcacactgctggggaatctggtcatcgtggtcatcaccctcatggacaggcgcctccacaccaccatgtactacttcctccgcaactttgctgtcccggagatctggttcacctcggtcatctttcccaaggtgctggccaacatcctcacaggatacaagaccattccctcccaggctgcttcctgcaaagtttgctctattttttcttgggcaccacagagttcttcctcctggcggtgatgtcctttgacaggtacgtggccgtatgtaaccctttgcattatgccaccatcatgagcaaaagggtctgtgtccagctagtcctctgttagtggatgacaggattccttctcatcattattccaagttttcttgtccttcagcagccattctgtggccccaacatcattaaccatttcttctgtgacaactttcccctcttgaaactcatttgtgcagacatgactctgatagagctcctgggttttgttatagccaacgtcagcttactgggcactctgtctatgacggccacttgctatggccacatcctccacgccattctgcacatcccctcagccaaagagaagcagaaagccttctccgcctgctcctcccacatcattgtcgtgtctctcttctatggcagctgcatcttcatgtacattcagtcaggcaagagtgaccagaaggaagacaggaacaaggtggcggcattgcttaacaccgtggtgaccctgatgctcaaccccttcatctacaccctgaggaacaaacaggtgaaacaggtgtttaggcagcaggtgagcaaactcctcatataaagctgtgtaaaaaaaaaactgaagctcagcatccccagacaagctaagagaatataggccccttgaaacaactgagcctttccgattcagaaaaagctcggatgatatgtttgtacatgatgtgtttctatgggatcagtcactatgcaattcagcataaactctttggaccctctggcactattaattagtggatttgaatatttctgttcattccatctgtatctgcctggcttccaacaaaatacaagttctctgaaagcagaaactagctctataactcactataagcctcaagtgtcaatccattgtcatagaccatatagattgttaaaaaatacttgtgtgctgattgatcactctgtgtctgtttctccaacgtcctcaggggaaagaacagttatctattagtactgtccttatttaacactgacaatcctgttacggaaatatattagcaagacatcgaaaatgctaaagctaattgcttatcattttgcgtataagctatttatgctcttttagtatttaaattcctagaaattcctcattcttactgataaaggctctttcatctactagttatattacctctctgagccccagttttctcatctatgaaatgaggatgacaatggccatttcaaagaattgtaataaaagtcaaatgagattttctatgtaaaattgcttacatagtgtctggtcctcaataaatattccttcctttcttccaattataatcctactttcccactcccttttttattttattttataccagttatcaacaaaagcatttttgaagattttatattcaaaatgttattttaaatgttaaagttaaatacaagtctagtgatttttctggtcactcctacataattttaaaagtcctctattaactatcagtccatagaatagtgttagtaaactgtccaattctatgtaattattaaaatttggaacttcatttaaagttaaaacttactctttcctccacctagagcttgtttcaggcaagacatcagagagaaacggtgtgtgttgttggctttatctgtcttgactctgcaagcacatctacccgttacctaccgtaaccaaatcaattaacattaattcttccaaagtgattgttacacagaagtcatgttcaagtaaatgtatggtctggtagataataatctatgcctttgaagaatctgaaatcaaacaaagacaatatgaagtatgcaaatactagaattcagggtagaaaatgataatgtgtaagaaaatatcacatgtaactcttcaacaaccaatttgaaaaccaagaggaaatggatgattttccagaaaagaaattttttttcaactgacctaaggagaaatagaaaacttgattagacatattactatagaaaaacctcaaaatcgggttacatatctactataactcaaaaacaaaaagcaaacaacccaattctacaaatgatcaataaatacacgaaaagtgttacatcacttaatcattagggcaatgcaaatcaaaaccacaatgagataccacttcacaccaattaggaagtctatttttttaattaaaaaaatagaaaataacaagtgttgtcaagaatgtggagtggccacttccaaggagttaggattacagtggctcatccctgtaatcctaactccttggaaggcaaagacaggaggatcatttgaggccaggaattcaagaccagcctggacaactgggcaacatagtgagaccccatctctacaaaaaaaactacaaaaattagctggccatggtggtgtgtacctgtagtcccagctactcaggaagctgaggtgagagaatcgcttgagcccaggagtttgaggctacagtgagccatgattgcaccactgcactctagcctgggtgacagagcaagaccttgtctcaaaaaaaaaaaaagagagagagagagaaagagaaagaaagaagaaaagaaggtacagaagtcatctagactttcttataagactggaaaaaagtgtaaagaaattagaactcttgcatatacacattgctagtggaaatgtaaagtggtacagtcactgtggaaaacaggatggtggttcctaaaacaattaaacatagatgtgccataaaatccagcaattttacttctgtgaatatacccaaaagaatggaaggcagggagttgaacagatctttatacacccgtgttcacagcatcattattcacaatagccaaaaggtggtttaaaaaaatgtccaacaacagatgaatggaaaaataaaatgtggcatatacatacaatggaatattacttagccttaaaagcaatgaaattttgatgcacactgtctgtaataaacaaatattaaatcatagatgagcctagaaaacattatgctatgtgaaataagccaatcacagaaggacaaataatgtataactatacttatatgaggtacctagaatagtcaaattcagagatagaaagtagaacggtggttaccagggcccaggccaaggaggaatggaggatttattgtttaatgggtgtagagtttcagtttggtctcaatttattattatttttttaagatacagtctcactctatctcccaggctggagtgcatgggagaagaaaagatctcggctcactgcaacctctgcttcccggggtcaagagattcttgtgcctcagcctcctgagtagctgaaattacaggcacctaccaccatgcccggctaatttttgtagttttagtagagacgtggtttcaccatgatggccaggctggtcttgaactcctgacctcaggtgatctgcgcatgcccagagtttcagttttggatgataaaaaagttctggagatagatactggtgatgattgctcaacaatgtgaatttacttagtgccatttaactgaataattaaaaatgcttaatataatacattttatgtcatatatttttcaccacaataaaaaatacagatctcagatcaataaaaacccaaaaatatgtaatctttgactcccttctttctccaatatcctacaaccaatccattagcaaattctgtgggttataccttcaaaatatatacagaaccctactatttcttaccactaccactgttagcacctttgtctgtgcaaccttccacttcctcttggttctccatctcctacctgtcacctctctcacatccacatagccctgagggagggagaagccacaggtaacgggtagatgtgcttgcagagtcaagacagataaagccaacaacacacaccgtttctctctgatgtcttgcctgaaacaagctctaggtggaggaaagagtaagttttaactttaaatgaagttccaaattttaataattacatagaattggacagtttactaacactattctatggactgatagttaatagaggacttttaaaattatgtaggagtgaccagaaaaatcactagacttgtcctggatttcatcagggatcaaggaaaaataactacatgaacaggtttgaatgagtatataggaagagggtggagtggagaatatgtattacaaataaagggttattatccataatttacaaagacgaattatctattatctaatagataaatgagataaggatatgcatagacacttcagaaaaaagcaaatttaaagagccaataaataaattaaaagatgtccaatcatgttaatagttaaaacaataaaaataaaaataacagctcttaataattaaggaagcattttcagtttttaaaagtaaatttatactttaaaaattactcttgttttaataaatgctaaaatatttacagagaaaatgatatgatgtctgggatttgcttcagaataataaaaggaggaggggagttggtggtggtctaggtgaaaccggtatgacttggtcattgttaaagctagatgatggctacattgatacatggaggtttattataaaatctctttgttgttgttgttgttgttgttgttgagacagagtcttgctctgtcgcccaggctgcagtgcagtggcacgatcgcggctcactgcaacctccacctcccgggttcaagtgatactcttgcctcagcctcccgagtaactgggattacaggcacgtgccagcacgcccggctaatttttgtatttttggtagagacagggtttcaccatgttggccaggatggtgtcaaactcccaacctcaggcgatcctggaggtaatatcatcctctcccccgatggatattaggaactatatcacaagggaatgtacactcccagcgatatggagagtaatatcattctctccccttctggatattacaaacaatatcacaagggggtgcacaccccctgtgatacagggagaaatatcatcctctcttcccctggatattacgaacaacatcacaagggggtgtacaccccatgcgatatggggagtaatatcatcctctccctccctagatattacgaacaatatcacaagggggtgtacaccccatgtgatatgggcagaaatatcatcctctccctccctggatattatgaacaatatcacagggaagtgtgcatcccctgtgatatggggagtaatgtcatcctctcctcccctaaatattacaaacaatatcacaggggatgtacacacgctgcaatgtgggaagtagtattatcctctcgccccctggaaattaggaacaatatcacaggtgggtgtacacctcctgcactatggggagtaatatcatcctctccccactgaacattataaacaatatcacaggtggatgtatacctcctgcgatatggggagtaatatcattttcttcacccctggatattacgagcaacatcacaaggggtagcacactccctgcgatatggaaagtaatattatcctttccccgccctggatattatgaacagtatgacagcgggatgtacactttctgcgacatgtgaagtaatatcatcctatcccaaccccggatattacgaacaatatcacaggagggtgtacaccctttgcgatatggggagtaatattatcttctccctcaatggatattatgataatatcataaatgggtgtacacattctgcgacatgcggagtaatatcatcctctccccccctggatattatgaacaatacctacaataatactacaaggtctacaccttctgtgatataaggagaaatattatttcaccctccttgaaatactatgaacaatatcacaggaaggtgtacacccactgcgatatgaggagtagtatcatcctctcttcccctagatattacgaacaatatcacaaggtggtttacaccccctgtgatattgggagtaatattatcctctttcccctggatattagaaacaatatatcacatgggggtgtacaccccctgtgatattgggagtacatcttcttctttttggatataacgaaccatttggtgggtgatgcacactccctgcgatattgggagtaatattatcctctccttccctgaatattacgaccaatatcacagaagggtgtacaccctcttcgatattgggagtaacatcaccctctccctttttggatattacaaacaatatcacagggaagtaatatcatccacttccctcttggatatcacaatgtcacacggcggtgtacactccctgtgatatggggagtgatatcatcctctccccctatagatattatgaacaatattacaggaaggtgtacaacattcgctatatggggagtaataccatcctctctctcctggatatgacgaacaatatcacaggccaatgtacacccctgcgatataagaagtaatatcattctctccctccctggatactatgaacaatatcacagcggggcatgcaccccttgcgatatggggaataatgtcattctctcaacccctaaatattacaaacaatatcacaggggagtgtatattatcctctccccccatgaatattacaaacatcacaggaaaagtgtacaccctctgcaatatggggagtaatattatcctttcccccattgaatgttttggagaatatcacaggtgggtgtacacattttccgatatggggagtaataatggggagtaatatcgtcctttccttccctggatattacaaacaatatcacaggggggtgtacaccctttgtaatatggggtataatattatcctccccccacccaaatattatggacaatattacaaaggagtgtacacctcctgcgatatggggtataatattatcctccccccacccaaatattatgaacaatattacaagggagtgtacacctcctgagatatggggagtaatatcatcctctttctcactggatattatgaaaaatatcacacgggggtgtacaagccctgcaatatggggagtaatattatcttctcattccctggatattacgaacagtatcacagaagggtgtacacctcttgcgatattggaagaaatataatccgcttttcttttggatattacgaataatatcacagggggttctatacttcctgtaatatcattttctccccacctggatattacaaacaatattacagaggggtatacacctcctgcgatactgggagtaatatcatcctctccctctctggatattacaaaatatcacgggaaggtgtacacccctgcgatatagggagtcatgtcatcctcacccccccaatattacaaacaatatcacaggagggtgtacaccctctgcaatattgactgtaatatcatcttctccccacctgaatattatgaacagtatcacagaagggtgttaaccccttgagatatgggaagtaatatcatcctctcccctcctgggtattacaaataatatcacaggaagttctacagctgctgcgatgtagaaagtaatattatcctctccctccctggatattgtgaacaatatcacaggagggtgtacaccccctgcagtattgaggttaatatcattttctttccacctggttactacgaacaatatgacagaacggtgtacaccccctgcgatattgggggcgatatgctcccccccccaccgggtaatagcaaaaatatcacaggtgggtgtacaccccctgcaaaattgggaataatatcatcctttccccgccttgatattacgaacaatatcccgagggggtgtacaccccctgcgatattaagagtaagaacatactctcacccctggatatcatgaacaatattacaaaggggtgtacacgccctgcagtgttaaaagtaatatcatcctctttccccctggatattatgaacaatatcacgaggggtatacaatctttgcgacattgggagtaatatcattttctcccccagtgcatattacaaacaatatcacagaaggatgtacaccctctgtgatattgggaatacttttatgctcccccctgaaaaactataaacaacatcataggggagtgtatactccatgcgatattggaagtaatgccatcctctccccctctgaatattatgaacaatatcacaggaaggtgtacactctgcaatattgggagtaataccaccctctcctcccctggatattatcaacaatatcataggatggggtacacaccctgtgatattgggagtaatatcatcctctgccaccctggatatgacgaacgttatcaccgagaatgtacacacagggtgtttacgatattgcgagtaatatcaactcccccctaaatattacaaacaatatcacaggggggtgtacacccccaaaatccacaggggaagagaataatattactcccaatatcgcagggggagtacaatccccctgtgatattgtacctaatatcaaggaagagagaggatgatattacttccagtgtcgcagggggtgtattgttcctaatatccaagaggagacaggataatattattcccaatatcgcaagaggtgtgcatcccctctgggatattgttcctaatattcagtgggggagatgatatcactcccaatgttgtagacagtgtacaccccctttgtgatattgttcctaatatcctgggaaaaagagaatgatgttactcccaatatcgcagaaagtgtacacgccccctgtgatattattcctaatattcgggggggagaggattatattactcctaatatcgcagggggtgtacgccaccactgtgatgcatttcctaatatccagggaagaagagaagaatattattcccaatgttgcagggggtgtatacccaccccatgatattgtgcctaatatccagaaggaaacaaaatgatattactcccaatatcgcagggggtgtacacttttcctgtgatattcttcctaatatcacaagggtgagaaaaggaaaagtcccaatactgcagggggtgtacacccccaccgtgatattgttcctaatattcatggggggagaggatgatattacttccaatatcgctaggggtgtacacccccacgttatatttcccgaatatccaaagggggagaggatgatattactccaaatatcgcagagggtgtagaccccttctgtaacattgttgctaatatccaaaaagggaagggatgatattactctcaatatcgcacaggtcatacacctcttctgtgatactgttcgtcatatccacagttgaaaataatgatattatgcccaatttcacagggggggtacaacccccaggtgacaatgtttctaatatccaggtggagtgaggatgatattacttccaatatcgcagggggtgtatgcaccttctttcgtattgttcctaatatccaaagtgagagaggataatattacacccaatatcaccggggctgtacacctcacttgtgatattgttcccaatatttagagagagagagagagaggatattatgcccaatattacaggggggtgaaccactgttcctaatattcagggacgcagaggatgatattattcccaatgtcgcagggggtgtacaccccttctgtgatattgtttctaatatccaggggaagagagcataatatttctcccaatattgcagggggtgtacacccaccttgtgctattgtttttaatatccaggacagaagaggatactattagtacaaatatcagagggggtgtaaaaccaggggtaaagagaatgatattactcccaacattgcagggaatgtacattcaccttgtgatatggtttctcatatctagagagggagaggataatattactctcaatatcgaagggggtgtacacccctcctgtgatgttaatatccaggttaggggaggataatattactcccagtaatgcaaggggtgtacacccctcctgtgatatttttcctaatatccagggtggcagaggttgatattactttcaatattgcagggatgtacacatcccttgtagtattgttcctaatatccagaagaaaaaagatgacattactcccaatattgcagcagttgtacaccccctttgtgatattgttcttaaaatatagcagggagaaaatgatattactctcaatatcgcggagagtatacaactccccgtgatattgttcctaatatccaggttcggaaaggatgatattactttcagtatctcaagaggtgtacaccttgcctgtgatattgttcctaatttccatgggcgaagaggataatattactcgcaatattgcagggagtgtacagccctcctgtgatattgttctgaatatccagaaaggaagaaaatgatattacttccaataacgcacgggatgtacacccccacctgtgatattgtttctaatatgcggaagtggagaggattatattactcccaatatcgagatgttgtacaacctttctgtgatattgttcctaatatccaggggggtaaaggataatattactcctaagatcacagttggtatacacctctctgtaaggctgtttctaatatccagggaaggagaggatgatattactctttttttttttttttttttttttgaggcggagtcacgctctgtcacccaggctggagtgcagcggcgcgatctcggctcactgcaagctccgcctcccgggttcacgccattctcccgcctcagcctcccgagcagctggaactacaggcgccctctaccgcgcccggctaatttttgtattttttttttttttttttagtagagacggggtttcaccgtgttaggcaggatagtctcgatctcctgacctcgtgatccgcccgcctcggcctcccaaagtgctgggataacaagcgtgagccaccgcgcccagccgtgatattactcttaacatcgcagggggtgtacacttcccctgtgatattgtttctaaatccagaggggaagtggatgatattactcctaatatcgcacggcgtgtacacctttcccaccatgatattgttcctaatatccagggcgggagaggatgatattactcccactatcgcaggggttgcataccccctctgtgatattgtttttaatatccagggggcagaagatgatattactcccaatattgcagagggcgtacaaagccccgccccgtgatattcttcctaatatccaggaggggagaggatgaaattactctttatattgcaggaggcatacacatccgtgtgataatgtttttagtatcagttggggagaagatgatattactttcaaaatcgtgggggtgtacaccccccgttgtgatatcgtttataatatccaggaggggagaggatgatattactcccaatatcgcagggggtgtgcaccctccctgtgattttattcctaatattcaggtgggaagaggatgatattactcccaatatcgcaggtggggaaaacaccccgcctgtgatattgttcttaatatccattaagggagcagatgatattactcccaaaattgcagtgagtgtacacccaccctgtaatattgttcctaatatcccgggagggagagtatgttgttactaccaatttcgaagggggcgtacaccccctctgtgatactgtttttaatatccaaggggaaagaggattatattactcccaatatcgcagggggtgtgcactcctatgtgatattgttcctaatatctagcgggggtaggggataatattactccaaatatcgcagggaatgtacacgttctctgggatattgtttttaatatttgaggatggaggatgatattacttccaatattgcagggagtgtacacccaccctctcatgtttttcctaatatccaggggaaaaactattactcttaatatcacaggaggcgtacacaccccagcccccgatattgttcctaatacccgggggggcggggagaagataatattactcccaatatcagagaaagtgtacattccttctgtgacatcgtttctaatatccatggaagaagattatattactttcaaatttgcagatggtgtacacccctcccccccgtgatatagttcctaatatccaggaggagagaagatgatattactctcaatacctcaatatcgcagggaatgtaaacacccctgtgatattgttcctactacccaggaggaggggataaaattatattactcccaatatcgcaggcgctgtacaccccactgtaatatttttcctaatatccagagcgagagaggatattattactcccagtatggcggaaggcgtacaccttccctgtgatactgttcctaatatccagggggaaagagtatgatattactcccaatattgtaggaggtgtacacaccccagtgatatttttctctaatatgcagaaggggagagggtgatattactctcaatttcgcaggtgctgtacaccccctgtgatattgctcgtaatttccaaagagggagatgatattactcccaataacataaacacactgtgttgacaactccctgccatgtggctcgtaatgtgggagaagggggtgacattacccccatatggtgggggtggacaccctcccaccgtgtggctcataacctccagggcaaatggggggagtgatattactccccatatggtgggggtggacacccccctgccatgtggctcataacctccaggggggtagaggggggtgatatcacttcccatatggtgggggtggacaccctcccaccatgtggctcataacctccaggagggtagatgggcgtgatatcacttcccatgatgtgggggtggacaccctcccaccatgtggctcgtaacctccagggcgaatggggggagtgatattactccccatatggtggggatggactccccttgccatgtggctcgtaatatccaggggggaagaagggggtgatattactccccatatggtggaggtggactccctcccgccatgtggctcgtaacctccagggtgaatggggtcagtgatattactccccatatggtgggggtggacacccccctgccatgtggctcgtaacctccaggtggggagaggggggtgatattactttccatatggcaggaggtggacattatcattattaattcatttttatattattattaagactaataaacatattaaagcaatgactcaacaaatctagctttatattatttcacttaccacttctatttttccaaaacaactttttaattaaaattataaaattaaattaataaaaaatattgaattaaattatttaattaaattaataaaaaattaatagaaattttttaaattttgtagttgcctttttgagagtttttttagaatagttttctctttggagaatataaagtacacagaattttcatactcatagtttctatcttcttatcattcttgtttatattatgcaataatttaccatgtagatcttcactgcctctgtaaagtattgtttgcataattccattgagtttttctgctcagcaattatgtttttaagctatgatttttctcacttttctcagtattttttctataatttctaaattaattttatataatttatattagtgcaattatcgttcaaatcacattttaaaatgtaaacattaggaaagatttttcacagctttgggttagttcttttcagagaaaggtatttgttaagatttcacatattaggctctctctttaaattcccaaatcaacccactttctctgttagaaaagggtctacaattgcaaagaatttggaagtgatgtggtttttgtccgtcttaatcttgcacaagcaacagaaaatattgaatgatttttcatctgtctatggatttcgtagtctgcactgagtaagacaggacatacataggcagggcgaatacttgaaaaatattttgtcttgcaagcactatagaaagtcaaactaaataatgcaaaaatccatctctaattgtctttaaaggaagcatccttggtaaggctgaagatttactcagaatcttgtttacagtaagtgcaaactgtaagtgctacatatagtagaattcagcctatccaaatgaatgcttggaacaattgttataaattcagatgcaacagatttaaacacatataccttaatatccaacttctcaagccctgttctgaaggacatgagcttctgtcattatcttaacaaatagcagaaaaacaactttatcaatgttaagaaaagatactctgggtgactttactctgagttgaaaggccctccttctaaggaattagtgttctggagtaaaacttggatttcaaaaacctaaattctagcagcacacaccaccctcccccctcaactctgccacacacacacccttagcttgagttggcattttatctaaggtacactatgagcaatcattagttatgcccttgcattttatccttaccttcaaaactcatttttaggcaggtttcttattctcctcactggattgtttcatatctcactttggtttcctttacatccggtttcttgaaatgtcaatatttagatgatattctctggcttctgctgaaatagataatttttcctattgaatttatttgatcatttacatggattttaagtatataacctcaaatttttatttttaaccgaatatactttaataatatgcatgggtcattttataaaatgttttttagcaataattatatttcagaaatatattttttatttagaaatttcactttctgtgaactgccatattttcccatgaaagtaatgatttttcacgtttagcaattccttgcataaggtaggttgtgcttgcctaattttggcatgcattcaagaatggataaatcaagactggctacaacaaatgttagtgaggatgtggaatgacctcctatattgataatgaaaaggtaaagtggtataatgaaatttgaaaaactttttgcaatttcttataaaattaaacatgcatctattctacaaccacacaattctattcctagttacttttccaaggaaaattaagatgtatgcctacaaaagacttataaaaatatgttcacagcaacttcatttacaacagaaaaactgaaaataacccagaattcaatcagcagtacgtacacacattttagtatatttgtttaatagaataccacttaatgataaaaaaaaaaagaaacacacaacatggatgaatttcaaaaacattctaaggagaagaaaaagctgggcacaaaataatacatactgtgtaattccaaatatatgaagttctagaacagataagtggttgttctgtgcaggaagaggcagtaagaaacttttgggtgtaataaacatgcttttatcttgaaaagggtggggcttatacttgtgtatgcatttgtgaaatgtattaagttgtaaacctaagattggtccatttcactgtatgtaaatgtaagtttaaaaaaagcaaataagtgataagtttgatgttttgaaataaacattaaactccattgagttggttttcttttatagattagtccattgtcatgctgctatggagaaacacccgagactgggtaatttatgaagaaaagaggtttaattgactcatggttctggatggctggggaagcctcaggaaacttacagtcatggtggtggaaggcacctcttcacagggtggcaggagagagaaatgccaggcaaagcgggggaaagccccttataaaaccatcagatctgaggagaactcactcactatcatgagaacagcatagggataatcgtcgccataatttgattatctcccaaaacacatgggaattatggaaactacaattcaagatgagatttgggtgtggacacagccaaaccatatcaagtggtatcttttaaaattctgaaactattttttatcaacttaagcaaataaattatcttttgagaattacaggaaccagatttctcacagttcgaacacaatgttaccaatggaaaggcagaagactagaatgtaccctgtggtgttttgttttgtttttttttgacatcagaaatgatgtatcaatatgcaatcatggtttcaacatatgtaaactatgtgtctatatcgtagctttctgcagaaagagtctagaaataataacacacaagtaccactaaacttatctactatttgattattaaatgccacgtttcattaatacgaacaagaattccttaaagaaattgctgatctcagagttggaagtgagagcaagtagaagatgggcctgaagtaactttttgcatcagaaaataagaacgtgctaggtcttagtctgttcaggctgctataacaaaataccgtggactgggtgtaacaacagacacttatttcttctacttctggaggtgaagaagtccaagttagaggtgccatccaatttggatcttggtgagggtccatttccgtctctttcctctctggtgtcttcagtgatggagagagagagagttctagtttgtcttccacttccagtaaggacactaatcacatcatgaggccctacctcatgacccaaaccaaattaccttccaaatgcccctggctccaaatggcatacccctgggagttaaaactttaacatataaatttgggggtgaggacacaaactttcagttcttaataacatgacaaaaaattgttatagtgataagcaggaaggaaagggatacaaagtacataatctatgagcatagctatataaactaataaacaataaataaaaatttaaaaatacaacagaagtacatcgaaatcaggcctggagcagtggctcacacttgtaatcctagcactttgggaggctgaggctggaggacagcttgagcccaggagtttgagaccagtctgggcaacatggtaaaaccctgtctctaaaaaaaaaaaaaaaaaagaatcagccaggagtggtggtgcatgcctgtagtcccagctacttgggaggtgaaggtgggaagatcaattgagcccaggaggttgagactgcagtgagctaggattacaccactgcactccagcctgggtgacagagtgacatactatctcaaaaaaaaaaaaaagtacatcaaaaataattttttgttttgtttttatttttgtttgtttgtttggagatggagtcttgctctgttgcccaggctggagtgcagtgacacaatctcagctcactgcaacctcctcctccgggttcaagtgattctcatgcctcagcctcccgagtagctgggattggaggatttattgttcaatgggtatagagtttcagtttggtctcgaatttttttttcaagaccttggcctcccaaagtgttgggactgcaggtgtccggccagtagtacaaaaattttaaagacgctgagtaactgtgagcaaaattatgagatttttactctgtttgccagtcttcatagtccctgccacacctaattcaacattttgttgttgttgttgttgttgcctgtctttatggaacctatttaaagaaatcaacttgatttttacacttgtatttcattggtttatttttagttagttaaaatacgtaattacaataactagtccatttatgaaaggaggagtttggaaacaactgattcttggtataagtcaactggtggaacaaaagtgtgtgtgtacagaagcctactagctgcaaaggctcagcatgctgtggacatcaatcatttgggagcacacagatggagaacagagctattggaagcatactatttgcattcatatcccagctcagctaccttttagccatttaatcttgaacaagaaagatttctctgtatctcagttatacacatggcaatatagtatctaccttataaaatccttataaacattaaataggtaaatattttgttagaatgctgaacacagggcttggtacagagtaagtaccatgttaagtgaaggtattatcttttagagaaggaatcagttgaataaataaagctgaattaagagatctcagccaggcacagtggctcacgcctgtaatcccaacactttgggaagccaaggcaggcggaccaaaaggtcaagagattgagaccatcctggccaacatggtgaaaccccgtctctactaaaaatacaaaaattagctgggcgttgtggcatacacctgtagtcccagctacttgggaggctgaggcaggagaatcgcttgaacatgggaggcggaggttgcagcaagccgagattacgccactgcactccagcctgggtgacaaagagagactccatctcaaaaaaaagaaaaaagagagagagagatctatcttagggaaaaaataagttagatacttcatattttaaactgaaattaattcaaaatgaattaaacagataaacataaaacatgaacgagaagaaaagtttaggtagaaaattatcttatttaaggtgtgtagagttgttttaatggaaaaaatatgaaaaaataaatgtaaatttggctatgtaaagtttttaaagttctttaagtcagagaaaaataatgtaatggccatatgcagtttctacctgcctagcatccattacccattcttaccctaataggatcctgatttttctcaagaaagcccctttccattctcagtctatgtagcccaggtggcactgacttcattctcaatgaatcagagcacgaccatggttattggcttagggatggcctcacaaccatctaatcaggccaatgagacgaaatgagtcaattcagagacacttatgagaactgatgggagagaggctctctctctctctgaacttgaaactgggagaatgtagacctgaaaaaagtaaaaaccactttccaaatcattttaagaggctaacaaaaccttgatatcaaaactgaaaaggacatgacagtaaagaaaaattacaaacgaatctttctcacaaacatagctacaaaaatcctaaatatcagcatactgaatgaaatgatacacaaaaaaaataatgcatcttgcaggcatggtggctcacgcctgtaatcccagcactatgggaggctgaggcaggtggatcatgaggtcaggagatcgagaccatcctggccaacatggtgaaaccctgtctctactacaaatacaaaaattagctgggcatggtgacatgcacctgtagtcccagctactcgggaggctgaggcaggagaattgcttgaacctgggagttggaggttgcagtgagccaagactgtgccactgcagtccagcctggtgagagagtgagactccatctcaaaaaaaaaaaaatagttctttgctggtgcagtggtttgcacctgtagtcctagctactagggaggctgaggcagcatgatcacttgagtccaggagtccaaggctgtatttcactaagatctagcctgtgaatagccacttctctccagcctgggaaatagagcaagaccccatctctaaaaataaaaataaaaaaaagaaataactctttatcacactcttaagttaaagaaatatttgtaatctattaaagagcaactatagaaacctatagcaaacatcatactttgtcgtaaaatgttgaaagattaccttctgagatcaggaataaatcaccatgctatcacccacttctactgtactacagttgctatccaatgcattatagcaagaaaaagaaattaaaggactaagtattgagaatggaagaaataatgctattattatcaccactgatatgctcttggaattaataatttcaattgatacaagttcagtccacaaaaaaaagctttgttttatatatcagcaaaaaatagttagaaaattaaaatgtttatttgttagtccattctcatactgctataaagaaattccagagactgggtaatttataaagaaaataggtttaattggctcacagttccacaagctgtacaggaagcatggcagcatctgcttctaggaaggcctcagggagctttgattcatggtggaaggcaaaggaggagcaggcatcttgcatggcaggagcaggaccgagggcagggggaggtgccacacactttcaaacaatcagatctcatgagaactcactattgtgatgacagcaccaagggagatggtgttaaaccgtgagaaactgcccccatgatccaatcacctcctatcaggccccacctccaacactggagactacaattgaacatgagatttgggcagggacatatccaaactatgtcagtttaggagctaagtgcagtggctcacacctgtaattccagctactcaagaggatgaggaaggctgagcatggtggctcacgcctgtaatcccagcactttgggaggccgaggcaggtggattgtgaggtcaagaaattgagaccatcctggccaacatggtgaaaccccgtctctatcaaaaatattaaaaaattagccaggtgtggtggcatatacctgtaatcccagctacttgggaggctgaggcaggagaattgcttgaacctgggaggcagaggttgcagtgagccgagattgtgttactgcactctagcgtgggtgacagagcgatactccctctcaaaaaaaaaaaaaaaaaagaggatgaggaatgaggatcacttagggccaggagtttgagaccagcctgagcaacatagcaggaacctgtctctaaaacaatttttaaaaattagccagcagtggggacaatcagtgacagcaggtggtctctaagcccagttgccgcctaatctttccctaactttgggtgctacctttagaggggacaattgtgggcagagaagctgcatctagatggctgtgagaggcaggaggggttcctgggggctcagctggctctgcaggggaacaggggataggagtcaggattgtccaggagggtggccagtaaggtaagaggttaccttactgagaggttaccagaatagggctcctacctgagctccacacctgcagggccccaggcaggacctccctagtggtagcttccacagctacagggcaagtgaagcaggaggggcagagctgatcttgcttgtctgaagggcttgaagccagcacccctgggcacgggctgtgaaaccaaggagcagcctgtggaacccccatcatccaccctctacagagggctcatagaaaaaattgtaatgttcctcccagcttctccctctatccacttttgaacagagtagattgccttgctaggcccagagccaactttgacaagaagcggtcaggctgaatcttcaacccatagcagagcaaggtccccctggccacccagaaattcagcactctggacaacacaaagaggaagcatttactggcaccttttcctccacccatttctgtactaatagaaatttctgtgaggatggaaatgttctatgtctgcatgatccaatgtggtagcccctagtcacatgtgactgttgggtacctcaagtgtggctagtgcaactgaggaaatgaaattttaactttatttaattgtaatgtcttttcctaaatgacaaagatttgtttttatgttatgggtgctgtgaatcattacaagatcacatttctctctgtgctggctgctaggaagcttgtcagttttggatcctatggttgcaagagtatatagcctcatggcatgcgcctttaatataacctcattctcagcttccttttatttttactttttcccattgccctgcttaattttttatcttgtcaatgtggtaagccttgaatcctttgtgctgggataacaggtgtgagccaccacgcctcctggccctagaatgaaatttttaactcaaaactaaactataagctatttataggaggtaaaaggatgaaaaaatatatactagaaaaacgttaactaaaaaaatcggcatacgtttattaatattaggtaaaatagactttaaagccaaaaatagcattatgaagatgaggaggatcattgcttgaaggggtgggttgcccctccacacctgtgggtgtttctcgttaggtggaacgagagacttggaaaagaaaaagacacagagacaaagtatagagaaagaaataaggggacccagggaaccagcgttcagcatatggaggatcccgccagcctctgagttcccttagtatttattgatcattagtgggtgtttctccgagagggggatgtgtcacagtcacaagacaatagtggggagagggtcagcagacaaacacgtgaacaaaggtctttgcatcatagacaaggtaaagaatcaagtgctgtgcttttagatatgcatacatataaatatctcaatgctttacaaagcagtattgctgcccgcatgtcccacctccagccctaaggcggcttttccctatctcagtagatggaacgtacaatcgggttttataccgagacattccattgcccagggaccagcaggagacagatgccttcctcttgtctcaactgcaagaggcatgccttcctcttatactaatcctcctcagcacagaccctttatgggtgtcgggctgggggacgatcaggtctttcccttcccatgaggccatatttcagactatcacatggggagaaaccttggacaatacctggctttcctaggcagcggtccctgcggccttccacagtgtttgtgtccctgggtacttgagattagggagtggtgatgactcttaaccagcatgctgccttcaagcatctgtttaacaaagcgcatcttgcaccgcccttaatccatttaaccctgaggtgacacagcacatgtttcagagagcacggggttgggggtaaggtcatagattaacagaacctcaaggcagaagaatttttcttagtacagaacaaaatggagtctcctatgtctacttctttctacacagacacagcaacaatctgatctctcttgcttttccccacattgcttaatgacataaagttccagcactgaataacatagctgcaaaaaatataaagcaaggattaacatgatgaaaaggaaatatttctaaaaccatcatcatagtagaatatttcacacaattattttagttattgatagttgaggcagataaaaaaataaatcttttgtgatcaagacaaggtatagagagtgatcaaacacacagacctatacctctgccactttttgctcatgcccttgggccctgactggacccacaagcaattcaccctggtcagctgtggtctctgcccttcctcggagagttagctgctcattatcccagtccacagaggctgctgtcagctggtagagtacttggtcccaagcagcttctcttataggagctgatgcaggctgtgagccatctccactcccccacggtgtctccagcacaacatcctcctcccaacacatgggctgctccccacacaggacccacatcaccacatggcagtgtggagcctggggaggcagtggcactgctggaggggctgactccccattgggagtcacagccatgaataagaggagtggttccatcagcatctcccagtccatgggggttgaggggagcaggtttcctgttggggaagacagcaggggcatgggcagtgtagtactctggacttcacctccccagggcctccttggtgtcagggaaaccagctccccattcaaaccttacttgaatcatccaggccctgttccaattgttggcctggctcaaggtctggcccatctgctgctgagcccagagaggggtgccggggttagctggggactgggttcgcctggcctggagggtatgagaggcttcagccagccagagccactctgtgccgacagtccagcatctcagtactcaaagcccccacatgcttgtgagatagggttgggggggtcaatgattaaggaatgcagagcccttgacaatcatacacgcatgcgcagctggcccatgccccttgtctgaaaccttggctgcctgctcaccaccttgagcaagaaggccaagttccttatggcctacaatgacctctctggccctgggcccctcccagcgtcatcccactccactccctattcccacttgtagttgttgcttgtctctgtgttttcattaatgtcttctcactctgcagggctgcctcctgcttattcttccagatatggctcttactttcctgactacctcaggcagagttaatcaccctaactctaatcacccataatacatgtccttgtgctcatcactggttgtttcatggtattatcattatagatttacccacttatctctctagctaaacttaatagtaaactctgcataatgtctggcacacaacaggtggtaaataaatatttgctggatacaagtctccccagtagctgggattacaggcgtgtgccaccacgtctggctaatttttatatttttagtagagatggggtttcactgtgttggtcaggctggtctcagactcctgacctcgtgacctgcttgcctcggcctcccaaagtccggggattacaggtgtgagccaccgcgcctggcctgtttggttctttattcttgggaactgaaggtccctgtctgttacagtgtaaccacccaatgggttcagcttgcctgctgcctcaacagagccgatttatcaagagaggaactgcaatagagaaagagtaatttacacagagccagctgtgcaggagactggagttctattattactcacatcagtctctctgggagcagattttttaaggacaacttcgtggatggagggaagccagtgagccaggagtgctaattggccaggtaggagatgcaatcatagtgaattgaagctgtcctcttgcattgagtcagttcctgggtgggggccacatgagactgccagatgagccagttaatcaatctggatggtgccagttgatctgtcaagtgcagggtctgcaaaatatctcaagcactgatcttaggagcattttgggaggtcagaatcttgtagcctctagctgcatgactcctaagccataatttctaatcttgtgactaatttgttagtcctacaaaggcagtctagtctccaggcaagaaggatgattgttttggaaacgggctgttattgtctttgttttaaacgataaactaaggccagtcccggtggctcacacctgtaatcccaccactttgtggggaggaggcaggcgcatcatgaggtcaggagttcgagaccagcctggccaatatggtgaaaccccgtctctattaaaaatacaaaaattagccgggcgtggtggtgggttcctgtagtcccagctattcagaaggctgaggcagaagaactgcttgaactcgggaggcagaggttgcagtgagccgagatcacaccactgcactccagcctgggcgacagagcgagactctgtctcaaaacaaacaaacaaacaaacaaacaaaaaactataaactaagttactctcaaagttagttcagcatacccccaggaatgaacaaggacagctttgaggttaaaagcaagatggagctggctaggtcaaatctctttcattatctcagttacaattttgcaatggcaggtttctacaataggtggctagtcaggcatgagcagggcaggagagagtttcccccacccaccagaaatgtcaggccaccatcagattatggtctgacagctgtcacactaaaatgataattggtcacagcaccagggagaggcaatttcccaacagataaaaatgcggctgggcgcggtggctcgtgcctataatcccagcactttaggaagccaaggtgggtggattgcctgaggtcaggagttcgaaaccagcctggccaacatggtgaaaccttgtctctaccaaaaatagaaaaattagccaggcatggtggctcacacctgtaatcccagcactttgggaagctgaggcgggtggatcacttgaggtcagaagttcgagaccagcctggccaacatggtgaaaccctgtctctactaaaaatagaaaaattagctgggtgtggtggcacgtgcctgtgatcccagctactcaggaggctgaagcaggagaatcacttgaacccacgaggcagaggttgccgtgagccgagatcatgccattgcactccagcctgggcgacagagcaagactccatctcaaaaaaaaaagaaaaaaaattcaaaaattagctgagcgtggtggcagacacctgtaatcccagctactcaggaggctgaggcaggagaatggcttgaatccgggaggtggaggttgcagtgagccaagccaagatcacaccactgcactccagcctgggcgatggagtgaggctccatctaaaaaaacaaaacaaaccaaaaaacacttgaaatcagcagcttccaataaaatctcaggtagtgagtgagtgggcatgagcatgcacagtaaaacccattaatgcctagtgttccattattggaactctaagcatgtgggagttatttatatcctactgctcaatgtcatcacgaaggtctgattgcaaaaattcaaaaaattgcaacctcaggcatacatgggttaagagacaaaatggcagagtatgaccttccaggggcattccaccagaaaagggaagaaagtctcaggtgagcatgcctacagcttctttttgttttgttttttgtttgttgtttttttgttttgttttgtttttgagagggagtcttaccctgttgtccaggctggagtgcagtggtgcaatctcggctcattgcaacctccacctcccaggttcaagcgattctcctgcctcagcctccccagtagctgggactacaggcgtgcgccaccatgcccagctaacttttgtatttttagtagagacagggtttcactatgttggccaggctggtctcgaactcctgacctcatgatccacccaccttggcctcccaaagtcctgggattacaggcatgagccaccatacccggcctagaactttttttttttttagatggagtttcgctttttttgcccagcctggaatgcaacagtgcaatcttggctcactgcaacctccacctcccgggttcaagtaattctcctacctcggccccagtagctgggattacaggcccccaccaccacgcccagctaattttgtatttttagtagagatggggtttcaccctgttggccaggctggtctcgaactcctaacctcaggtgatccacccacctcggcctcccaaagtgctgggattacaggtgtgagccaccgcacctggcctacaacttcttaaatacactggccatgcttacttctcaagcacaaggaaagcaccatgcatatgggcaggtcaccccaagggaagaatcaggagaaaagggccacaagaccccagaagtatgccaacatataaaatcccaagtcaaaaggtcaaacaccacacttgacctccacggtcccctcttgggtcttttccaagtgtactgtcttttctttcctgctctaaagctttttaataaacttccactcctgctctgaaacttgccgtggtctcttttttctgcttatgcccctcagtcaaattctttcttctgaggaggcaagaattgaagttgctgcagacccatatggattcactgtcggtaactcagatatttgccgcccctaataggctgaggccactctttggtgggatcctgaagccctagagaagggatacctgtccgtcattgcccagaggggtgagggaatagccagggttcttttctattttcagactgccagtgaaccagcttgagtacgctttggcaattgagggtgtctgaccgagggcactccctggtgttacctaaagccaagacaaaagagtgaatttgctattgctcatcagggtggcaagcccacttttactttaacactctgtaaattgtgccttggaaacaagcagcaacgatttcaactcaactctgcgcagacacatgctactagttgcagacctaattttggattcaatttcatcacaagcactgcatcccaagttatgggtgagttctccttcacattaggttggagctgaccactcaaacaagggcatgcctggactggtcctccaggcaagggcaggccctctatccgtggtgggatgcccccaagtagagtgagccaaagggaaaaggaaggtccaaatccctcagggatgcctcggggatcttctagtcccttatctaaacccaacacgggtgcaattcattcttcaattcattccaattcacccttgggttgcattcttaaaaattcatcccattttaacccacaaactctcaaaaagaagtgtgtaattttcttttgtatttagaggtcccatatgttcaggtctttttggctttatcccaaaacccaaaattacataaaaattgtcacacatgcttccaaggaacttcctctctccccaattcttttttttttttttttttgagaccgagtctggagtgcagtggcacaatctcggctcactgcaacctctgcctcccactctctcaccaattctgatgtcgtagatgatctttccttttgcctgtcacactctcctcagcctgcacctgcttcacctataccctctccatttgctccatccccgagtcaacgcccctccatatccagacacttcatccccctcacatactctcatgggagtcacatatgccactagtacagagtcctcagaatatcccaataatgttttgcctttccatgaggtgacaaatggaaacttgggaacaattcaagtcatgtccctttcacaaatttaatccaagttgggttcatttagccaggatccctttaagctcattaaagaattgtgggcttttgactattgcctttgatttaacctggcaagacatgtatgtggtattaactacttgttgttcccacaaagaaaaatcatgcatatggtctttagcttgagtttttgggcagatgaagctcatgctcataattaatggtaatagagccagggcaataggtgaccacaacacagaaaccagctggcaatatcaggctgctgatgccagcccaaacagaggcgggattacatgatagcttgcttgttggaaggaatgaaaaagcctgtaataaaacctattaatttttcttttttctttttcttttctttttttttttttttttttgagatggagtctcactctgtcgcccaggctggagtgcagtggcgcaacctcggctcactgcaacctccacctcctgggtttaagcaattctctgcctcagcctccagaatagctggcattacaggtgcatgccaccacgcccggctaatttttttgtatttttaatagagacggggtttcaccatcttggccaagctggtcttgaactcctgacctcatgatccacctgtctcagcctcctaaagtcctggaattacaggcgtgagccactgcaccgggccaatttttctaaattaccggaaattacccagcagccatctgagaaccccacccttttccaaattagactggtggaggccatacataaatatacaaatttagatcctgaaagccctgagggccagttcactctggccatacattttataagtcaggcttccccagacatcagacaaaaactccaaaaattagagcaaggcccacagattccctttccgactttattaaatacagcctttaaggttttcaataactgggaggaaacctcaaaaataaaaaagactcaattggaggaagaacaatgccatcgccaagctaattatgtggtaacacagcattgacacgttctttttcgttagttaataaccccaaggcatgtccctataatactaacagaatgggggcctgtcatcactgcagaaatccaggatattggcgtagagaacattccaaacctccaggttacaaagctgcccccaggatcctgtcctcattgtaaacaagagggtcattggaacagcgagtgtccttctctccctcatgaggaggggccacctcctccttctgggccgtcgcagccacaacctcaccaacctacccaacaagggggtcctgcagaaagaggacaagggcaagggcaagcacaagcacctctaactctattcctggattatgatcgagcctctgaaagtcatcccctagatgactgatggggccttgaggccatccaggcccttaccttttccaactctatggaggagcctcagtcaatccagctgtggctgaacaagaaataatgttcctcatagatacagggttcagcttcaaatgttgaccaaatgtgccagtcctccatattcctcacgggcattgacgaaaaaccccaatgaggctgtttcacacagccactcccttgaaaaatggaaggctatttctttacccactcctttttagtcctaccaagttgctctgggttttttttgttgttttttttttttttttgagacagagtcttgctctgccacccaggctggagtccagtgacgtgatcttggctcactgcaacctccacctgccgagtttaagcgattctcctgcctcagcctcctgagtagctgggattacaggtgtgggccactgacacccagctaatttttgtatttttagtagagatggggtttcaccatgttggccaggatgatcttgatctcctgaccttgtgatctgccctcctcggcctccctaagtgctgggcttagaggggtgagtcactgcccctggcctagaattattattattattataattattattattattactattactatttttgagacggagtttcgctcttgttgcccaggctggagggcaatggcttgatctcggctcaccgcaacctccgcctcccaggttcaagagattcttctgcctcagcctctcgagtagctgggattacaggcatgcgccaccacgcctggctaattttgtatttttagtagagaaggggtttctccatgttggtcaggctggtctcaaactcctgacctcaggtgatccgcctgcctcagcctcccaaagtgctgggattacaggcatgggccaccacacccagcccctagaatcactgatgaagctgtaatttctattcatcctattgtcccaaattcttacacactttttggacaaactcccaccaccacagcttggtttatcatacttgatcttaaggatgacttttttgcattcctgtacaccaagatagccaaatttcgttcacttttgaatggcaatatccacatacacaaataactcaaccattaactcatgcagttctgccccagggattcagagatagcctccacctttttggacaggctctagctagggacttgtccaccctgcagcttctcccatatagcaatctgctccagtatgtggatgacctactaatctgtagtcctaacgaggctgtttcagaccaaaatacagtattagtactaaacaaacttgctgattgtgaatacaaattatcttcttctaaggccaaaacacccacacaaagagttcaattttggggtcttatcttaacccttggtacaaagagcctctctagtgctcgtaaagatcttaaacatgacaactctagtaaataaacaacagctttggtcctttctgggtagagtcaggtttaatatggattccttccttcagattaatagcaaaatctttatatgaagctttcaagggaactgaggaacagcctctaacatggactaatgatatgaaacatgctctaaacacttttaaacaggctttaatctcagccccagccctagccttaccagatctgactaagcctttctttttgtatgtacacaaacaaaagggaatcgctttggaagtcttagaccaagatctggagccctctaagtgccctacagaatatttttcaaaaactttagacttggtaccccagggatggcacccctacttaaaaatagcagtggtccaagcacggtggctctcgcctataatcccagcactttgggagactgaggtgggaggatcacaaggtcaggagttcgagaccagcctggccaacatggtgaaaccccgtctctactaaaaaaatatataaaaattagctgggtgtggtgtgcacctgtaatcccagctactcggggggctgaggcaggagaattgcttgaacctgggaggcggaggttgcagtgagccgagattgtgccattgcactccagcctgggcaacagacaaaaactccatatggggagggaaaaaaaaaaagctgcagtggccctcttagtccaaaaagcctccaactatattacctgctcctcctgggctcttagggctttgtggcactgccaataattatttaaactcttttcaagctttggccctatcccaccttgataattctcttcattatggtgattgcactctgagaacaatagttcccatccaaatcactgtcttgaatataacttccaattcagaattccattctagaagaaagggagccctaggacttattatggctggagttgtgggaacgattgcaacactcaccccttgagggggttttgcttaccatgaaatcacactacaaggacatactgtctcccttgaaatagccttagcaaaaactggtgcaagtctatcagcaatagaaaagtctttagactcgctagcaggaatggtgtttgataacagatgagctctggattatctaatagctgaacaaggaggagtctgtgctgtcatcaacaaaacctgttgcacctacattaatgtgtatggagaagtggaacttccaatgtccaaaaaattttttaataagccaagtggctacacacaccttcccaaagtagccaagactgggccagaacctttactgattgctctccaaaaatcacttggcttctcccattctggacctttattccttgtcattcttttaatatttggtccctgcctttttaatgctctcgttaagtttacatctttgatattaaaacaattccacctacagatggctatgcaatcccaataccagcctgcaacagcaacttccattcacatggggtctcttgatggaattcagtcttccccacaagtctttcatgacccttcattcccttcatgacagagagcaagaaagggaaaaactcaaccgaaacccttaacaccccttttcagcaggaaatagccagacgtacttgtcacccctcttcactgtgccattttccctctcttgagaccccaataggcagcaggtagccatgatcatgagggaacataaagggccaaagatttgaccaaaatgtctgtcagggaaaaaatgaaaacagcaaatcacctggtgaccatctagcaggccctggagacaaaaactccttatctgaggaatttagaagtaattaaacttccctcttatctaaaggcatctggttccaggccttttctcaacttaaaatttgtaagtaactagaatttctttttttttttttttttttttgagacggagtctcgctgtgtctcccaggttggagtgcagtggcgcgatctcggctcactgcaagctccgcctcccaggttcatgccattctcctgcctcagcctcccaagtagctgggactacaggcgcccgccaacacgcccggctaattttttgtatttttagtagaaacggggtttcaccgtgttagccaagatggtctcgatctcctgacctcgtgatccgcccgtctcggcctcccaaagtgctaggattacaggcgtgagccaccgcgcccggccagtaactagaatttctatacatctccagaatgcatgcatgttgaaactcattgtgcaacccttgctgacattaaggcaccaaaatatctgtaaatgtaatcatttattgtgcaaatttcccttcagctcctgcattaaggtccataaataccctaaggaaaaatccactggcgttttcactcctctagtgtgccactgccatcttctgtagcattctttctttctaataaaacgttcctttttctttttttttttttttgtgagacggagtctcactctcccagcctggagtgcaatggcatggtcttggtttactgcaacctccgcctacagggttcaagtgattctcctgcctcagtctcccaagcagctgggattacaggtgcatgccaacacgcccagctaatttttgtatttttgtagagatggggatttactatgttggccaggccagtcttgaactcctgacctcaggtgatccacccacctcagcctcccaaagtgctgggattacaggcatgagccaccgtacccggcccaaaactttcctttttcaaacctatactatagtcggtagattcttcttaccaacctgcaagtccatcactgcccaatgctgatgccagggctctgacaccacacccagcagttttctagcagtggaatctgttatactaactctttgaatgagtaactgaaacagattctgaaactgaaactgcctctgcaaggattatgacagtgggagaaatggctgtcatgactgcctccatgactgcttctaatcatgcctccaggcctccatgactgcctccatgactgactccatcttgcttctaagcctcacaggctgactgtcctcactcatgcctgggtgtggccaaactaaccatgggaggaattcaatttatagtttaacttgcaggcaagaatgataataatccttacctaacactaaccccctccttccttgctcagggactaaaaatgaatgataggccatgagattaggattatgggaggagcctgaattctgctaaggatgtaaacatagtttctataaccacttactgctcaggagtcatgttgccagaggtcacaatatttgtgatttccccaactgccccataaccatacaatataggccggacaatataggtggtggctcacgcctgtaatcccaacactttgggaggctgaggtgggaggatcatgaggtcaagagatcgagaccatcctggccaacatggtgaaaccccgtctctactaaaaatacaaaaattagctgggtgtgatggtgtgtgcctatcgtcccagctactctggaggctgaggcaggggaatcgcttgaacccaagaggcagaggttgcagtgagcggagatcttgccactgcactccagcctggcaacagagtgagactctgtctcaaaagaaaaaaaaaggccaggcgcagtggctcacgcctgtaatcccagcactttgggaggccaaggcaggcaaatcacctgaggttgggagttccacactagcctgaccaacatggagaaaccccatctctactaaaaatacaaaattagccgggtgtggtggcacatgcttgtaatcccagctactcggaaggctgaggcaggggaatcgcttgaacccgggaggtggaggttgcagtgagctgagatcgcatgactgcactccagcctgggcaacaagagtgaaactccatctgaaaaaaaaaaaaattacaatgtaatagtgatgctaggacctaagattggtcttttaagatgttttccagacttttgtattctatctcatgactcaactgatcctgcagccctgacccagaggtagattcagcacacaaggattgttttctgcattcctatgattttatccccaaccagtcagcagcacccactccttagcccctgctcaccaaattatctacaaaaaccctagcctctgagttctcagggaggctgatttcagtaataattctgttttccacatgcctagccaagttttaattaaactctttctttactgcaacgccatggtctctgtgaattggttttgtctgtatagtaggcaggagaaacctgttgggcaattacaaaactttttctggagtttcacggtaaaaaaaaaaaaaaaaaaaaaaaggccctttcaaaatccattaatggtaggaaaagtagagtctatgtatgtgagagatcctataaagagttatcaaactgaacttgggttcgctcacccagcacagtaaagtcaaacatccacaccaagttttttgcagtgggagaaaggagggcatttatttgcagggcacccaacaaggagaatcaggcagctcacacttaagacccaacctccccagtggcttacagttaatggttttttaaggcaaggaaacagcggttatgggcaaaaatcataaattgggccaggtgctgtggctcacacttgtaatcccagcactttggaatgccgaggcaggtagatcacctgaggtcaggagttcaagaccaccctggccaacgtgaaaaaaccccatctctactaaaagtacaaaaattagccaggtgtggtggcaggcgcctgtaatccccagctatttggaaggctgaggcaggagaatcacttgaaccagggaggcagaggttgcagtgagccaagattgtgccactgcactccagcctgggtgacagagtgagactctgtctcaaaaaaaaaaatcataaatcaatacatggaggccatacaggacatctcaaatcggggctcacaggccacaggtgaattcaaagatttttctgatttgcaattggttaaggagggaaaactttgtaaaaaatttaggatcagcagaaaagaatgttagctctggtttatgggcatgctccctccacacccttcaggaagaaatttataacaaagaatggtggccagcattcattcctcagtttcccccttatctgaggtctgcgtgccagaggagccatttgatggaggtctgggtttctgaaaaacaactcagggatatatgttaagatgttatcttcagtttctaaaggaaaccaaacatcctgtgacttcaacttccttggctattgttttaagctaccattcccttcttgcttatcaagttgttcatttacttctcaaggctagctaggtgcctggaatttcccttgaaggaattcaagatttttctttatttccatgctttgtggggaaggtcatccctggcaggcccccaagaggggtctttgctccatctcagagtctatgtgtgactggaactctcatacattgctagtgggagtgcaaaatgatataatcactttagaaaatactctaaccttctcttataaagtttaacatatacttaccatacaaaccatcaaatccctttttagatgtgtacccaaagaaaatgaaaatagagatctactcaaagacttgtatgcagctttattaatgatagccaaaaactagaaacagcccacatgtccatcaactagtgaatagataagcgtatggtggaagacccatactatggaatgctcctcagccataaaaaggaacaaattaacatataatctaggtaaactgacacccattttacttgggaggaatatggccttctagtgagaatgagtaatgaaggtgtgatattgaagagttggcccagctgtcctcatgcactgctgtccactctatcattcatagccttcttcagcctcagttcctgtttttttaaaataagaacaacgttcatctcaacacataaaactggcaaaatagtaataactatgttgtagagaattcagaaaactgatgctctccaacagctagtgtgatcctcaggagcgcagtctaggaatgggaaaaaaaagccttaaaatgtgcagacctcctgacccagccatttcacttttaggcaatttccctaagactataatcacttatgatgaaaatattggtcctagtgacattgacaaagttactcattttatctgatgtatatttgtttcagaaaaataatgccaatattattagtaataataaaactatgacctacataaacaaaaaaactttgtgttatctcacttaaacctcaaaacagcctgatgtgatacttacagatttcacaggtgaggaaaatgttgtgcctaatgacacatatctggtaagtatatccttagtcatcaggatgcaaaccttgactgtctgagacaatcctcactgttagccactgtcttacacagccagatatacaaggcctgggcaattgtacccactgttagaaattcagataactatgttttagagactgctagtaatgactatatcaaacaaatcaatacattgaacattaattcttttttttttttttgagatggagtctcgctctgtcgcccaggctagagtgcagtggtgcgatcttggctcactgcaagctccgcctcccgggttcacgccattctcctgcctcagcctcccaagtagctgggactacaggtgcccgccaccacgcccggctaattttttgtattttagcagagacggggtttcaccgtgttagccaggatagtcttgatctcctgacctcgtgatccgcccgcctcagcctcccaaagtgctgggattacagccgtgagccaccgtgcctggccgaacattaattcttgaatttgctcattgctgttccctatttacagatatgagccaaagtgtaactttataacagacaagtgtcacctaactcttgtgagtttgatcccaggttatcaatctcctaccccttctagtttactagacaaaatataaagaacagttggtctgtcaaggagttctggaagtttattaacaaattaacagggcaatagaagttattagattagattagagctgaggaatgatggcagggtgttcccctgccctacaaagaccattttgacttccaacctggggacagagtcctggttatgactttaaaggaacctaaacgccgggcgtggtggctgacgcctgtaatcccagcactttgggaggctgaggggggtgaatcacttgaggtcaggagttagagaccagcctggccaacacggtgaaacctcatctctactaaaaatacaaaaattagccgggcgtggtggcgggcacctgtaatccagctacttggcgggcagacacaggagaatcgcttgaatccgggaggcggaggctgcagtaagctgagatcacaccactgcattccagcctgggctacagagtgagactctgtcaaaaaaagaaagaaagaaaggagaaagagataaagagagagaaagaaagaaagagacaaagaaagaaagagagagagagagaaaggaaggaaggaaggaaggaaggaaggaaggaaggaaggaaggaaggaaggaaggaaggaaggaagggaaagaaacaaagaaaggaaagaaagaaagaaagaaagaaagaaagaaagaaagaaagagagagagagagagaaagaaagaaggagaaaggaaggaaggaaggaagaaagaaagaaagaaaaaaagaaaagaaaaagaaaaaaagagaataaaggtcctaaaaagtctagcctgaccacaggtcatctggaaaggccaagttgattccacagccattctaaaatgtgcattctctccttgatggatctgaaaacctactttccatccccactccaaccaacccagcctttctatggcaagcgcatgctctggggcatgagcactggtgagaatcattgcccctataaaactaagactagagttgagttctgtccatccccaactagaagggagattatttatccctttccattattttctcccctctgtctactcctttcccctattctcactaaacactaactcatcttgcaaatattagtcactttaagtcataaaacaacccatcacactggaatatcttgaggtgtcaaactctcagtgtgtatcaattcctgaaaagtgttgggttctaactaaagagtcagggaaggcctggtgcagtggctcatgcctgtaatcctaacactttgggaggcagaggctggcagacggcctgagcttggatgttcaagaccagcctggacaacatggtgaaaccccgtctccatttaaaagaaaaaaaaagagctagggggatatcagaatggctcttcctcttccctcttccctgcccttcctgcctatcccatgaaggaggcagaatgcccaccaaagaggcagccacagggaggcagagaaccaaagaagatgctggcaaaggaggtgtcaccagagatgggactgagaagctgagagggtcaagaaaaatggagtgaccttctcccacatggaatggaagaaagctagaaaaaaattgagatattggattggaattggagatactggtgtgaatttatatttgctagatgatgattagatagatatagataatcaatgtgtgcatgtgaaccctagttccaatgagcctactaagcacccagatcttggtttctaaataccatcctccactaaaaggagccaggaatccttggagaaatgacagattccagtgctggggtataagttgagtttggaatactctataatagcagaaaataaggaagtattcaaagaatgatggagatatatccaaaggaaatgggactcagctttgagagggttttcactgaccaaaactgggacaatctgagcattgtaataaatgatgataacagatcctaatctattgactaacataagaatccatgagttcacattgacatgaataaatgaatgaatgaatgaatgaatgattaaggaagaaggaaaagtttttctttttcttttcttttcttttctttttttttttgagacggagtttcactcttgttacccaggctggagtgcaatggcgcaatctcggctcaccgcaacctttgcctcccaggttcaagtgattctcctgcctcagcctcccaagtagctgggattacaggcatacaccaccatgcccagctaattttgtattttcagtagagatggggtttctccatgttggtcaggctggtctcgatctcccaacctcaggtgatccacccgccttgacctcccaaagtgctgggattacaggcgtgagccaccacacccagccagcttagtattattttgggggccactcctgccaaaaattcatgacctgagtatggacaagagaaagcatcagacaaaccccaactgagagtacttagagaatgaaatagaatatactgtttaaactgtaaaggtcatgaaagacaaggaaacattaagaaacaattctagatggaagaagactaaaaagacacaacaagtaatgcaatgtgatactggatcacattctagactacaaagagagaatggaacagttggcaaaatttgaacagggtctgttaattgtgtagtagcgttatatcaatgttgacttcctgaattgggatagttgtatcatacaggaaaaatgtccttgttcaggggaaattcactgtagtatttaagggttggatcatcgtgtttgcaacttgttcttcaatggtttggaaaaagaatcatcatatacgttagagagagagagaaatatggcaaaatgttaacaactgggaaatctgagtagagaacatggaagttttgtgtttgaaatcctggattgtgattacgtggggggttcgtttcataaactgtatcaagctgtacacttttggtgtgtgcactcttctgtatacatattatacttttaaaaataatttacttaaaaaaattaaccctccccaaaaaattaagaattgggcttatttggtaactttttattttgatataatttcaaatttacagagaagttgaagaatcatacaaagcattcctgtatactctttctctagattcattaattgtttacatttgtcccatattttgtcattctctctctgcagatatatgtgtatacatttttcctgaacactttgagactattaagtggcaaacatcatgcctatttgtccctaaattctttaatgtgcatttcctatgaacaaggacattctcttacataaccatagtaccattatcaaaatcaggaaatttatcattgatacaataccattatttcttttttctttttttttttttttgagacagagtctcactctgttgcccagactgaagtgtaatggtgcgatctcggctcactgcaacctccgcctccagggttcaagcgattcttctgtctcagcctcccgagtagctgggattacaggcatgagccaccacacccagctattttttgtatttttagtagagatggggtttcaccatgttagtcaggctggtctcgaattcctgacttcaggtgatccacctgcctcagcctcccaaagtactgggattacaggcgtgagccaccgcgcccggcctacaataccattttctaatccagtacgtagtcagtcacctgtcatcagttatgccaacacgtctttttttttttaagtccagtctccaattccaggattatgttacatccagttgtcatgtctctttagtctcctttaacctgaaacagatcatcagtctttcatgaccttgacttttttgaagactggaggccagtttgtagaatatccctcaattggagtttgtctgatatttcctcatgattagattcagcatatgcatttttggcaggaataccactaaaatgatgttgtgtccttgttaatacatcacatcagaaggccaggtactgtggctcacgcctgcaatctcagcactttgggaggccgaggcgggcggatcacctgaggtcaggagttcaagaacagcctggccaacatggcgaaacccagtatctactcaaaatacaaaaattagccgggcgtggtggcaggtgcctttaatcccagccactcaggaggctgaggtgggagaatcactggaacccgggaggtgaaggttgcagtgagccaacatcttgccactgcactccagcctgggtgacagatggagactctgtctcaaaaaaaaaaaaaaaaaatacatcacatgagaaatgcatgttacttggtcccatcattagtgatataactttgattacttggttaaagcagtgtttaccagacagcaccactgtaaagttactatttttccctttgtaatgactaggtaaccttcagggagattattcaagactagtaaataccatgttcctcatcaaacttgctggctaactttagctaccattgatgattcttgtctgaagcaattactaatatggtagttatcagatggtgattttctcattccatcattctatctacatttatcacacttattagttggcattctgctgtaaagagaaggtgttctgttgtcttccttttataggctattcatttcttcacgtacatcagtttggactcttggatttctattttggtcagtaagttattatgttaactatcattgtaactttgaggctcaaattgtcccagaattggctagtggggaatccaagatgcattctcgccctgacttcctcattactagccaagtcacattgtactctcaacttcttcacatcaaagtaaaattaaattgtgcatttgagttgcacagtgtacccaactacaacatatgtataggagaaaaaatacaacataaaagaataaaaaggggaaagcagggaaattctatgatctataagtagcaaaatctccctactttcagcaatataagttaactcatggtaaatgacagcagcagggataagtgttaaggctctactaaaatctgccatgtttgaaggccaggtgtagtggcccacacctgtagtccccgcactttgggaggccaaggtgggctgatcatctgaggtcaggagttcgggaccaacctgaccaacatggagaaaccccatctctactaaaaatacaaaattagccaggtgtggtggcacatgcctataatcccagctactcaggaggctgaggcaggagaatcgcttgaacccagaaggcagaggttgtagtcagccaagatactgccattgcactccagcctgagcaacaagaggaaaactctgtctcaaaaaaaagaaaaaaaaatctgccatgttcaaatcaggaataagtaacagttaaagttcaaaaaactgtagtcttcttttttctttgttgtagaggcctctttttccaacaactcacaatgttcagttctctttctatttggtctaaagcgccatgatagatatcagctaacaacactgagaactagaagttcctctataactttgcacaatacccaaaaaattgtttataagaccaggttatcctttcttatttttatccagtctcataggatgatggcatttttcaaattagcatttttaatttatgaatagaattattctcatacaataataaaccctattttcttcatcttgaataacaaacataaaatctccgagaggcattctacttttcaaaatcaggatcatgttaaacaacttctacatttaaggagagagaaaagcccagcctaggcaacacagtgatgttgcaggactttccttagttcagctaaagacggggttcttgtccgtcccactgccacgaaaatttaggctcacagacagtttaaagggtgagtgaagtagggttttactgaatgaaaagggaaataaaagggggaaacaaggatcctccgcaaggccagagccccctgctagagcgcatcccacccaccctttgaatctcaggttccacacaggaagaggggccaggctcctccccgctgcgaaagtcatgaacttccccaggctccacctcagctggcaggctggttggagtttctccagggaccacctcccatctggctgtctcagtgagaccccatttcttttttttttttaatttttaattagctgtgtgtggtggtgcacccctgtagtcccagctacttgggaggctgaggagggaggatggcttgagcctaggaagtcaaggctgtggtgggccatgatcgcaccactgcactccagactgggcaacaaagcaaggcctcatctcaaaaaaaaaaaaaaaaattaaaaattaaaaaaagaaagaagagagaaaagcctgtcaaatgaagtgggtttgtttttgttgttgttgttgttcttatatagagcactgtgtgttacacttagggcagaaaaacctccagaactctaagtttaatgaataaaaccaatacatgccactgggacataaacgtaaaaagtcagaagatagaacttgatcgtatcctaaacaatgaattaatgtatctagatcagaaactggaaggttaaaacgtggaggaatgaaagggattggaagggcaaaatgtgttagggattagctagctagcatggttcaagggacagactatacaacaagcactattctctgatgagactggttactttagccaacttctgacacaatcaaatagtaagacctctcaagctgaagacagacccctagttgattttatcattggacaaaattatacaaagcctatcttagcagcaatcagttttcggtgacaccattatttcttcatgcccccaacaaactgcagtagatatgttggaatttaagctcagcacatatagtcatccaaattgtctcgaaaggttacaaaagatgggaagaaaattatatgttgttctatgaaaactatgaaaggagagagttagaaagaaagataatcaacagtgtcaaataccactgagaaatctaagacaatgagggatgagaaaaatccgccacgcctcaggatgaggaacccagggttgccttcagcaatcagtttgagtggcagagatgagggctgagggagcagcagacgtcaagagggcagaacaaggagtgactctgcattgagaaaatggaattctgtcctcaaaacatgtaacaacaaaaggatgaggaaattaggataaaaattgcagcaaggtcaaatgaaggctttggggtttggggtttttgtttgtttttttcagcaaggaggaaaaaggattatgtctgcaggcagaggagagaagaagaaattaaaggtgcttaagctagacaaaaagaagataattaagacagaaaatctttgattgcagatgttatagcacccaccagggagaaaagggagagaacagagaggactgaaaacataaggttagtttaaacttagaaagaggaagttcagttcctcgcctaagatggggaagagaaagaaattgccacagagttgttttggaattaaaaggcttatctcgcatggtctttattttgccagcaaagtaacagatagcccctgtcaaaggagaaggggcacggaggggcaccaagaggagggtgcaggagagaaaaggcttagaacaatggtgggcaggaaactgcaaagaaatggacacctgacaccaggtgtcagtacctactcggtagatgtttgaataaattgataagacattttaaaaggccagactcggtggctcatgcctgtaatcttagcactttgggaggctgaggagggatgataactttgggccaggagttcaagaccagtctaggcaacatagtgagaccccgtctttacaaaaaagtaaaataaaataaaagttttttaaaagacattttaaaaaatagctggttagtaatggggagagtcccactgataagatgataaaattttcttataacttttatatctttctgcagtaccactatagtgttgatagtagacttgcagaatcaaaagaaggaaggataaattactgtcttcactgtgacctggtggctttccctagtggtgctagaggaaaagtaagagctccagggaacctaggcttttgctttgtaaggatagcctcaatattggtacacacttcgaaacatgggctgggtaagaatttaagtgtagccagaaaaaatatcttggtatgagcttcatttatcaacactttatcataaattcatcattgtatcttcaaatttgtgatttttaaaaatgttgccaccttttctttgtgaggctgttctcagccatctgctcttggcacttcacaccactcacccgaagagctcaagcaatcatagttactgtgaccacatcagtgctgacgagaacaaaacgttttcagatcatgtctctcccacaaactccagggccatagttgatctatgtacaagttatctccacttgaatagcccgctgtcattgcaaattcaatattctcaaaaccaaacctgacacctttcaaaaaaaacacagctgcacttctgtaactggcaagacccagtcaggagacagaaaccacaccagtgtatggaaagaattaaatataaaggatttttaagtaattataaagttgctaattaggtaactaaaagagcaaaaagagaactctaaaggaccacagaggtagcaattgcagaatgcagttgccacccctacagctgagggaacaaagggaagaggccagggtgattaaaactttgaagctcaggctgggcacagtggctcacgcctgtaatcccagcactttgggaggccgaggtgggtggatcacgaggtcaggagatcaagaccatcctggccaacattgtgaaaccccgtctgtactaaaaatacaaaaattagctgggtgtgctggcacacgcctgtagtcccagctacttgggaggctgaggcaggagaatcgcttgaacctgggaggcaaaggttgcagtaagccaagattgcaccactgcactccagcctggtgacagagcgagactccatcttaaaaaaaataaataaataaataaataataaaaaactttgaagcttaaacaaaggctcccacagaactgaaattcatacatctgaggagagagcaccactgatgttcctgagtgggcatgataagatgggctctgcaagtgttagaaagattggaaactggatacagctcctggatgagaggcactgccggaatgaagaagcgccgcttgatggtgctcacaggatgcaattagataggaaacccacatggaacaaactagaggtaacaattcattctcccacgtccagccttctagccctgctctagcatccctcattggcagagtggaacagggagccagttggagaagcagaaaagcagtttgtggaataccagccccagaatcacaaagcagtgggtttggagctaagagataataacttaataactgatgcagcttctgaactatattagttagggtccagccagaaagcagaaaccactctaagtatttcagaaggattttaccacagggaattggtacatgggtaagagaagagctaagaagccaaaaggggcacaacgaagcaatctggaaatgcaacagcaggcacctgccgccacctcctaggctggagggacaatgggagttagtggagttagtggagcccagaatctaagggcatccagaggtcagaagaatcatggcaaggtctgcatggagggaactagaatagtggagagaaaggctgtctggccaaggaggaagggatgttgcagagacatctctgcaggaagcagagacagcaggagagaactaccctgggttctcttccccccgtctacactcttgtgccagtgacttttgtgaacttaaaagtatctgagataggtctcaatcaatttagaaagtttattttgccaaggctaaagacgcacctgtgacacagcctcaggaggccctgacaacatgcgaccaaagtggttggggtacagcttgcttttataaattttagagagacataaggcatcaatcaatacatgtaagatttacattggtttgatctggaagggtggaacaactcaaaggagggaggtgggggatgggccttccaggtcataggtagatttaacaattctctgcccagcaccatggctcacgcctataatcccagcactttggaaggccaaggcagataacctgaggttgggagttcgagaccagcctgagcaacatggagaaaccctgtctctacttatttatttatttatttatttatttatttatttatttatttattttgaaacggagtctcgctctgtcgtccaggctggattgcagtggcttgatctcggctcaccgcaacctccgccccccaggttcaagctattcttctgcctcagcctcccaagtagctgggactacaggcatgtgccaccacgcctggctaatttttgtatttttagtagagacggggttttaccatactggccaggctgatctcgaactcctgagctcaggtgatccgcctccctcggcctcccaaagtgctgggattacaggcatgagccaccatgcccagcccttttttttttttttttttggagatggcaggtcttactctgttgttccccaagccagagtgcagtggagaaatcatagctcactgcagcatcaaacttctgagctcaagggactctcccacctcagccaccctagtagctgggaccaaaggtgtacaccaccatgcgcggctaatttgttttagttattttttttttcttgagatggagtctcactctgtcacccaggctggagtgcagtggcatgatctcggctcactgcaacctccacctcccaggttcaagcagttctcctgcctcagcctcctgagtagctgggactacaggcacacaccaccatgcctggctaatttttgtatttttagtagagacggggtttcaccatgttggtcaggctggtctcaaactcctgatccacccgcctcagtcttccaaagtgctgggattacaggtgtgagccaccgtgcccagcctgtctctactaaaaatacaaaattagccaggcatcgtggtgcatgcctgtaaacccagctaccaaggaggctgaggcaggagaatcgcttgaacccgcgaagcagaggttgcggtaagccaagatcacgccactgcactccagcttgggcaacaagagtgaaactctgcttcaaaaaaagaaaaaagaaaccattatctgattggcatcaggttgaaagtgttactatcagtagaaaggaatgtctgggttacagtgaggggttgtgtaaaccaaggttttatcctgcacttgaagcatccaggtagcgggcttctgagagagtagattgtaaatgtttctgatcagacttaagatctgtgttggtcaatgctggtcgggcttttcctgaattccaaaagggaagagggtataacgaggcatttccaaccctctcttccatcatggcctgagctagtttttcaggttaattctggaatgcccttggccaagaggaggggtcttagaattttatttttggtttacacttccattgccagaacccactcagaagccagggggcaagtagtttcacgtgatatgagttagagagggtaagagcagaaaaggatttgggagcatccaggcaaatggccagttcatggatgtatccatttatgtcggtggcactgccctgccctttccccacttccctgctcagaatccccaaaatctttcattttctccacttcaagttctgcattccagtcatcacctggtctgcagtccttttaccctaaaagggctccaatatatctccatttccatcacattggcccagcttaattctggccctcctcactgcagatattaattattgccgtattttcttcctaacttggcttgaacctccagtttttatctgctactgtcccttctacatggtctactccaggagtcaccacacagtggccaatcagccaaatctagcccaccacctgttcttgtacatcaagggttttttaactaatatataatagttgttcatatttgggggggtatgtgtgttattttaatacctgtatacaatgtgtaatgatcaaatcagtataatttggatatccttcacctcaaacatttatcttttctttgtgttgggaacattgcaattttccttgtacataagttttattggtacactgagttaaaagaaaaacttcagccgaattaaatttaaaacagttaattgagcaaaaaaatgattcatgaatcagacagcctcccgagctagagtatcctcagagactctagagcagccacgtggtcagaaaaaggaaagtgacatacagaaaatggaaatgaggtacagaaacagccggattgcttgtagctcggcatttgccctatttgaacagtttgaacagttggccatgtttgattggccgaaacagtgattggcacaagagtaggctacagtctgtttacaattccatttaggttgtagttcacaatgtacaaagaaacctttaggctgaacttaaaatatgtaagaaggtagctttagcttaaacctgagatttagcagctgccatgctcattcatttagttattgtctgtcactgctttcacattataatgacagagttcagtatttgcaacagagaccatatgtatgccccaaaatatttactttctagtccttcacagaaaagtttgctgatccctgaaattaaactgacactaatccattcttttttttttttttttttgagacagagtttcactgttatcttccagactggagtgcaatggcaaggctcattgcaacctccgcctcccaggttcaagcgattctcctgcctcagcctcccgagtagctgggattacaggcacccattatcatgcccagctaatttttgtatttttagtagagacagggtttcaccatgttagccaggctgatctcgaactcctgacctcaagtgatccacccgcctccgcctcccgaagtgctgggattacagggatgagccactgtgcctggcccactaatccattctgttaccaaactaatcttcctaaaatacccttcctgtggccgggcacagtggctcatgcatctaatcctagcactttgggaggctgaggcaagcagattacagttcaggagtttgagaccagcctagccaactggtgaaacccatctctattaaaaatacaaaaattagccaggcgtggtggtgcatgtctgtagtcccagctactcaggaggctgaggcaaaagaatcacttgaacccgggaggcagaggttgcagtgagtcgagatcatgccactgcactctagcctgagtgacagagtcagactccgtctcaaaaaaaataataaaaataaatggccaggcactgtgcctcacgcctgtaaggaggctgaggccagtggatcatctgacgtcagcagtttgagaccagcctggccaacatggggaaaccccgtctccactaaaaatacaaaattagccaggcatggtggtgcacacctgtaatcccagctactcgggaggctgaggcaggagaatcacttgaacccaagaggcggaggtcgcagtgagccgagattgtgccactgcactccagcctgggcaacagagcgagactccatctcaaaataataataataataataataataataataataataataataataataaataaataaaatactcttcctcgtgtcattttcctaccttgaaatcattccttatgtctacccaaagtccgcagcttgtcatgattcaatgttttcccaaacttgatgccacattaaatcaatatttaaatcaatgatttcgtgagacagtcaagatatcttaatacaatgcccagtacacagtgaacaatcaataattaaggtatcattgaagttatttcacctaccctcctattgctatttgccacatatctttctactctagtcaggcttgccccagtttttgtgtctgtattaccaataatataccaattactttttaaattagtgtataggttgaattgtgtcttcccaaaatttgtgtaagtcctaagccccagtacttgagaatgtgactatatttgaagataaggtctttaaagcattgcttaggttaaaatgaggtgctctgtttttttttcagggtgggccctaatccaatatgactggtgtccttgtaagaaggagaaatttaggcataccaggagacaccagaaacatgtgcagacagagggaaaaccatatgaagacagagtgggaaagtagccacctgcaaaccacggaatcaggcttcagaagaaaccaggcctactggtaccttgatcatggacttctagcctccagaactatgagaaaatgaatttctgttgtgtaagcaaccaagtgcatggtattttggtatggcagctctagcaaactaatacaaatattatctaagagcataaacaaaatatgtaatcattacaataaatgttaaaattacagaaaaatataaagatggaaataaaaatcacctataattccatcaacaagtgataaccatcataaaatatttggaggccaggcatggtggctcatgcctgtaatcccagaaatttgggaggctgaggcagaaggatcacttgagcccaggagttcaagaccagcctgggcaacatagggagaacctgtctctataaaataaatacataaattatattaaagtaaataaaatgtttggagtattttgttccaggctttttttctaagatatacatattttttttcattttcataaaattaccatcataatgtacttacagttttatattctgcttcttttacataattatgaacatttttctttttttttttgagacggagtcttgctcagtcacccaggctggagtgcagtggcacaatctcggctcatgcaacctcctctgcctcccgggttcacaccattctcctgcctcagcctcccaagtagctgggactaccgacacccgccacgacacccggctaattttttcgtgtatttttagtagagatggggtttcatcatgttagccaggatggtctcgatctcctgacctcgtgatccacccgcctcagcctcccaaagttctgggattacaggcgtgagccacggcgcctggcctgaacatttttatttcatcatggacattttaccaccttgttatcaaaaacatgttttgaaatggctacatattgctctattgaatgaatacagtctaagtcatttctattcccctattgattaaaatgtcagttgtttccattttttaatcattttatttttctttatttttatacatttttgtctttttttgactcacctcaggatcagccagtacaaatatgagagaaatcagtgtcacacaacagtcacagttgtcatcacttccctccaattttcatcttttttggagttttgtttgtttgtttgagacagagtctccctgtattgcccaggctggagtgcagtggtgtgatctaggctcactgcaacctctgcctcctgggttcaagcaattatcctgtctcagcctcctgagtagctgggactacaggcacatgccaccacacccagctaatttttgtattttcagtagagagggggtttcaccatattggtcaggctggtctcaaactcctgacctcgtgatccacctgcctcggcctcccaaagtgctgggattacaagcgtgagccaccgcgtctggccaattttcatcattttaaataacactgtaatgaacctctatgaatataactgtgattaatttcctaagtggaaatctttataaaggaattacaggttaaactttattacaggccagtcttcacagtgtcctccacataccccactcatcactgcttccaggcctgctgtcttgttccctctgcctggaagcaccaactaaaatctcaccaacactccttcataaatgtcccctgaatattgtgaccccatgtcaatttcaccctcacagttaccctgttgtattttgttacctcaaacttcattacacactctacttaaaagtactttaatcatgtcatgtataggtattttctccatatctagactataaattccccaggcttttttttttttttttttttttttggtatcctggagtattaaacacattgctgaaaatttaaccaaaaaaaaaatcatgaaaaacccatgttttaaaataaatatatatttgtttaaaaggaagattaaatagaactactggtatcatactctctacccaaagtggttttacattcattacagagtgatttcttagaatgtttgatattaaatataatttaagaatattagcaatggcaacaaaaccaaaatagacaaatgggatctaattaaactcaagagcttctgcacagcaaaagaaactaccatcagagtgaacaggcaacctacagaatgggagaaaatttttgcaatctacccatctgacaaagggctaatatccaaaatctacaaagaacttaaacaaatttacaagaaaaaaatcaaacaaccccatcgaaaagtgggcaaaggatatgaacagacacgtctcaaaagaagacatttatgcagccaacagacacatgaaaaaatgctcatcatcactggccatcagagaaatgcaaatcaaaaccacagtgagataccatctcacatcagtcagaatggcaattattaaaaagtcaggaaacaacaggtgctggagaggatgtggagaaataggaacacttacactgttggtgggactgtaaactagttcaaccattgtggaagacagtgtggcgattcctcagggatctagaactagaaataccatttgacccagccaccccattactgggtatatacccaaaggattataaatcatgatactataaagacacatgcacacgtatgtttattgcggcactattcacaatagcaaagacttggaaccaacctaaatgtccattgatgatagactggattaagaaaacgtagcacatatataccatggaatactatgcagccataaaaaaggatgagttcatgtcctttgtagtgacacggatgaagctggaaaccatcattctgagcaaactatcacaaggacagaaaactgaacaccgcgtgttctcactcataggtgggaattgaacaatgagaacacttggacacagggcagggaacatcacacaccggggcctgtcgtggggtggggggatgggggaaggataccattaggagaaatacccaatgtaaatgatgagttaacgggtgcagcaaaccaacacggcacatgtatacatatgtaacaaacctgcatgttatgcacgtgtaccctagaacgtaaagtataataataaaaaaaaagaacaaaaaaagaatattaggccccatgagggataaatattgacttatgtgtatctctattgcctagaatagtaccagatatataatgggcactcgataaatattttgtagaataaataaatgttgaatgatgaatgaccttttacatggtactgtagcaggaattatttaattataacgtagctagttccacttcttaaatagcaaatccctagagactacatcttttaaaagattgcctgattaagcccaaacagcattctgcatagggagaaatcatccgtgcataattaatgactgaaaattacacacaggtctttaacacggagacgtgatattacaaacaatgaaaacacagagtccctcaaaaaaaaaaacagtgtatttttgcaaaaggcaatattgttttcctttattgttcattctgcctggaatgccatgctattttctttatttttatctttctttctctgtatctattaattaaggccaagattaaaaatggtttcctccatgaagccatccctgatgtattcttagacataatctctctcatcagaactacccaagcactttattcatttatctcataaggcaccaaagactaaatgtccataccaggtgacaaggcaaagtaattatccagagaataaactttttaaaatttttcactcaaaatatatgaattaatcgagacaaatgtactattttgacagggaagtgtcctctgtaaactgtttttttacttatgaataaaatttatttatgtataacttacataaaatgtgcccatttaaatgaatagtttgctgaattttgataaatgtattcacctacttaaccaccacaataatcaaaatatagattatttcttttatttttttgtttttgttttttgagacggagtcttgctcttgtcgccccagctggagtgcaaggcacgatctcagctcactgcaacctctgcctcctgggttcaagaaattctcctgcctcagcctcccaagtagctgggattacaggcgccagccattgtgcctagctaatttttgtatttttagtagagatggggtttcaccatgttagccaggctgctctcaaactcctgaccttgtgatcctcctgcctcagcctctcaaagtgctggattacaggtgtgagccaccggccctaaattttttttagagatgagatctcactatgttgctcaggctagtcttgaactcctgatctttttttctttttttcttttgagattaagtttcactcctgttgcccaggctggagtgctcactgtaacctccatctcccgggttcaagcgattctcctgcctcagcctcccgagtagctgggattacatgcatgtgccaccatgcccagctaattttgtatttttggtagagacggggtttctccatgttggtcaggctggtcttgaactcccgacctccggtgatccgcccacctcagcctcccaaagtgctgggattacaggtgtgagccaccatgcctggcctattctcttaactttctattccttttcttacacttacttaaggtccaatgtgctcttttcttctatcttattaaaatggatgctcatgtgatatcagcaaaatggtggacgacaaagctccaagctttcattatccaacagaaacttcataaaacaaccagaaatgagctgaactaacctgtaagagctccaaaaaacagttaaaggtttacagtaaccaagtgaatgcccaccttccaaatgttaagaaagttttgtcgtgtctttatttgccctcgtcccctcctcctccctgatgcggcagtgctcttagtctggaagaggcagcagcctaattccaagttccctcccttaaatggaagggagaagagcaaagctttttgcaaattattgtgcgcatatgggggttacctaaaggactggcctcaggtctcagaaaagcggtagtcattgctcatgaaagctgcaaggagactacagacccactgacatgtggagtaaaagactatgggtggatacatacagtagaccatgtaaggccccaggagaaaccggactgagactctttaggaaataagacattcaaaagcagccatgtatatggggaaattgggaagttacacatgcccaggtaagacacttggtcagaaaagccctgaaaagaccttaagccttcacctcagctgatccctaggctcaaagcaagccttgctcagtgctgaagaactgtaccagtatagagccaatctgcaaagactaggggagttagctgttttttcaaatgtctacttttcaacaaaaactacaaaaattacaaggcatacaaagaaacaggaaaacatggcacattcaaaggagtaaaattaattggcagaaaccatttctgaggacatccagacatttgacttaccaaagactttaaaacaattgtcttaaatttgctcaaagagctaaaagaaaacatgggcaaaaaactaaaggaaatcaggaaaatggtatattaacaaaattagaaaaccaagaaagggacaaaaattgtaaaaaggagctaaacagaaattctatagctgaaagacacaataactgaaatgaaaatttactagaggagctcaaacacagaagaatcagtgaacttgaaaataagacaattgaaattttcaaatctgaggagcataaagaaaaataaataaagaaaagtggataggccaagtgaggtggctcatgcctgtaatctcagcactttgggaggtcaaggcgggtggatcacttgaggtcaggagttcgaaaacagcctggccaacacagcaaaaccttatctctgccaaaaatacaaaaattagctggacatggtgatgagtgcctgtaatcccaactactcagaaggctgaggcaggaaaattgcttgaacctgggaggcagaggttgcagtgagccaagattgtgtcactgcactctagcctgggcaacagagtgaggctctgtctcaaaaaaagaaaaaaagaaaagtggacagagaccaaggaacttgtggaataccattaagtagaccaacatatgcattacgattcccaaagaggggttagagaaaggggcaaaaagattatttgaagaaatggctgcaaacttcccaaatttgatgaaaggcactaatctacaaatccaagaatctcaataaactccaagtaaaataaatccaaagagactcacactgagacacattataatcaaactgttgaaagacagagaatcttgacagcagcaagagagaagcaactcataatgtacaagtgatcctcaataacactatcagctgaagtccaatcactctgagggaaaagaaaaaaaaaaagactactggccattttctcagcagaaaccctggatgccagaacgcagtgggataatacatttaaagtgctttaaaaaaaaaaaaaactgtcaggacaggcatgctggctcacacctataacccccaacactttgggacacaccaaggtagctgtgtagatcactggagcccaggagtttgagaccagcctgggcaacatggcaaaactttatctctacaaaaaaacccacaaaaattagttgcacctgtagtctcagctactcaggagcctgaggcaggaagatcacttgaacctgggagatcaaggctacagtgagccatgatcacaccactgcactccagtctgggcaacggagagagatcttgtctcttaaaaaaaaaattatgcgaaatctactctgcctgtgttctataaagggaacaacaaagcctggatgacagcatatctgtttaccctacagtttgctgaatatgttaagctcattattgatacctacccctcagaaaaaaagattcctatcaaaatattattgcaggctgggcacagtggctcatgcctgtaaccccaacatttaaggaggccaaggcaggaaaatcacttgaggccaggagttcgagaccagtctaggcaacacagcaagactcagtctccattaaaaaaaaaattactgaccattgatagtgcaccttgtcaccctatagctctgatcgagatgtacaaggagattaatgttgttttcatgcctgctaacacaaaatcttttccttagcctgtggatcaagaagtacttttgactttcaagtctattatttaagaaatatattttgtaaagttatggcggccatagatagcaattcctatgatggatctgggcaaagtcaattgaaaaccttttggaaaggattcaccctcctagatgccattaagagcatttgtgattcatgggaggaggtgaaaatatcaacattaactggagtttagaagaagttgattccaaccctcatggttgatgttgaggagtctaagactttatggagggatgtaactgcagatgtggtagaaacagcaagagaactagaattggaagtggagtctgaagatgtgactgaattgctacaatctcatgataaaactttaagagatgaggagttgcttcttctagacaaagtggttttttgagatgacatctactcatggtgaagttgctatgaacattgttgaaatgacaacaaaagatttaaaatatcatataaacttaattgacaaagcagcagcagggtttgagaggactaactccaattttgaaagaagttctaccgtgggtaaaatcctttcaaacagcatcacatgctatagagaaatctttcatgaaaagcatagtcaattgatgcagcaaacttcattgtcttattttatgccaccccaaccttcagcaaccaccaccttgatagtcaacaaacatcaaggcaagaccctccaccagtaaaaatatgacttgctgaaggctcagatgatcatcaacatttttaagcgatataatattttcaaattaaggtatgtacattgttttttaaacatgttattgcacacttaagagactacagtatagtgtaaacataactttttctttttttttttttgagatggagtttcactcttgttgcccaggctggagtgcaatggcatgatctcggctcactgcaacctccacctcccaggttcaagcaattctcctgtttcaacctcccaagtagctgggattacaggtgcccaccaccacgcttggctaatttttgtatttttaatagagacgggtttcaccatgttggccaggctggtctcaaactcctgacctcaagtgatccacccacctcggcctcccaaagtgctaggattacaggcatgagccaccacacccggcctagtatttttttttttaagagatggggtcttaccatgttaccaaggttggtctcaaactcctgagctcaagcgatccacctgcctcagcctcccaaagtgctgagattacaggcctgagccaccatgccggcccaacataacttttatatgcactgcaaaacaaaaaaatccctgtgactcactttattatgatattggctttattgtagtggtctggaacccaacccacagtatcttccaagtttgcctgtacattttagctatctattattaaacaacttagtggcttaaaactacaataattttatttatttgcttgtaattttgcaatgtgggctcaaatagcctttctttgctccacacgcagtcacctgaggtggctccagtgggctggagaatccactttttaaatggccttcttcacgtggctggcaaaagttggtgttgactgctggctgggagttcaactgaggctgttggcccaaacctcagttcttcttcacatggttggttgggcttttcacaggcagtaagtctgagaagtcaaacttctaacacagcagctggcttcccccgaatgcaaaaacagaagctatcaggccttcttaaggcatagtcccaaactggcataacatcacttccaacgcattctactattgattaaagcaagtgacaggcccaatcagactcaagagaagagaactcctaaaggtgcaaatattgggaagcctggttcatttggggccaccaaagtagcagtgtactgtaagatagtcaccctgccaagtgttctgtagctgtatatttgtaattacttctaattgtattgagttttaaaagtaatctctaaaaaaaaatcagtgtttccatatcaaaaatctattgatgtttataatagcatccaacatatgcaagtgttagctcataccactaattattactaaatcagtattatagttctttgcctcctattttcgccatatctgtcaggtacattcataatcgttccaaatgagcagtcactgaaataatttcaggttattgtatctttctgaaactataatttgttgtttagaaagtaatctgcatattgagagactttgtaagggttcaaacataatcaaactccacctttctgaccagtaacttttttccctgaagatgaatgcttttaacttcaagaaacagaacacccaagcaacagacttagagtctaaacagtaaagacctttaatcatctttttttttttttttttgagatggagtctgtcgcccaggctagagtgaggtggctccacctcggctcactgcaacctccacctcccggattcaagcgattctcctgcctcagcctccctagtagctgggactacaggtatgcaccaccacgcccgcctagttattttgtttttttgttttttgtatttttagtagagacaggatttcaccatgttggccaggctggtctcgatctcttgacctagttatcgagaccacctcagcctcccaaagtgatgagattacaggtatgagccactgcacccggccaagacctttaattaacttacacaacaaagtctggagataggcagttccaagcatggtacagcagctcaatgatatcatcaagtatttgggtgttttctatctttgccctcaaccatcttcagcacgtgagtttttctttcctttttttttttttttttgagacggagtctcgctcttgttgcccaggctggagtgcagtggcacaatcccggctcactgcaacctctgcatcccgggttcaagtgattctcctgcctcagcctcccgagtagctgggattacaggcgcccaccaccacgcccggctaatttttgtatttttagtagaaatggggtttcaccatgttggccaggatggtctcgacctcctgatctcgtgatccacccacctcggcctcccaaagtactgggattacagacctgagccaccgcgcccggcctgcacgtgagcttttcatctggaaacttgtcccctcatggtcagtcctcacaccaccccacttacagaagaaaaaaatggaaaggtgaagtctcctctggaagcttcgtctttttatctgggaggaaaatatttcccagaagctgccttcttttaatttctgtcagactctagactaccctcaaatttcactggacctgcgattacaatattacctagcaataagaatcaaaagaatcgaacatcattgagtgggaaaaatcctctgcaagtacagccaagccttttctgaggctatttttaaacttacaaatcagaggacaatcgcgacattagaggaaaattacccaggtttacgccatcactaacgatgatagcttacgatgatagctaacccagctcttcaacttcctttcaatctccagaaaaggctctctgcgtgctaatggtaacgtggctttacagatttttacccacttcaaatatggccgccaagctccgttctcttttaccgcctgatctgcggctacaattctggcttcatgcccgcctccaaaagtgcttcctctcgaggggttgtggttcttactgcgcaggcgcaaaagcaagtcctcttccgggcaaaatggcgatgggactaatgtgcggacgccgggagcttctgcgcttgctacagtccgggcgtcgggtaaggatgccccggggcagagcaccgggatgctgccctgacccagtgaaccaggccccaggacagctcgtgctaggggtatcagcagacgctgacctgctcaccgggacctgaatgtcatgacctcgggtcatgtgaggacgcgctagggttagtccccgacactatgggcccagcagcccggtgtcagcttctggaattggcttggctcctggcgagagcacctcggcctcgttctcagggccctccgatgtgggtctgcgataactgagatgcggggaacccaggttcgagcttcgctctgcaggcaccacccgctgcatgccttcgggctagcggtctgcgcgcggtgatagcaatgtcctcccctgtagtggccgagctgcctgcttcttggggagttagcataatgaatcccgtttgcacccacgcgaggacttctgctcccggtaaaggggctccatcatccttttacacgctcaggtccacagcgtcgcagggccctcgcaatggcttgggaaaccgctgaccacacggctcctattcccagcagccccgtgctgctgtcgcccacactacctcttccttgcggcttccggcccccgcagcctcagtacctctgctatctcttttgcagaagtccaggtaagaggcctttcgttcctgcaatattaggagtggtgtttcctggttggtttcatattttgttttgtttgggagcagggggaatatggagcagagttcttgtccacgctccacacagctctccaaaatgatagcatctctgcttaggatggattttcaattcagtggggaaatgattgaaagtacaacaggagagatgttatatttggttttctgagctgttttaaagaaaagcaattgtttcatgttaatatatggcaaaaatcatgatagtgatattcaaatggctgaagtttggaaaacagtgataaaagaaataacttcccagcatgaagggaagtcatggattcttactcaaagtaacttctcttcctaactattgataaaaatgagatgtcctttttaagcttgaaatctgcagacactaggctaacctggaagaacaagaagtagagagaacagaacccagtactggttattataaaaagatctcacttgctttgtgttcgctactgaataaatataatacaaggctttctttcacacaggttcaggcccctcctgttgttgctgcaactccctcacccacagcagtacctgaggtggcttctggagagactgcagatgtagtccaaactgctgcagagcagagcttcgctgaactggggctggggtcatacaccccagtgggactgatccagaatttactggaatttatgcatgttgatctgggcctaccttggtggggggccattgctgcatgtaaggggaatataccctggacatgggttagggatttaacctcatagatggcaattctttgaatggattcaggaagtagttgcagaagctctggggtcagaagagcagatgatttcaaatgagcaatagaggttcatgatacctagatgcactctgcctatatttcttaaagagcattataaaaccaccagatcatctgggattcaagaagtgtagatatttgaatacaaacatggggttagagtcaggggaccttattaacagtcatgaagctatcctggtttagaacagaggttcaggtcaggcacttaaacccctaaattgggaagccactagcattgcttttgtaaaggctagaactctgctttgaattatgtgtctttctgccacgttgctccatcaattatcttttctcccctgtgtcttcagcatttccctcctcactgccctaccccgaacatgtaaacatgctcaggcacacccatgtgttacctgggggaaggtttcttcccttcatccttagttccccttcacttactatcctatcttcttcctttgatggctgttatttattttgttgttgttaatttttgtggatacctagtaggtgtatatatttatgggctacatgagatgttttgatagaggcatgcaaggtgtaataatcacattatggagaatgagatatccatccccttaagcatttatcctttaagttacaaacaatccaattacacttttattttattttttattttatttatttttttaaacggagtcttgctctgtcacccaggctggagtgcagtggtgcagtctcagctcactgcaacctccacctcccaggttctagcgattctcatgtctcagcctctcaagtagctgggactacaggtgtgccaccacacctggctaatttttacgttctttatttaaaaatatgctattattactgactatagtcaccctgttgtgcaatcaatagtagatcttattctaacttttttttacccattaactattcccaaccctgactacccttcccagcctctggtaccttccttctactctctgcccatgatttcatttgttttgatttttagatctcacaaataagtgagaacatggcgatgttcgtctttctgtgcttgccttatttcacttaacatagtgatctccagttccatccacgttgtcacagatgactgggtttcattcttttgatagctgttacttaaaagactgctctgcatccaattagcctacttctttccatttactccctcagccgtctggcttttactcatatcacctcattcgaactgccagtaacataattgctaaatccactcctgtcagctttttgtttgaggaaacaaacaggattcctaatcatctgcttagagaagttaatgccatacttttgtgatgccaaattagagaactgagccttaaagcaactaattcattcccctgaccttatttctgggcctcttaggcatgagtcatagaatggacaaggcaagaataagaccctttcagtaaggacctaaaagccttcaaccttctagctgcagaactgctttaatttcactccaatcctagtttgtattttccaggtacagtctttgcccgctgcctgatttttcctctcatcgtgacgggccagcgagaggcagccaggatccacaatcacttgccagagatccagaagttttccagtcgaatcagagaggccaagttagcaggagaccatattgagtgtgagtcagttgcagaatgagcgtgggagaagtccacatttgcacttttccttacattctgctgggggaaaggaacaatgtaaatcagaagttgccacagtcgggaaagttctaaaggtttatctgtttcttagacctaatgctcccaaggagtggccagggttggttagaaatttcacaggccaggtagataatgaggatgttcacctccactgatgtaactgttaccccaaccattaatttcccctcacctcacagattacaaggcttcctcggagatggcactttaccagaaaaaacatggtattaaactctataaacctctcattctccctgtgactcaggtgagcaaaaacatttccttccttatttcatccagtacccatgaaatttcctctctgtgtttcatgtgtcccaggtcccccaaaaaacaggtggtggtggattatacatggctttcagtagtggggtgatgaaaatgttctctctggtaaagcatgctgacactgtttatcttgtgtaataggccccaatcttcatctccttcttcattgctttgagagagatggccaaccttcctgtgcccagcctgcagacaggtggcctctggtggttccaggatctcacggtatccgatcccatctacatattaccactggcagtcactgctacaatgtgggctgttcttgaggtaagcccagattggccaagtgccaggcctgcaaagtgaactggggttggagggtaaagtagttgtacagaatggtcatccttcacttgctggagaaagagttgatgggtaagagattagagacagattcactgaaactgacagctttcccgacttttccaccccacttcttttggcagctaggtgctgagacaggtgtgcaaagttctgaccttcagtggatgagaaatgtcatcagaatgatgcccctgataaccttgcccataaccatgcatttccccacggtatgtaatgccttatgggctggctccaaggccttctgcctagcctagccacctagcaagctgaccagggatacagcttctgagtcccttctctgtgttctcacccaggcagtgtttatgtactggctctcctccaatttgttttccctggtccaagtatcctgtctccggattccagcagtacgcactgtacttaaaatcccccagcgtgttgtacatgacctggacaaattacctccacgggaaggcttcctagagagcttcaaaaaaggtaagggctcatcctctgtgaaaaaggactagggaaaggggtctaaaaataggaatgcaactgactctcttgcttctctttacacaggctggaaaaatgctgaaatgacgcgtcagctgcgagagcgtgaacaacgcatgcggaatcagttggagctagcagccaggggtaaatagtcctttcaggccaaattctgtcttttgtttcttcctttctgttcttcgttgaaatttgttttctcttctcccctcaggtcctttacgacagacctttacccacaaccctctcctacaacctggaaaggataaccctcccaatatccctagcagcagcagcaaaccaaagtcaaagtatccctggcacgacacacttggctgacttatgttctgtgcgcattctggcaggaattctgtctcttcagagactcatcctcaaaacaagacttgacactgtgtccttgccccagtcctaggaactgtggcacacagagatgttcattttaaaaacggatttcatgaaacactcttgtacttatgtttataagagagcactgggtagccaagtgatcttcccattcacagagttagtaaacctctgtactacatgctgcttcctgatacttattgaacagggaaatcagtgtgcacttcagaaaactgaagaatacccagcattttgggaggccgaggtgggtggatcacctgagatcaggagtttgagaccagcctggccaacatggggaaacgccatctctgctgttttacaaaaatagccacacgtggtggtgcacacctgtagtcccagctactcgggaggctgaggcaggagaattgcttgaatccgagaggcggaggttgcagtgagccaagatcgcaccaccgcactccagcctgggcaatagagggagactgtctcaaaaaaaaaagaaaactgaagaatagagtgagtcatgattgcttttgctggcccatggccttggaaaatataatgttttaacctggcattaagggtttaaacttccacccaggcgcagtggctcacgccagtaatcccagcacttttgggaggccaaggcgggcggatcacgaagtcagcagatcgagaccatcctggccaacatggtgaaaccccgtctctactaaaaaaaaaaaaaaaaaaattagccgggcatggcggcgggtgcctgtattcccagctacttgggaggctgaggcaggagaatggcgtgaacccaggaggcagagcttgcagtgagccgagattgcgccactgcactccagcctgggcaagagagtgagactccttctcaaaaaaaaaaaaaaaaaaaaaaaaaaaaaaacagtttaaacttccaacccatgcatgtgttgttctatgcacatttggattgcagtctagaggtgtggctgataagttgaatgttgagattgtatctaaatatagtaaccgcacttcttgatcccaagattactttaaaaatttcaagaagtagatgtgtgcaaattcttagtgataattaagaatgaaagttccaggctgggcaaagtggctcacacctataatctcagcactttgggaggctgaggtgggtagatcacttgagtccaggaatttgagaccagcctgggcaacatggcgagaccttgtctctgctaaaaagttagctgagcatggtggtgcttgtccatagtcccagctacctgggaggctgaggtgggaggatagcttaagcccaggaggttgaggctgcagtgatccaagatcatgctgctatactccagccttggctacagagcaagatcctgtctcaaaaaggaagttcatgtcatttttatgtaacaatccaacatttgactagagcagtttaagtgttctgttgtctgcctttgtgtagagcctggtttatcagccttcagcagctagcttgagagagaaaagatggatatactttcaagcataagattgattttagtctttgtgtttctaggctaatgggagctgtcctagagatagatactatataaaatgaagccactcagactttaggaacataaacttttattgtcatccagcacctgtgatagtttcatgtctctctaaaggagacaggaaattggagcattgtgggcccttttaaaagaaaagaggagtaggtaggcacacccaggtgcttctaaaacaaccaagcccaaacctgacatgctcctccccacagtcaccttcattgtcccctttaaaagtctggaacagtatgtagcaaaacaaataaattacttttcatttcaaaaagtaagttcaaaggttgaagctgcctaggccaggcttctggacaggtgcctccaaagaagtgagctttccttttcaacttccttagctctagccagtagaccagaaacccctgctttccacatcaggattccagatggtgtttagttagatttgggatcccgttgcttgggcatctctcctccatcttccaaatccatttctgcagcaactgacatacacaggacctggaggtaccttgtggcagaccctacaaagagaactttgagttggaattgagaagaggtcagctgggctgagttcaagtgtcactgaatggaactcagtgtgaggggagtgattccactaagccgaagggttcataagaaggggctaaggcaaagatgtctttggaggctggatttacagaaaaaggcaaaaaccaagctctgcaatagctgagcggacttaaggatgcacggcttacccacgatccttcggaggtaaagcggtcgcttatgttctggcactctgatgatgaggaagtaaaagggcaggcctgagagggcaatggcaatgccgatgagggagttgatagtatcactgtaaagtggaacagccaccaggaagatggtgcagaggcagaagacaatcgggaagaaaacgctgagctaagggcacaggaaacataactggagtggacaactcaggattcttaacagctaaaataaccccacctcccataaggattagcgcactgagccttctttccatacctttaatttcaacacattactaacgaccaagtcccaggcaaaggtttctaaataaagtgctttgtcatagtcccttgtagcaacaactccagctgtttcaggtggagcagaggtaggatggagttgccttaccttgaggggacgaggtcgatcaggctccttccagcgcagataaagctgacccacaatagaaagccccacaaagaaccagtagctgaagctgtagtagttaatgagctggaagatgtcttccacgcacaagtagatcaatgccatgataccctgtaagcgtgagcctaagtcagctcttctcagggcctttgttaatccaaaggcttttcactccctttataccccagaaatccatcccctgtcaatcctcaaagtctcctggtcctcttctggttttaatccctttaacaccctagtttcagtaccttatcccctctcttataagtcagtagtctcaactggcttttcaacccattcttcaagttaaccctgtataaagcaagctcgaaacaatccctcaaaagtcttgcataggaccctttccataatggctccaacctacaataacccgctcttatctcctcctacatgttgagtatccctgttctgaaaatccaaaatgctccaatgagcatttcctttgagtgtcaagtcagcactcaaaaagtttcagatttttagagcatttcagattttggatattcagattagggatactcaacctgtattaaaacccatactgctttatcacaggattttctgatgctatttctcctacctaaagcccatctctaccatttgcaaccctagccatcaagatgcactttttttttctgagaacactttggtggattttaagacacacacacacacttctagatgtaattcttcaccctctactcccatggaagtgatcgtttcttctcttaaacaccgtatcactcactatctgtcatggcaatcaatcattacagtgtattccatgtactttttgccttatcttagagcagaggtgtaccattccttagagcatttggatttcccctgtagcggttagcatagtgccttgcccgtggtgaacattctgatccaccaatagtttttctattggaatctttcagagctttcaggaagctagaacagtcgcttctgctgttactaaagtttcccccgcaatctggctttcagtctcatccttgagttcacttacattgaagagcagagaaggcactggtgtgaaccgctcaacatggatcatgcagatggcatcagggagatggccttctcttgagcccacaaagaaaagcctatgttaggtaagataggagaagctgagaaaattggtggacacggtgcagcctggttcacctgccacatggccctccctctctgccatcccttccttcaaaagtatttggataatatggactggagctcagtattaagattaatgacaactgcaggcttctgctagaaacaagaagaaagaggttgtggtatcggttggagaacacaagtaatcaaaggctgggtcctgtaagttctgtccactgcatagccctttgatgatacacccctcacaaaagttgccactcttacctagaagcagccacaatggaggcattgaggccaccaaaacaggataatgcaactgacagtggaattatccagttaaatattccaaatatctgatctgcaaaagtctaagggaaaagaatggaagagtcattagcaggatctaaaagggatgaaagacatggatgggcatgcccccagattccccttattaggtattccaacctttcttccacagtggggttaacaggaccttcttgcaagcccggtattctaaatgaactcctttcaaggctgtctaccccctttccaggactttcaagagccagaatatacccagtaccccacaagacaccctcaaccttctgctagtgaaaatcctttaccacagcaacagcatcactggccaagatgtctctcatgtctagcacagtataataggccacattggtcaagatatagatgatggtgacaatgggcatggagatgccaatggagaggggcaggttcctacagccaaatagaataaaatgcacattagtcccacagtcatatccctatctctcctttaatccttagactctccctgccacaccggtctttccagggatggagactgttgctacatttcctcaatgcatttgtctttgacggtgccctggatagtggctgaagctctgaacacttaagaactaaagaacattaggggaaaggaatatcatattaggagacaggactgtgcagctgggagcagtggctcatgcctgtagtactaacactttgggaggctgaggcagggagatggctcgagtctaggagttggagaccagcctgggcaacatggcaaaaccctgtctctacaaaaaactagccaagcagctgggcgtggtggctcacgcctgtaatcccagcactttgggaggccgagccgggtggatcacctgaggtcaggagttcaagaccagcctggccaacatggcaaaaccctgttcctactaaaaatataaataattagccaggcatggtggcatgcacctgtagtcccagctactcaggaggctgaggtacgagaatcacttgaactcgagaggcggaggttgtggtaagccaaaattgtgccactgcactccagcatgggcgacagagcgagactctgtctccaaaaacaaaccaaaaaaaaaaaaattagccaagcgtggtggtgcatgcctgtaatcccagctatttgggaggctgaggtgggaggatcacttgagcctggggaggtcaaggctgcagtgaaccatgactgggccactgcactccagcctgggcaaggcagccagaccctgtctaaaaaaaaaaaaaaaaaaaaaaaagcagggcgggggggattaacaaagactgtccccagcatcataacgcacaggaaaatgggaggttgttttgttttataccccaaagatcttttggtgtcaggattccatctctaagattatcaacattggcaattttgcctcaaggttgagaaatataaaaagaaattatggaggcaaattgtgaaatttaacatcttcagagaataagataggccttcagtaggaagagaagtgtatgtatctgactagcagcctggaagatatgtctgcccaccccttcctcagtttgagaacctcaggagccatcctaactggtgggcaaaagaaagatgcaaagagctctcaaggtccctgtagcccaataaagccatgatctttataagcatccttaacagtaaggctgccaaaaaaaaagcacaaagtggggcaaatactctgcaaatagagtcatgcagtttctgtccggtaggtggaagtaccacccaggccttgatcctgcttctgttatctctgttcccatagcgttaccactagttgtgtaccaagagtgctcttctgtttctcaagccaaaaggagtttattggtataagaattgtgattcttttcacttaagcatttacagaaagctgggcacagtggctcatgcctgtaatcccagcactttgggaggctaaggcgggcggatcacctgaggtcaggagttcgagaccagcctggccaacatggtgaaacccatgtctctactaaaaatacaaaaattagccaggcgtggtggcaggcacctgtaattctagctatttgggaggctgaagcaggagaatcacttgaacctgggaggcagaggttgcaatgagccaagatcacgccattgcactccagcctgggaaatacagcaagactctctccaaaaaacaaaaaacattttaccgaaactccactccctggcaaatcttagttcccagaatcatagaattttagagccaggaaaggccatggagatcacagaatttaaccccctcaattacagataaggaaacaggcaaagagatggccgggcaactccctcaaggttagccaacaagtcagtggaaagatcaactctaggtccttgacttcctgtccagttctcttttcactctatatatagactacagagcaataatggtagggtgacttaattgaatgactgaaactataccacaatgtcagtatgaatttaggaaacaaggaaggtatcagagggaaacacaggaaggtttctggaagtctatatcccaaagctatgtatgtggggataagggtggataaaatatctatcaaggaaaatctgttttaaaaacatacataagcatataatacaacctgctttaattaatgcagaaattaatgaacaaatgtaaaaatgcctttaaaaatttacaaagcatacatgagtaagttcatattttagccctgttactgtgatcatagacaagttacttctctgagcctcaggcctcccatctattaaaatgaggctggtaaaattaacctcatagtggttgtggtatgctgtctggcacgtagtaggagctcattaaatgatggctatcactgctatggaaagttggtggtgcagtacctacctctcaggattcttgatctcttcagtgacatagttgagggtgtcccagcctgagtaggagaacagagctgagtacagtgccagggcaatgtcacccactgcaaatgatgaaccctcaaaggaattctcaaaatgagtagaggctcctggaacccaagaacattggaaggcaggggattagtggctcattctcccacttcaagatggtcaagtaaaggactgacagaatatggtaatataatagcaggtaagtggcctacaacacctttggcagcaagagtaccagtaagggaacaggaaacagaagagagacgtctatagagatagaccagaatgccctgcatcctaatgacatagatggggatcttgacaggaagggtccagggtagctttctaggataagaaaccaccatagagcagaaaagctggagaatagaaacaatgcagttctgttctgctctgcaggctgcctgattcctgcctcctatcacaatctgccaaaggcagctcccagggcatggctgtcaaccctttgccaagatcagcctcctctgggaggcagcgtgcatggaagttaaaggacagacttttgggtcagttgtcctggatacaaatttcaactcctctacttaccggtagcaacttgggcaagatatttaattcttttttttttttgggggggggacagagtctcgctctgtcgcccaggctggagtgcagtggcgtgatctcagctcactgcaaccaccgcctcctggattcaagcgattctcctgcctcagcctcccgagtagctgggattacaggcgcctgccaccatgcccggctaatttttgtatttttagtcgagatggggtttcaccatcttggccaggctgatcttgaactcctgacctcatggatccacccgcgatggcctcccaaagtgctgggattacaagcacgagccactgcgcccggcccaaggtacttaattctgcaggctgtttcctcatccataaaatgagaataataatagtgcccaccgaataaggttatagtaagaaatgagataatgcacaaagagcacttagaggagtgcggctcacagaaaatgcttaaaaaagattagttgctactaatattatttcttaccctggccaagtctaacaatgcctgcaacgatgaccgcgatcagtgccaatactttagcataggtgaaaatatcttgtaccagggttccccatttgacataggcacagttaatgaaggttaagagacctgaaagaaaaataatactgattggtgacttacccttaccaccctagggccttagactcccaagcaatttttccagtaccagtcaccaagatatatatacccttcagccaaagacagaccctctgacctgctctgcactggaaccctcggggccccagaatgtcctcaccattatcatacaaaggcctctatactccccacccccagcaccttatatgggagacacaaaacaaagtgactgcagatctgcttacataaaaaatacatccaaatgtccaatcacagcagtgggaggcaactgggaactgtacaggattagtgattgttccggctcttggctctgaaaagtcatggtctctccctcctacctcccattccccatgggctccaggacacagcactctgactctgtggtattactgttaaccttgaggagttctgctgtgacttatccaatgctgagccagcaggtcaggctgtgtggccaaggattaggatgaaggccagacttcctgcccactgcctggcagctcagctgcctgcttttgtgcttggaaagattcttgcagctaagagtggttcctgtagaatggggacagggcatttttcctgatgggacaatagagaagtaagagccacacacattcccccagtccttctactcagaagtacaggttttaaaagtaccttttatcagggttcttaactagggcctccatgaggctcgaaattctctttcaaagtgttatgtccatatgaatacagacatacctaagaaaaagtttcatatcttttcttagaaagggatcatagcttttatcagaatctcaagtccattatccctcccccaacaaaaaagttacaatctacgacttgaatttgaattacttgaagaagttcaacaagggaggctcacgcatgctgtgaggttgaccagtagccccagaatgtggccgagaagaaagttggaaaaaaaaatacagatcttcccactggtagcatagcgaatcgcttcattgctccctccttcccagctcagcaactggaacactataaggagggcttaactttaaagcccttctcccaagggctccaagggcaaggtcaacatcaccctgccttaccagtcaagagaatgaggcctagtacagttcttgcctacttcaggccaccaacacagtcagaaacaccctctgagttctcctggcagtggtgtggccttggtgtcgctagtcctcctattttgtggtgtcctggcctcaccacattctggctacttcatcctgagaagcagggaagtctggcctctcagaacagctgccccatcttctctctctcaccctcccttccaccaccaccctcattctactgactgcccaagttcctttctgctcttcctgagaaggcacattcctgtcctatataaatgcttgcctttctgcctaataaacaacaaaccttatcacagggctgggcaaaaatgtacccacagctccaggccaccccagtgctaagttaataatttaagacacaagtgtgcagcaccccacaaaatgaccaaagtggctgtatcttgccctccacaaatctttcaaatctgtcactcctcctcagccagtcacccatcctttactccccactggactccagcctccagccactcaacagcttagtgccccttctccccagcttgtaacctctgcccttatcctaggctctgcggctggctcataaccacaacatagccaggtttccaagtagaaacaccagacacaaaggatgctgccacattgtcaggaaaatgggatccccaaatacaaatttatgattccctgcagggtaaccatgagtcataacaccaaactggaataagcttacaggactagctctagttcagactcagagtctgagctgtgtgccacaaggttcttctcagttctgtccagggatgtaggcagggaaaaggagggataagcaaccaattcaccacctgctaccacagcagattctgaaatggaaatacatggcttgtttatattttattttatttatttttctttttctttttgagacagagtttcacccttgttgcccaggctggagtgcaatggcgtggtctcggctcatggcaacatctgcctcccgggttcaagccattctcctgcctcaacctcccaagtagctgggattacaggtgtgcgccactatgcccagctaatttttatatttttagtagagatgaggtttcaccatgttggccaggcttgtcgcaaactcctgacctgaggtgatccacccacctcagcctcccaaagtgctgggattacaagcatgagccaccgcgcccggcctatattttattatttttttttatttacttatttattgacttatttatttatttatttatttattttatttattttttgagacacagtcttgctctgtcacccaggctgaagtgcaatggcatgatcttggctcactgcaacccccacttcccaggttcaagcaattctcctgcctcagcctcccgagtagctgggactacaggtgtgtgccaccatgcctggctaatttttgtatttttagtagagatggggtttcaccatactggccaggctaatctcgaactcctgagctcaggtgatccgcccacctcggcctcccaaaatgctgagattacaggcgtgagccaccacacccgtccctttttgttttttttttggagatggggatctcactctttcacccaagccagagtacagtggagaaatcatagctcactgcagcatcgaactcctgagctcaagggatcctcccagctcagccaccctagtagctgggatcaaaggtgtgcaccaccatgcccagctaatttgttttaattttttttttttttgagatggagtcttgctgtcacccagcctggagtgcagtggtgcgatctcagctcactgcaacctctgcctccagggttcaagcagttctcctgcctcagcctcttgagtagctaggactacaagtgcccaccaccacacctggctaatttttgtatttttagtagagacagggtttcaccatgttggtcaggctggtctcgaactcctgaccttgtgatctgccctcctcagcctcccaaagtgctgggattacaggtgtgagccaccgtgcctggctgttttaatttttttagagacggggtcttgctatgtggcccaggctggtctcgaactcctggcctcaggcaatccttccacctcagctatctgaggagtaactgggattatagggaagagccatggcacctgggtggcttgtttacattttaatccctattgcttctctacttctttttttttttttttcgagacagtcttgctccgtcccccaggctggagtacagtggtgcgatctcagctcactgcaacctccgcctcctgggttcaagcggttctcctgcctcagcctcccgagtagctagaattacagacattcaacaccatgcccagctaatttttgtatttttagtagagacagggtttcgccatgttagccagactagtctcaaactcctgacctcaggtgatccgcctgcctcagcctcccaaagtgctgggattacaggtgtgagtcaccggcgtggcgtgcccagtctcttctctacttctctatccatccatttgtatccctctctttgtccaccagtatcccacctcccccactcctgagcctgatttctctgacccaccttctagccctgatctgctctctgtactgagcacagaaggctcagtttgaatgaggaagggaatcctacagaaagaaaccagggagcagagggaactgcctgaagagagctagccctcctcttcctcaaagcctagcttcctccagggcctcttgactgtgggagcaggaaatgggtatggcaggcagcagtgctgacagggctttttgtccccacctcagcggatacagctgaccactggccccagagcccagctaagtgcactgctcttgaagtggagcccaacctcctgcttcagggccaaggacaggaggggaccatggggttaggataatatggaggcaactgcaagttaacctcaagggcagagatgccctccccttctacctctaggggcaattcaatccccacccaacactgggccaagtctataagaggataacctgaaatcacctttgacccttgactcggtgcagcagcactcctgctttgaccccagggggagaaaaaaagaatctgcaaagaagtcactcgtggccgggtgcagtggctcacgcctgtaatcccagcactttgggaggccgaggtggacagatcacgaggtcaagagatcgagaccatcctggccaacatggtgaaaccctgtctctactaaaaatacaaaaattagctgggcatggtggtgtgtgcctgtagtcccatctacttgggaggctgaggcaggagaatcacttgaacccaggaggcggaggatgcagtgagccaagatcacaccactgcactccagcctggtgacagagcaagactccatctcaaaaaaaaaaaagagaagtcactcctataaccatctaaaaagatgttcctgaatggatcatcaaacccagcctacatacggtccccgggagtaggagactagttctagtggtaaggcccagcatcagcgctagaactaaaagccagaaagcaccagaccaggtggatccagaacagaacaaagcttgcaggcccactctggatcagatgctcaggtttagtttagacacctaaatgaaacatttcctgaaaaagaacattaaacccacaattctgtaagcactattacctttaaatacacacaatgtaacacacaaaacttatgattacaggcgtgaaccaccatgcccggcgtcattccattttaaaagtgatctatagagccaggcgcggtggttcgcgcctgtaatcccagcaccttgagagactgaggcgggcagatcacttgaggccaggagtttgagaccagtctggccaccatggcgaaaccccgtctctactaaaaatataaatattagctgagtgtggtggcgcatgcctgtaatcccagctacttggaggcagaggtaggagaatcatttgaacccgggaggcagaaattgcagtgagccaagatcacgccactgcactccagcctgggtgacacagtgagactccatctcaaaaaataaaataaaataaagtgatctatagctcttccttttactaagccaacagcgtcttcctcccagcttctaccagtagtgccagacccctcctctgtctccacacagaatgaagctaaatcctcttccacccaatggcccttcttaacattaaagatgaatatcacggccaggcgctggctcacgcctgtaatcccagcactttgggaggccaaggcgggcagatcatctgaggttgggagttcgagaccagcctgaccaacatggagaaactccgtctctactaaaaatacaaaaattggccaggcgtggtggcacatgcctgtaatcccagctagtcgggaagctgaggcagaagaatcacttgaactcgggaggtggaggttgcggtgaactgagatctcgccattgcaccagcctaggcaacaaaagcaaaactccatctcaaaaaaaaaaaaaaaagccaggcgcggtggctcacgctgtaatcccagcactttgggaagctgaggcaggcggatcatgaggtcaggagatcaagaccatcctggctaacacggtgaaaccccatctctactaaaaatacaaaaaattagccgggtgtggtggcaggcgcctatagtcccagacactcaggaggctgaggcaggagaatgacgtgaacccgggaggcggagcttgcagtgaaccgagattgcgccactgcactccagcctgggccacagagcgagactctgtctcaaaaaaaaaaaaaaaaaagccaggtgcagtggctcacgcctgtaatctcagcactttgaaaggccaaggcgggtggatcacgaggtcaggaaattgagaccagcctgcccaacatggtgaaaacctgtctctactaaaatacaaaaattagccaggcatggtggcacaagcctgtagtcccagctactcgggaggctgaggcaggggaattgcttgaacccgggaggcagaggttgcagtgggccgagatcacggcactgcactccagcctggccacagagcaagactccatctaaaaacaaacaaaaaggatgaacatcctgtccccttgagtctttactccttcaggctaaaacccagattttacaaccccttgtggagcaaatgtggcttccagacccctcaccatcccaggactgtcatttatttcactttgtcatttactgcatatacttcactgtgtcagtatttccccagaaatgcaagaccccacacagaaaactccagaccgtgttgccgactacggagtctcaacctgaaatcattgtttactacaactcctttctttcccacctcaaagtgatgagatctttcctcccctctttctggacctataaaaatgatttttttagctgggtgcgatggctcatgcctataatcccagcattttgggaggccgaggttggaggatcgcttgagtccaggagttcaagaccagcctgggcaacattgtgagaacacatctccacaaaacattttttttagttagccagacatggtggcacacacctgtggtcccagctacttgggaggttgaggcagggggatcgcttgagcccaagtggtcaaggctgcagggagctgtgatcgcaccactgcactgcagcctgggcaacacagtaagatcctttctccaaaacaaaaaaagtgattttttccccccagatacaggacttcatatttagtcttagtgactttcctctgagtttttatgcattattcttatatgatatgggatttttccttcttcattttattagttcaaatcccttctttaattttgtgaaatctgcaaatttgatcagcatacctcctgagtcttcactgaagtcaccctaaaaatgttgactagggccgggcgcagtggctcacgcctgtaataccagtactttgggagaccgaggagggaggatcacctgaggtcaggagtttgagaccaggttggccaacatagtgaaaccccgtctctactaaaagaacaaaaattatccgggtgtggtggtgggcacctgtagtcccagctactcgggaggctgaggcaggagaatcgcttgaacccaggaggcggaggttgcagtgagccaagattacaccactacactccagcctgggcgacagagtgagactccgtctcaaaataaataaataaataaataaatgttgacatgggctggcagcagtggctcacgcctgtaatcccaacactttgggaggctgaggcaggcagatcacttgaggccaggagttcgagaccagcctggcaatatggcaaaaccccatctctactaaaaggaaaatgcaaaaattagcagggtgtgatggcacacgcctgtggtcccagctactcaggaggctgagacatgggaattgtttgagcctaggaggcagaggttgcactgagccaagattgtgccactgcactccagcctaggtgacagagcaacactctgtctcaaaaaaaatttttttaataaaaaaattaaaatgttaggccgggcacggtggctcacgcctgtaatcccagcactttgggaggccgaggcaggcagatcacaaggtcaggagatcgagaccatcctggctaacacaatgaaaccccatctctactaaaaatacaaaaagttagccgggcgtggtggcgggtgcctgtagtcccagctactcgggaggctgaggcaggagaatggcgtgaacccgggaggcggcggttgcagtgagccgagatcgcgccaccgcactccagcctgggtgacagagcgagagttcgtctcaaaaaaaaaaaaattaaaatgttgactaagatcaacagagctgtatagtctatcactgtagacctttctgtatttgtcattattccacaatgttattcagccaactaagaatctaccaaactttatttttatctagtctaccttgtcaacaagaatatcatgagaatttgccacgaacctctccgaaatctgcatacacatgcctctgctctaacaatctaatgatgctatcaaacaattcaaatcaaattagtatatatttatgtagaatattcatagttacacccttgcagtagtcaaaaactagaaacaacccaaatgcccagcaacagtagattgaataaatactaaacagcactaagaataaacaatctgtaatcctagcacgttgggaggccaaggcgggcagatcacaaagtcaggagtttgagatcagcctggccaacatggtgaaacccccgtctctactaaaaatacaaaaattagctgggcgtggtggcgggcacctgtcatcccagctactcaggaggctgaggcaggagaatcgcttgaacccgggaggtggaggttgcagtgagccaagatcctaccactgcactccagcccgggcgacagagtgagactctgtctgggaaaaaaaaaaaaaaaaagtgaacaatctacgactacagacaaaaatacagaagaatctcaaacataataagcaagccagatgcaaaagtgtacatatagattatatccatttacataaaatcagagaaaactaatcaatgctactagaagtcagaatagtgatttccctttgtgtggggtggagaggcagggactgggaagagcataagaagggctcaagggtgctagttacacatgtgctcaactagtgacaattcattaagccataaacttatgagattgcactgttccttctgtatattatatttgaataaaaaaattaaaattgaaccaaaaagtgaggttagcagagtatggcttgttcttagtgaattcatacacgttactaatgatttcccacccttctgctcgtacttcactaaccagatttaacttacaagcctagaatttgggcaagaatccaccttaagttatcacttcagagtgctgctcatccacctccggtggaaagctgggctatcacttgtggtaggtagactaatggccccccaaagatgtccaccccctaatccctggaacctgtgagccatgttatattgcatggcaagggagaattaaagttgcagatagaggccaggcgcagtggctcatgcctgtaatcccagcactttaggaggccaaggcgggcagatcacctgaggtcaggaattctaaccaacatgagtcagcctaaccaacacggtgaaaccccgtctctactaaaaatacaaaaaatagctgggtgtggtggtgggtgcctataatcccagctactcaggaggctgaggcaggagaattgcttgaacccaggaggcggaggttgcagtgagccaagatcacaccactgcacttcagcctgggcaacagagcaagactctggctcaaaaaaaaaaaaaaaaaagaaaaaagttgcagacagaatgaagattgctaatcaagtgacaaaacagggaaatcattctgtattctctgggtgggcccaatgtaatcacaaaagttcttaaagatgaaagagggaggcagaaaggtcaatgtcagagtagtacaatatgagaaagactctcccagttactgctgactttgaaaatggaagggtccatgagactctagaagctgggaaaggcaagaagatggatcctctccttaagcctccagaaagaaacacagtgctacttcatattagcccagtgagacccatttcagacttctgacctccagaattatgagatgataaatttgtgttgttttcagccactcaattggtggtaacttgttagagaagcaatagaaaactcatatgttggctgggcacagtggctcgctcctgtaattccagcactttgggaggccagggtgggctgatcccttgagctcaggagtttgaaaccagcctgggcaacatagagaaaccctgattctacaaaaaatacaaaaattagctgggcctggtggcgtgcacctgtagtctcaactactcaggaggctaaggtgggagaattgcttgagcctggggaggtcaaggctgcagtgatccttgattgcaccactgcattccagcctgggtgacagagcaagactgtctcaaaaaaaaaaaaaaaaaaaaaaaaaaaacctaactgcaggcagaaaactggaagtagcactgggtggtactattcattacatttgttgaaaaatggagaaaggggaagtgaaacccttgacagctcactggatcttggtgtactgaaatttccctctcactgcaatcaaaagaatctaaatgtgaccttatgcaaagaaggcaggcatcccttatgatagcagatcctcaaacaagtatgtacctctctctttaatgtactacatgaatcccagctcttctagcaaatcatcatttttgaacaaagtatactctttcattatcatattctaatcaaatatcgctgatgcctatgaaattgtttcctcctttcagtaaaaggtcaaatacgggccgggcacagtggctcatgcctgtaatcccagcactttgggaggcggaggcagacgaatcacgagttcaagagattgagaccatcctggccaacatggtgaaaccccgtctctactaaaaatacaaaaattagctgggtgtggtggtgtgcgcctgtagtcccagctactggggaggctgaggcaggagaatcacttgagcccaggaggcggaggttgcagtgagctaagatcgcgccactgcactccagcctggtgacagagcgagactccgtctcacaaaaaaaaaaaaaaaaggtcaaatacgtttattagccttacttgtaatatttgtagataagagttcaaaagcatcatttctgatcttccatcccattttctccaaatgcgttactgagcaactcctctctgcctttattctctgctatgtagtctccaaaatacccagatttatacttttatctaggcatttttctccttgcctctaaaatttccattctaaagccttattatacacatctctcccaatccctataaacctcctctatcccttaccaggagtttatctttctggtatcttagaatcttagaatttacggttaggaactctgttctgtgttcttttttctttcacatacacagccttcagctgacaaagagacgaaaattccacctgccactcagtttgctactttaaacttcacgtcaccagtgagacatctcagctatcttctgactggtgacatcattcatcccacagcaattagcagaaggatagcagtccctaggcttaattggtgtgagcaagctcttggtcacatgttgctcagaaaaactgcacatttctaggttaggctgggtctgtgtatagtcagatgcacactattcctgggggaaggccaaaccccacaactggcatactcaggcctgctaataccctggtgtctccaaaatactctaccactgctgtttcctcagaaggtccagatataagctctctggaaacgcctcatatctgttacctaaacccagagatttcaagtctcttcttccttttctttgctgcatccccatttgttttgtctaatgttggtttgggaaaatctctacacctttttttttttttttttaattgagatggagtctcgctctgtcgcccaggctggagtgcagtggcgccatctcggctcactgcaagctccgcctcctgggttcacgccattctcctgcctcagcctcccgagtagctgggactacgggcgtccgccaccacgtccggctaatttttttgtactcttagtacagacggggtttcaccatgttagccaggatggtctcaatttcctgaccccgtgatccacccgccttggcctcccaaagtgctgggattacaggcttgagccaccgcgcccggcctggaaactctctacaccttgaaatcacaatttcaccctggcttctttgatacattatttcttccactctccctaggtgctgttatttctctcagatagcagatggccttcaaattattttacctttcagactacagaaaccttttactccaggtgcagtggctcatgcctataatcccagcactttggaaggccaagacgtgaggatcacttgaggccaggagttggagaccagcctgggcagcatagcaagaccctttctctacaaaaaaattacaaattagctggacttggtggtgcacactgatggtcctagctacttggaaggctgaggtgggaaggtcacttgagtgcaggattgagcccataaccatgctactgcacaccagcctgggcaacaaagcaagacttcgtctcagaaaataaaataacatttttgaccaggcgtggtggtggctcacacctgtaatcccagcattttgggaagccgaagtgggcggatcacctgaggtcaagcgttcatgaccagcctgaccaacatggcaaaaccccgtctctactaaaaatacaaaaattagccagccgtggtggcgcacgcctgtaatcctagctacctgggagtctgagagaggagaatcattttgaacccaggaggcggaggttgcagtgagccgagattgcaccactgcactccagcctggatgatagtgtgaggccccgtctcaaagaaagaaagagagagagagagagagagagagagagaaaggaaaagaaaagaaaaatatcttttttttttttttaaagacagagtctcgctctgtcgcccaggctggagtgcagtggtgcgatcttggctcactgcaacctccgcctcccgggttcatgccgttctcctgcctcagcctcccaagtagctgagactacaggcgcccgccaccaagcccagctaattttttgtattctttagtagagacagggtttcaccgtgttagccaggatggtctcgatctcctgacctcgtaatccgcccgcctcggcttcccaaagtgctgggattacaggcgtaaaccaccacgcccagccaattaaaataaaaattttaaagaaacaaccaattcgcttactcaggtgtcatgggtgagagcctctgtaattgcaaaattttgactgagacagtgaaagagatctaacttaactgactccatcttgcttctaacctccaagctgcctttattcattcccaggcataggctgaactaactttgggagaaacttagtttataatttagacaaagaggataacagccctttcccaaagcagacctccttcttgcctggggactagattgcctttgtaggactaacattagccacaagattagaaattatggtttagggctgggcacggtggctcatgcctgtaatcccagcactttgggagccataggagggcggatcacctgaggtcaggagttcaagaccagcctgggcaacatggtgaaaacctgtctctactaaaaataaaaaataaaattagctgggtgtggtggcgtgcacctgtaaccccagctactagggaggctgaggcaggagaattacttcaactcgggaggtggaggtggcagtgagccaatatcacaccactgcactccagcctgggtgacagagcaagactccatctcgaaaaaaaaaaagaaattatggtttaggagtcacgcagctggaagctacaagattctgaccttccctaaactgctcctaagatcagtgcttgaggtattttgtagaccctgctcttggtggatcagctggcccccacccagatcaataaactggcttagctgatcttgtggcccccacccaggaactgactgagagcaagaagacagctctgattccctgtgatttcatctctaactaatcagcactcctggctcactggcttcccctgacccaccaagttatccttaaaaactctgctcccagaatgttcggggagactgatttgagtaataataaaactccggtctcccgcacagccggctctgtgtgaattactcattattgcaatatccctgtcttgaagaattggctctgtctaggcagtgggcaaggtgaaccccttgggcagttacacctctggcaagaagacacaccaaatgcaatccctgtgggtcactggatcagagtcctcccgctctccttcctggaactcagtcagcactttggtccctgtggctctgaccactctgagggagcaagcaggcagtttgtaccaggagggtcttatagtaacaaccccgtgagtcccttctccaagccgtgtaaatccaatccttattggtttgcttagctaggggtcagttcaagtcctcaggtaccagatctcaagcctgagtgagcatcagtaccacctgaggaatttgtcgacccacaacttcagggccccacaccccagaggttctgatgcaggagacctgagacagtttcgcaggctaatctgaggatctgcttctctgggtgtgtttccttaggtaatcacctacggaaataaccacacacagagcagctgtatcagaacagtcgcaaccctttgctaactcaaggctcctctatcctggctgcaaactagcatcacttgacgagctttaacagtccagtgctcaggccccacccagaccaatgaagtcagaaattctggggtggaacccaggcatcggcatgtttttaaaactccccaggtgactctgaagcatggtgacaattgagaacggcttttcccacctctagtgacacaagaccctcatcaattctcctcaaaagcaatttttctgcttccttaattctcgttctccaagccaattctcatctcattcttctccccagtggttcagatttatgtagtcagggagtgggagtgatgagtattgttttctttctttcttttttttttttttttttttttgagacagcgtctcactctgttgcccatgctggaatgcagtggcacaatcttggctcactgcagcttggaccaaatgggcttaaacaatcctcccacctcagccacctgagtagctgggactacaggcatgcaccaccatgcccaattaattttttttttttttttttgtagagaccaagttctccagactggtctcctgagcttaagccatcctcctacctcagtctcccaaaatgctaggattacaggtgtgagccaccgtgcccaatctgagtattgcttgcttgctttctttctttctttctttctttctttctttctttctttctttctttctttctttcttttctattcttttcttttcttttcttttcttttcttttcttttttaattgagacagagtctcactctgtcgcccaggctggagtgcagtggtgcaatctcggctcactgcaagctccgcctcccgggttcacaccattctcctgcctcagcctcccgagtagctgggaccacaggcgcctgccaccacacccagctaattttttgtatttttagtagagacgggtttcaccatgttagccaggatggtctcaatctcctgaccttgtgatctgcccgcctcggcctcccaaagtgctgggattacaggcgtgagccaccgtgcccggccttgttttcttaattctccagatgattccaatccacagccagagttaggacccactgctgcccagcatcttccgcaacctcctctaggctacctgcccagcttcttctgaggcagagagaaaaagaaaggaacatagaaacatagaacatagaaaggaagagagcaaggatgagcccccaaagggacttgatgatcaaagcagcataaaggtctaccccttcactgctggtcaagagtttgttccaaagttcacaacaaacccacactagaacccaaggctctgatgaaagcctatttcttgaggtgaatatgggccagaaaaggtaagtttcttcacctccaccctcagatggctcttgggaaaagccctctgaaaaaggcaactagcttccaagtagaaggttcaaagggcaaaagtccgttggggggcccagcatctgactgttccacctcattagccacaagtacatgagatcagtcattctggtaccaggagaagctgcacgaggacacctggccaaagctctcagacacacagagatccaaagtccttcacagcccacagcggctctggcagactcagggtaagctgtctgcccccttcccacagcaaccctcagcccccaccagcaccctgaaaggcaaaagcacgaaatacccttctcagccaagttgaacctggaatcatatcttctgttcattcatccagccaacatttattgaagaacccactacatgcaattcactgtggccacatgtgtatgacacgaagaatctttgcctgatccctgaagaacagtactctgtaaacaaagagccctgaactgccaggtactgctgactcactggtacaggggacatactgaaggcatagatggtaaaaatgtcctggtagtgtcctgaatggcaaaacaactaggtctcagtgtgggcaagtgtaggtaaggcaagaacagtcatgtccacctgtgaacagtgggccaaaacaccttggctctgaggaaaggacagtcgggtggagctggacttctggacacctatcctcttgctgagaggaaagttccacctctcttgcaaaacagaaagaaaaggctcagccctcctttctgatccctgagctattgtgaagtaaaatgtaaactgcttttaagtcatccaaagacagcatgcggaaggtaaagcttttagaaatcaataagatgcatatgatatgaatataacttgcagtaatagatactatttttaactgacaactgtgtgccaggtcactatgtacttacacctatcttctaatttaatctgacagagagtaagttttattatctttattttacacttgagaaaactgaggtcaggcagtgactagctccaaagcctacatccattccaccacaccacatacctccctaactgtatgcaagaatgtgagacggggagtgggattatctccccctgtggtaatggagatgcctagaacttcagagcactggggcagtccacgaatttctccaagaagtcagaataagcagcttcaggaggtgccatctgcacacctctctgtttgggaaaagcaaccatttctactaccctagacaggacagtgaggctccttcaaaactcagaattccttcactcactcactcattcattcattcattaagcttatattgagtacccactgtgttccaggccctgtgcaggctctgagattaagatccagtctccagccttcactcaaaagtggacattgacaattacaagaatcagttgctatgaaagtcactgagaggcaacctatctacccacacgtcactggaggagtgaatggggtgcaggcaagcaccaggatcactgttatctggactgagtgcatggaggctgctgctggggtgggggaggggaagcaatattcctgacagagagggcaaaacgttattaccctgacaatgaaatcagcaatgaatgaagtcaaccacccgtataaaaaaacctacttaagcaataaccagtaaatgatttcaaggtctattagtaataccagactatctagggctgtagttcaacagctctaaaggtagactatgcctgccaaaagactgcaaacaactggcaggagcagagactctgtgtttgctctttggaaactgtcatgatttgaatagaaaaagatgaaaatatggtacaaatatagatcacatttctatgaggtagggaccccattttatagaagagagaactgagggctgggcacggtggctcatgcctgtaatcccagcaatttgagaggccgaggaaggtagatcacctgaggtcaggagtttcagactagcctggccaacatggtgaaaccccatctctactaaaaatacaaaaaattagccgggcatagtggtgggcacctgtaatcccagctactcgggaggctgaggcaggagaatcgcttgaacccaggaggcggaggttgcagtaaactgagattacgccactgcactccagactgggcaacaagagtgaaactctgtcaaaaaaaaagaagaagaagaaggagaaggaggaaaaggagaaggagaaggagaacaagaggaaactgaggctaataaatttgacctagcattgattgaatcctgcctgattccacgctgttcaccaccatgcaccagtgccttccaaagggataagggtatcccctacactgttcaagaaaaagaagtctgactcagggcacccaatcattacagccatggagaaggcatcattgtagggtagagatatttcatccaacttttccagaaacatacctcaaccaacctaaggcaggcttaactctttttcataaaatcgtccctcaaccttggtcctttcctctaacaatcaccctccatgctttcagaatcattcatctgaagagcatgtctacattccttcccgttcctgggtctctacaatgcagtctgagatgttgcaactccttcctctttcaccctgcaaaagttttcctttgaccctctgagttgccaattccaaatgacattttattccttattttaaacttaatagctcctccagaaaggctatttttgagtgtaaacctgccacctctggtatgctgcccttgctctgtgctctcacctccccaattaactacactgcattagaacagtgtacatatgtctctcccacccacgagagctgtgtgagggcagagagtggataacagttatccttgtacccatgggcatagtcctgaactagacacacagtaacacttaatacattttgctgggtgaataaatgatatttctgaaacctgatttcaccctcactgccctgaaatttcattgccttaggagaaagcccacatgaaaagccaccagtgaccttcatatcaataaatccaatcaactatactcaatctttacctagcttgacctcttagcagattggacacaggtagtcattcattccttctcaattcactcccttccactcaccatcttccaggtttccacctatctctctagatgctccttctccatcttttcacaaaatacctatccctcaaatgtgggtattcctcagaatgcttctaagcccctttgtcctccctttctacatcttgtcccaaggtcatctcatctgttcctgtggtttctttttctttttatttttttctttcttttttttttttttttttttttttgagacagaatcttgctctgtcacccaagatggagtgcagtggagctgtctcggctcactgcaacctcttcctccagggttcaagcgattctcctgcctcagcctccagagtagctgggactacaggtgcacaccaccatgcccggctagtttttgtatttttagtagagacagggtttcgccatgttggccaggctggtctcgaactcctggcctcaagtgatcagcccacctcagcctcccaaagtgttgggattacaggtgtgagccaccgccctggcctgttcctatggtttcaataaccatatatacaatgatgactcccaaaagtatatcatcagcccaactgtcatgattctagatatatatgaatattcaaccacctactggacattaccaggcacatcaaactcaacatgtccaaaactgattccatcaatttctcccaaacctactgcaccttcggtgttccccatacaagtaactggcgtcaccatccacccatttatgcaagccaaagacctgggcatgttattgtcatcaacaacttccactcatatctactcatagtccaagtcttaagtctccctgtccccaaaacatgactctagtccaagccaccatcatttctcactaggatcatagcagcagcttcccacctgtctcccagctttcaatcctacatagaaaaactaatctttcttaaactcacaaattctaaaatctaaatcacaaatgccactcttctgcttttaaaggccttaagagttttctcattgccttagaagacagcccaccaaactccttaatatagttggtgcaatagattggagttttccaatatgcctcaacgtctcccatcccatattcctttcttacaatgtgactttgacactctacccatcaagaggcagggtctgtacccctcttctcgaaactggatggtcttctgtgaatgcctctacctatagagtatgacagaattgacaccatgcaacttcagagactaggtcataaaaggcaatgcaacttccactttgggtgctacaacactcattctggacgctttcagctgcctgcataagcagtctgactgcccacgagtcaccacgctgtgagaaagctcaacacagtccatacggaaagaccacatggaaagactgacacaatttgataaagaaggccgggtgcggtggctcacacccgtaatcctaacactttgtttgggaggccgaggcgggtagatcacctgaggtcaggagttcaagactaacctggccaacacggtgaaaccccgtctctactaaaaatataaaaattagccgggcgtggtggggcacgcctgtaatcccagctactcaggaggctgaggaaggagaattgcttgaatctgagaggtggaggttgcagtgagccgagatcgcgccactgcactccaacctgcacaaccggagcaagactccacctcaaaaaaagaaaaaaaagaagcccagattgtctgcaacttcctcagcaaccgtttttccagctcctgtcaccatctgctgcaaccacatgagggaccctgacctagaactgtcccactaagcccttcccaaatttctaagccacagaaatcataaaaaaaatgactactgttttaagacactacgttttagactatttgttatagcacaataataactagcacagcttataaagctttgaacaacctatgccttgactctatttacctctgcaagccaactctcaaccttttcttcctgaaattcaacactgcagcccaccctgaactcctttcagtgcctgaaaggagcacttctggcatttaggttttcatacattctgttcttgctgcttggaacactcctcttctactcttgattaattcttcttcgccattcaggtatcagctcaaacttctacaggaatggtttctaaatgcctaggttaggactggtctcctcctgtgccttgttctaccttgcaaatcacaacaccatcacaatccattaaaaccctgtatcagaggccaggcacggtggctcacgcctgtaatcccagcactttgggaggccgaggcaggcggatcatgaggtcaagagatcaagaccatcctggccaacatggtgaaaccccgtctaaaaaatacaaaaattagctgagcatggtggtgcatgcctgtagtcccagctactcaggaggagacaggagaatctcttgaacctgggaagcagaggttgcagtgagctgagattgcgccactgcactccagcctggtgacagagcgagactccgtctcaaaaaaacaaaacaaaacaaaaatccctgtattgggttgcccatcctgaccccggcatgcacccatgcatgcggtcacacacacccacgcacacacataaagtgctccaaaaagacaatgacagtgcagggaacgtggcaacctcttcgcaaatacttgttgaatgtttaatctccaaccctatctctttcctaaattccaaagagcatatctgcctactatgctaaaaataaattccaaattcaacatgcccccatcctcctcctcacagtaaatgatatcactgcctacaaattgtctaaaccagaaacatcatctcttcattcaaagactatttattgagggccgggcacggtaggtggctcacgcctgcaatcccagcactttgggaggccgaggcaggcagatcacttgagttcaggagttcgagaccagcctggccaacatggtgaaaccccatctgtactaaaaatacaaaaattagcagggcggggtgacatgcacctgtagtcccagctactcaggacactgaggcaggagaatcccttgaacccgggaggcagaggttgcagtgagccaagatcctgctactgtactccagcctgggcgacagagcaagactctgtctcaaaacaacaacaacaacaaccaaacaaacaaacaaaaaaaatatttatcaagcttctctgtttccttgctggggatacagtggattatagataggcacagctcttctggcacaaaacttacaagatggtagatgttttccttgacacttccctctcccttatacttgacatcttaataggtctcattggttgtattgattataccttctaaattgtgctcagatctatccttccttgtccaccccaactgccatcaccgtagttcaggtttttgtcatttcctgcctggattgctacaagagcttcctaatagtgtctctgcctccagccttgtcccctaagttccaccccagctatatcactcccctgtttaaagtcctttaatggttcctcatatgctttgaataaattctaaaaccctacaaagatataccttgtgttctagccccttgcccatcttggtcccctcatatcccacaatcccccatgcacccccacaccccatacatttttttcatcttgtgcctttacattggctttccctgtgcctaaaacgtcctgcccccttcttcattcaacatacaattattgagcacctagcagataccaggcactgttctatgtgctggtgattcagcagtgagtaaaacaaagtccttattcacatatgtttatattctagagggaaagagagacaagtaaatgatgtgttgaacactgttataaagaaaaagaggccaggcacggtggctcatgcctgtaatcccagcaccttgggagaccaaggcgggcagatcgcctgaggtcaggagtttgagaccagcctgactaacatggtgaaaccctatttctgctaaaataccaaaattagccaggcacagtggcagcgcctgtaatcccatctacacaggaggctgaggaaggagaatcgcttgaacccggaaggcggaggttgcagtgagctgagatcgtgccattgcactccagcctgggcaacagagcgagacaccatctcaaaaaaaaagaaaaagaaaacaggatggggaactgagagtgaccattttagatacgataggtctctagtaaggtactatttttgcaaagaggtgaatggagtaagggaataagctctgcaggcatctggagacgtgccttccttgcagaagaaacaaatacaaaatccctgagacatgtatgtgccaggaaaatgcaggagaggcaagaaggccagtgtagctggagcagacaaagtgagggcaagaagtccaaggtgaatcaaagaagtcaggtggagtagggccacataggccacggtagaaatgtgggtgcttcagcccagcctgactcctttcatccttcagtgctgatgcagacatcatcccctgaacaagccactctccacccctgcaagcacctgccacatatacatgtttaagtgactatgtctacctcgcttcccaccacactgtgcgttccctacaggcaggggctccacctttcagttccatgctttatagagcccaacatgttcagaaaaaatttctcaaattattcaaactttcttcttttgttccaattccacaccctgcaagcaacttcctgattactagattggtttcccagttactagggtatcagggaggggatgccttgatagtgaacacacaccttctggtcattagaaattactcatgtgggaaaggattccgtatttaataaatggtgctgtgagaactgcctagccatatgcagaaaattgaaactggagcccttccttatatcttatacaaaaattaactcacgatggattcaagacttaaatgtaaaacccaaaactataaaaaccctagaaaaaaatctagggttttatagcaataccattcaggacataggcacgggcaaagatttcatggcaaaaataccaaaagcaattgccaaaaaagcaaaaattgacaaatgggatcttattaaactaaagagcttctgcacagcaaaataaattatcatcagagggaagagacaacctctacagaatgggagaaaatttttgcaatctatccatctgaaaaaggtctaataaccagagtctacaaggaatttaaacaaatttacaagaaagaaacaaacaatcccattaaaaagtgagaaaaggacatgaacaaacacttctcaaaagaggacattcatgcggccaacaaacatgaaaaaaagctcaacagcactgatcattagagaaatgcaaatcaaaaccacaatgagaaatcatctcacgtcagtcagaatgtcaataattaaaaagtcaagaaacagtcaggcatggtggttcacatctgtaatcccagcacttcgggaggctgaggcaggtggatcacctgaggtcagtagttcaagaccagcctgaccaacatggagaaaccccgtctctaacaatacaaaattagccaaatacaaaattagctgggcatgggggtgtgtacgcctgttatcccagctactcaggaggctaaggcaggagaattccttgaacttgggaggcggaggttgcattgagccgagattgtgccattgcactccagcctgggcaacaagagtgaaacttcgtctcaaaaaacaaaaaacaaacaaacaaaaaaaggcaagaaacaacagatgctgacaagtttgcagagaaaaaggaacacctggccaggtgcagtggctcatgcctgtaatcccagcactttgggaggccaaggcaggtggaccacaaggtcaggagttcaagaccagcctggccaagatggggaaactccatatctactaaaaatacaaaaattagccaggtgtggtggtgggctcctgtaatcctagctactcagaaggctgaggcagagaaccactcaaaacaaggaggcagaggttgcagttagccaagatcatgccactgcattccagcctaggtgacagagcaagactcagtctcaaaagaaaaagaaaggtacggcaagtaagaaaatgtggtacatatataccatgaaatagtatgcagccataaaaaggaatgagatcatgtcctttgcagggacatggatgaaactggaagccattatcctcagcaaactaatgtaggaacagaaaaccaaacaccaaatgttctcacttataagtgggagctgaacggtgagaacacatagacaaatgcgggggaagaacaacacacactggggcctgtcggtagaggttggtagagggagggcatcaggaatcatagctaatggatgctaggcttaatacccaggtgatgggttgatctgtacagcaaacaatcatggcacatgtttacctatgtaacaaagctgcacatcctgcacatgtgccctggaacttaaaataaaagtggaagaaaaattaaataaataaaaattttaaaaaaagaaattacccatgtatgctcatcaataaactgtacatacatcaaaggccgagggcggtggctcacgcctgtaatcccagcactttgggaggctgaggcgggcagatcacgaggtcaggagattgagaccatcctggccaacatggtgaaacctcgtctctactaaaaatacaaaaattagctgggtgtggtggcaggagcctgtaatcccagccactcgggaggctgaggcaggagaatcgcttgaagctgggatctcggctcactgcaacctccgcctactgacatagcgagactctgtctcaaaaaaaaaaaaaaaaaaaaaactgtacatacatcagtaaactgacattatcattcacacatcaatctcttttttttttttttttttttttttttgagacagagtcttgctctgtcgcccaggctagagtgcaatggtgcaatctcggctcactgcaacctccacctcccaggttcaagcgattctcctgcctcagcctcccaagtagctgggattacaggtgcccgccatcatgcccggctaatttttttgtgttttagtagagacagggtttcaccatatcgacctctttttttaggtaagcgtgactcaactgctgggaaaatgacccaaatctgtgtcatgacacccaaagaaggcgctgctcatggaagggccacataagcagcctggcagaagacttggatgccctgtctacctcacactcagcccaccttccctattttagatggcagccccatcacccacacctgtccaagctcaaatctctagcttcatgaactctgagagcttccatattccccatacctagaatatatgggtaatggggtgtgcatgaaggattatgggatatgagaaggccaaagcggcaaaagcacaaggcacaccttcctagggatttagattttatcctaaagcatatgaggagccactggaggattttaaacagggagcaacatactggggtggaaacctatgggcaaggctggaggcagggctttacctgtgagagctccccgacccccggcaaaaagtccttgaaagtccactgttaacttttttttttttttttttttgagacggagtctcgctctgtcgcccaggctagagtgcagtggcgcgatctgggctcactgcaagctccgcttcccgggttcatgccattctcctgcctcagcctcccaagtagctgggactacaggctcctgccaccatgcccggctaattttttctgtatttttagtaaagacgggatttcactgtgttagccaggatggtctcaatctcctgacctcgagatccaccagcctcggcctcccaaagtgctgggattacaggcgtgagccaccgcgccgggccaactatttctttattcataccctcatctctgttcctaaggccactccacagtgcagatattcatcacccttcacatggattcaggtttcagctccctaaaccagtctccccaccttctgtctcttgctctttccaaaaacattctccatgtggccaccagagttctccttttaactaagtctcattatttcactagtccccatacccctgcttaataatcagtagctgtgtagctttgtagctcccacctgtaatcctagctactcaggaggtaggaggattacttgaggccaggagttggaggctgcagtgagctatgactgcaccactgcactcctgcctgggcgacagagcaagaacccccatctctaaaaatataaaaataaacaatagcttccccttatcttttagataaagtccaacctgattataaaacccatctcacccagggctgtctcctcgcccttctcccaccccacattccaaccataccaaaccaacgacctggaattctctgaacattctgtaccttgcacctccacacctttgcacatgcagtctcctgtgtgaaaggtcacaggagacagctatatttattttcaaaattcagctcagacaccatgttctctgcgataccttcctaagctatcctcccctacaaaaataaagttgtcccatttaggtcgggcgtggtagctcatgcctgtagtcccagcaatttgggaagctgaggcgggcagttcgcctgaggttaggagttcgagaccagcctggccaacgtggtgaaaccccgtctctactaaaaacacaaaaattagccgggtgtggtggtgcacagctgtaatcccagctgctcaggaggctggggcaggagaatcgcttaacttgggacatggaggttgcgtgagtgaggcgagatcacaccactgcactccagcctgggcaacaagagtgaaacttcatctcaaaaaaaaaaaaagaagttgccccatttgctcttatggtgcctctatcagtgtacaaattatattgcatgacaattatttgttaacatgtcagtctcctttctggactataaattattgaatggcaagggccagacatcattcttctttgtttttcagcactaagtaaaatatctagcacacacatagcatgccctaattaaattttttctaagggagggaatgtatgaaagctctaaattaaagcccttctcttgctaaatctgaagattctgcctaagttctcacttaggctaatcagaatgtcttcataggtcccagcatctgacttgtgtcaggtgcttattcaacagtgcctgaagaccaggcacaatggctcacgcccgtaatcctagcactttgggaggccaaggcaggcagatagcttgagcccaggagtttgagaccagcctgggcaacatagcgagaccccatctctattaaagaaaattaaaaaacaaaaccaaaacagtggctgaaggaataaacccatgaatcatatgtcactaaattcttagtcttggttgcccttctgaaccttctttagatctctatgctcctctgaagttatcaaagatagaacaaagtccagatattatctatgcagtaatatttcatttatctaaccataactactcagatgaagccaagaagcaggaagaggaacaggactataagtgaccaagaaagacagtaatttgaaacataattcataattcatggttttcactgaatctcattccattctcacaacagcctggaattaaacagtcagtgcacctggctcaaggtcacatagctattgagcccaacctcaaacacaagtgtgtgcacaagtgctgtgcacctttcactctatcagagaaatctcaaatgtgtgtcacacatgtgtgtacaaaactctatgcattttactcactgaagagctctgcatacgaaccataactgcggctactttgcatgtattctttttgttttgttttgttttgtcttttgagacagagtctcgctctgtggcccaggctggagtgcagtagcatgatctcggctactgcaacctctgcttcccgggttcaagcgttcctcctgtgtcagcctccctagtagctgggattataggcacccaccaccacacccagcttttttttttttttttgagacagagtctggctctgtcacccaggctggcgtgcaatggcgcgatctctgctcactgcaacctctgcctcccgggttcaagcgattcccctgcctcagcctcccaagtagctgggactataggcacgcaccaccacacccagctaatttttttgcgtttttcatagagacggggtttcaccatgttggccaggatgatcttgatctcttgacctcgtgatccacccatctcggcctcccaaagtgctgggattccaggcgtgagccaccatgcccggccttttttgtatttttagtagagagggggtttcacgatccgcccatcttagcttcccaaagtgctaggattacaggcatgagcgactgcacccggcctttgcatgtattcttacaaggatgtacaggcacgtgaatgtgtacatgggtgaatgaggatttaaacatgtatgtctctatacccaaattagaagcagaaaattggccaggtgcagtggctgtgaaatcccatctcttctaaaaatacaaaaaattagcttggcgtggtggcgggcgcctgtaatcccagctacttgggaggctgaggcaagagaatcgctggaactcgggaggcggaggttgcagtgagctgagatcgcaccattgcactccagcctgggcaacaagagggaaacactgtctcaaaaaaaaaaaaaaaaaaaaaaaagcagcaacagcagaaaattaaaaagggttgactggcagaggtaggcacaaggtcagaatcgaggaacaagagctgtcagaaatgacacagacaaagatagttaaaataatagaattctaaggccgggaaggtggcccatgcctgtaatcccagcactttgggaggccgaggtaggcggattacctgaggtccggagttcgagactagcctgaccaacatggagaaaccccatctctactaaaaatacaaaattagccgggcatggtagcacatctgtaatcccagctactcgggaggctgaggcaggagaatcacttgaacctgggaggcagaggttgcggtgagccaagatcacgccattgcattccagcctgggcaacaagagcgaaactccatctcaaaaaaaaaaaaaaaaatagatttctggtattttaaaggaatgcagccatcttagaaatattacttagatgaaatgatccttctctgcacatgatataattaaccatatgcccacatttgagggtgctccaagaccaatagatcctaaaattagttttgccagtaagcaacctaccagatcatctgcaagtaatgcaagagaaatcacagatcatatttaagacctcagtgaaggctgggcacagtggctcatgcctgtaatcccagcactttgggaggccaaggcgggcggatcacctgaggtcgggagttcaagaccagcctgaccaacatggagaaaccctgtctctaataaaaatacaaaaattagccaggcgtggtggcacatgcctgtaatcccagctacttgagaggctgaggcaggagaatcacttgaacccgggaggcagaggttgtggtgagccgagattgtgccattgcactccagcctgggcaacaagagtgaaactccgtctcggaaaaaaaaaacctcagtgaaaacccccttcttgcaacacaaagcagtgccttccacccctccctgactgttgccatgtatgacaaacatcccatatgcagagatgagtccaggccagacacaaggacacacaaaacacagaaggaccccacagaagacagccagttctctacacaacagtaaaatcagagaagctggaaaggaagttgaggagtgaatggggcaatacagaaattgaaagaaaaaaggacacaaactgattggagagcggtgagccaatgagcaattgcacctggtgcaaaattcctgtgccccaactgctagagcagctgcccctcaaattgacagaatgtctgagcttcttcacagttgcagggtggaaggcatctctaaggtcctaggctctcccaggttggaagggcatttttcaagaatagtggcatctgagggatggggctatggagaatcatcatctcagcacctccaatggctttactgaatgtacagatttaaataatgttttatttatgagatggagaaaaagccaaggtggactgaaatgacagtattaaaaatctagcccacagaggccgggtgcagtggctcacgcctgtgatcccaacactttgggaagccaaggcaggtagatcacttgagctcaggagttcgagtccagcctggccaacacagtgaaaccccgtctccaccaaaaatacaaaaaaattagctaggcatggtggcacatgcctgtaatcccagctactagggaggctgaggcaggagaatcacttgaacccagaagatggaggttgcagtgagctgagattgcaccactcaagcctgggcgacagagtgactctatctcaaaaaaaaaaaaaaaaaaaaaggaagaatccagcctacagaaatactcatgcagctgcaaaaagatattcactggagcattatctgtaagactgagaaactgaaaccaacgtacatggccattaacagaggaccagctagataaataaactactatgcatccttaaaattcacatgaaataatatgaagcattttttaaaaagtagatctgtaagtagaaaagaatgtcactgataatgctagaggaaaagcacactgtagaattacatgtagactagtatgacctcatttttgtaaaagaacaaaactacacctcttttttttttatttttatttttttgagatagagtctcactctgttgcccaggctggagtgcagtggtgcgatcttggctcaccgcaacctctgcctcctgggttcaagcgattctcctgcctcagcctcctgagtagctgggattacaggcacctgccaccacacccagctaatttttgtatttttagtagagatggggtttcaccatgttggccaggctagtctcgaactcctgacctcaggtgatctgcccacttcagcctcccaaagtgctgggattacaggcataagccaccacaccctgccaaaactacatctcttgaaggaacaagaaaaaaaaatcagtgtgcctgtggtccctgctactcaggaggctgaggcaggaggatagcttgagcctagaagttcgaggctgaagtaaggtataatcacaccactgcactccagtctgggtgacagagcaaaatacctgtctctttaaaaaaaaaaaaaaaaaatcaggaagaatatgcaaactgctaatagtgcttactgtgagaagctggggaaaaggtgagtgtttttgcgatacactgtggtactgtttgaattttcacacaaagcatactttaactatatatatatatatatatgttgtcagagacattcctctctatctccttcttactcccagactgcactcacatcccagcctctgtccagccctccacccaccacctcctaccccagccccacttacaaatgcaggcagcagccagcaggcggctggcagcataaggggcgaagcagctcgggaagagaggctgtaccatgtagttggcaaaggtgatggcaatgatggcctggctggtgggctcaatgatgagcagggaggtccagagtctgatgaaagcaaggaatcctccaaaggcctccaggatataggcatagctggccccagatttcttaatggtggtgcccagttccgcataacaaagggccccaaagacggagaagaggcccccgacagcccagatgaccagagagagaccaaaggaggcactgtatatgagcacacccttgggggaaacaaagatgcccgagccgatcatgttccccacaatcaggcacacgccgttaagcagtgagatctccttcttcagcttcacctgctccggccctgggctggccccatcacccaaaggggaggtttccacctcaggctgggaggccacttcatactcagtgctgtcaaccatggtggaggagaggaaacccttcaccagcttcctggcattgccctttaaggaagaaagatgatgctatagattaggtggttggcaattacatagaacctctacccgcctccaacacagggtaatacgggcagctcaccaaccaatgcggagacctccaaataaccttttctccagctcactcatcaaaacaaccccaacttgaatatttgtctatctatctatgtatttatttatttattgacagagtctcgctctgtagcccaggctggagtgcagtggtgcaatctcggctcggctcactgcaacctcagcctcccgggttcaagcgcttctcttgcctcagcctcccaagtagctgggattacaggcacctgccaccacgcgtggctaattttttttttttttttttgagatggagttttgctcttgttgcccaggctggagtgcaatggcgcgatctcagctcactgcaacctccgcctcccgggttcaagtgattctcctgcctcagcctcccaagtagctgggattataggcatgcaccaccacacccagctaattttgtatttttagtagagatggggtttctccatgttggtcaggatggtctcaaactcccgacctcaggttatccgcccgcctcggcctcccaaagtgctgggattacaggcgtgagccaccttgcccagcctccaacttgaatttttaagagaaggcactcattcgccagagagaaaggatctgtctctcatcattaggacattgctgcccacccgactcaccaaatagagaactaaatcttgggccgggcgctgtggctcacatctgtaaacccagcactttgggaggccaaggcgggcagatcacctaaagtcgggagttcgagaccagcctgaccaacatttagaaacccagtctctactaaaaatacaaaaattagccatgcgtggtggcacatgcctgtaatcccagctgcttgggaggctgaggcaggagaatcacttgagcccgggaggcagaggttgcggtaagctaagactgggccattgcactccagcctgggcaacaagagcaaaactctgtctcaaaaaaaaaacaaaatcaaaaacaaaacactaaatgttggttctctctgagcctgctataatacaagacaggcatgggggcagtgtggcggctcccagaaaataactataatggcttgaccccgagttttcagccttatccaaaacccgtcttccctccaatttcagcttcagggatcacctgtgctgaggtacaacattaggaactgaccctaccagcagctaatctgtgggagcgtctcatgacactgctcttttccccaaggactctacgtctgccaaaactaaaggcttcagaaacctgctggaaacccacaaccatcctcctgcccaaagagcatcccttaacccttagctggagtcttcagccctggcaaagcccaagtagacccacttcaccctgaaagaagacaggctattatcttttccttgcttttcctttcccattctctggtattctaagcctcctgctatcgatccctcacatcagcatcgttgaatcacccaaaaaagtatgaatgagagaagggcgatccaatgtaccataaaacctagggatgattggaggcagctgatggccactccctaccccagagttgctgctggagagatatcaccccgagccaaggcagggagacagctgcagccaggcagcacatgctggaaaacaccgaacaggagacagctgagaggaaaatgggagaggctagtcaagcaatggagagatgttagggtgagaggcactcgggagaagaagcgattagacactgcacagcagcaaagaggagggttagcaaggtaagtggagatgagaagagggtggaacgcacactcactccttggtcctggatataagcaggttctcacggcagtgtgagcagcagtcagggagagaagtgccttccaggatctgtggtctgatgctcctccttcccagccagcagtaaaagggaaggccagacaaatgcctatggatttaagcaagaagggtggaggaggtgaggcagcccgcaaaggaaggagtgagggagggggaaaggagtattaagcaaccatctgggtccaaggttcactggcccttcacatctgcaaaaggggcagctaggagctcttggctcagcactttctgtgataagaaggtgctctctcaggaatctcctttgtcagctctgctctgggaccaggggcccagaagaaaggacagtcagctgagtgcagtatctgtagccctggggaagctgtcccagagcaagttagctgaggacaggacagtagcggggaaggaatacacagcactctctctctctgtgtcctccatgccccaccctagcctctcttctctctcaccccaagcatttaagaaagggaggaaggttgcacagtgtgacacaaaggcttgttcccatgctgagattacaggaagtgtaagagcagtctctacaccatgtgactgggtgttctaagagaactctgcacacttccccatgcaaagagagactggggggttgcctccaagcctgggccactgccccaaagtctgagcctcagactacttcaaaagaaacacagtcaagagatcaaatatctgactgcatccccaccagacccacgtgccttttcattcttgacaaaacataccaagatctctgggataagcataaattcctataaacgccttcctcaaatataagttgactccactttcctaaaaaatatgaggaaatcaggccagacgcggtggctcacgcctgtaatcccagcactttgggaggctgaggcaggcggatcacaaggtcaggagatcaagaccatcctggctaacacggtgaaaccccgtctctactaaaaacacaaaaaaataaaaattagccgggcgtggtggcgggcacctgtagtcccagctattcgggaggctgaggcaggagaatgaggagaatggcatgaacccgggaggcggagcttgcagtgaacccacattaggccactgcactccagcctgggcaacacagcaagactccatctcaaaaaaaaaaaattaaaaaagaatatgaggaaatcagatttcactgaattctgttggacagacaggcccagaacaggcagaggaagctgagcactttttggaaatcacatagtttatgctatctttattatttactttaaatctggtattctgagtctcttttaccaacagaaatagaccctatccattctgaaatccaactgtctgtttcttctcctatctgttctaaccctctttggttattctacaaccagagaatagagatctaaatatctctgggagacatctctaccatacatcctcccattctagctctttaaacttttaatttaatctaggaggaggattctggtgtgagcgttcccagagatcatgcttctcccaagacaggctcacaatgatctgaaatccttctggaggagactctccttttctccaaaatgctcctgtaataataattgctatcacttattgagcacttactgggccagacacactgctaaggacttaagcacattatctcatggaacctccagagctcatatactcttaatcacacaagtatactatctctccatctccccatccccctggcctgccttagtctctaggccttccttttatttttttttttttttatttattttctttttttgagacagagtctcactctgtcccccaggctggagtgcagtggcacgatcttgactcactgcaacctccaccacctcctggttcaagcaattctcatgcatcagcctcctgagtaactaggattacacctggctaatttttgtgtttttatttcggtatttttattttattttattttattttattttatttattttgagacagacacttactctgtcgcccaggctggagtgcagtggtgcaatctcggctcactgcaacctccacctactgggttcaagcaattctcctgcctcagcctcccgagtagctgggattacaggtgcacaccaccacgcccagctaatcttttttgtttttagtagagtcggggtttcaccacattgaccaggatggtcttaaactcctaaactcaggcaatccgcccacctcggcctcccaaagtgctaggattacaggcatgagccattgtgcccagcctaatttttgtatttctagtagagacgaggttttgccatgttggccaggccggtcttgaactcctggcctcaactgatccacctgcttctgcctcccaaagtgatgggattacaggcgtgagccaccgatgccaccttagaccttgcttttggacaggaattatctacatgaattacctgggggaagatgtaagcagactagattaaaaagaaagaaagcctctgtcatccttcagtctatagcctagacgaaaggctccaacaaagtttgttaatctccttcctggctgcccctcccctttctcattctttgcagggataagaggtgattacaagtcctcttggcagtgctgctattgctagggtgcccacttctaaagcaaacaaaaaaaaaaacacaaacacatcatcacgcctgcccttttaagaccaaattcactggcaccaaggggtgggcatgtgtcctaatatgacgtaaaagaaaggaaggaaggagggacaaaggaagggaaaactgtgagggggaatggagagagaagtgtacagggtttcattcctgactggtagcatctgaaaagtgaagtcctatccgtggaattttgagacagaaatctgctgggggtaaaacccacactccagcaaacagcacgccctagtggtagcaccaggaagtgctagtggactctaacctacttcagtctgcccgtgcgcactaggcaagggaggctgccatgcattgagaacatgaagaccccctcttttctcaaccactacctagcaccctggacaagaaggcaccatctttggcagctcacatttctccctgagaccctgggtcttagggtaatgcttccaccattcaggcagccccaccattcaggcagcctgggaccagcaacacccctaggctctcccaaaggggctcttctaccccaggtttttggtttttttttttttttggtttttgggttttttttacccgagatggagttttgctttgtcccccaggctggagtgcagtggcacaatctctgctcactgcaacctctgcctcccgggttctcctgcctcagcctcccaagtagctgggattacaggtgcccgccaccgcgcccagctaatttttgtatttttagtagagatggggtttcaccatgttgtccaggctggtctcgaactcctgacctcgtgatcctcccacctcagcctcccaaagtgctgggattaaaggtgtgagccaccgtgcctgacccaccccaggttttacatgagaaaccccataagataacagcagcccttgttgcctttccctgtctgagatgcattcatctctgaacacccagtgaagattacaggacaacacactcatcctacagcttgtggaagaaatttgattcagaaactggcagcagggcctccagtatgcagtgctgggcaggacagccaatggagcccctcaccctaacctcaccctcgaatgacaacaccaaaacacaatttctccaggaactagtacataattcggggtcttggctcctcagccaagctcagggaactactataagaacacactttctctcccagagaccccatgtcctgccttcctggctccaatcagtctgtgctgcctcccctaacaacagaaacagaaaacagatacactctggtatgactagatttccccatcactccaagctagaagctcagctcctccctccccagttctctgtttgtttttctatattccactgtggctaagacagtctctttaaaaaaaaaaaaaaaaagtgaaacaaaaaagaaattgtttactcctgtggccagggcttccattaaggaagggctgaagtctctgggcagaaggttcagcccagggagggacagggctgggatcaagaaacaggaggctcttgggtctccattcagccaatttttaggactccatcctcctcctgcacttcccctctcgcccattgtccctcctctcccacctcttacctgtccagtgacctttgggcaggtgcggggaggaggggctaccagctgagtcaggggagaggggaaggtgctagttaggagaaccaagcgtatcgctcatgctgcaacagctgttgactctgaggagcagaaaaagcagagggtaacggggactgaaatggaaaacaggaaaacacatgtgtgactctggccggcagcggggaggggccaggggacgggctggagctgggactgcctggtcagacccagaggacctcagtgcctgcccgcctccaggcaccttctctactacactggcaccaaatacctgagtctcagctccttctcctccctacctcagcctcaccccccccttccttgttgccctacatttactgagcacttaagctttcccctccattgacagtgacctctgatgcctcttgcaactccactcatcccatttcctactcatctcccactcatgtactatccttagttctgcagaggggatacgatcccatggttaggggaaggaaactctgcagtcccatctcaagagtgtcagtgccatttcagcccctaaagcaagccaaggggaggtaatgcaagccaaggaagaccacttatagggggacagccaagcacacatttaaacaccaagcaagctcactcacagctgagatctctaattggttcaggtgatatcgatatatgtcgccaggtaagagccaactgggccatggcaccctgggcagactaatgagttggcatcccttcgaaccagttttatttaaacatccgtcgaacgtttacttagcagaggtgggggaaatatcaattttcctggaatacaaattgtgtaagcctctttatatttaaaattagaaattattacacatcagccgggcacggtggctcacgcctgtaatcccagcactttgggaggccgagtcgggcagatcacaaggtcaggagttcgagaccagtctggccaacatagtgaaaccccgtctctactaaatttacaaaaattagcaggcgtggtggcgggcgcctgtaatcccagctacttgggaggctgaggcaggagaatcgcttgaacccgggaggcggaggttgcagtgagcactccagtccaaaaaaaaaaaagaaaaaaattattacatatcttcatcacatgcaatcttctgaagcaaacaacttcttggtaagcatagtaaaccacttaaaatgtggataatagtataaatctcttgccctcagggagcagcattcacaatgcatcaggaatttttggaattacaactgtgactaacgcctttaagcaactgtcagctggctggccccagggctacatcctgcaatttgcacctgtctgttggaaaattactccagacacaagcagtccaggtaaggagttgtcaataagtctatgtcactggatgaaagccaactcatatttcaccaagacacagaaatcatagtacactggcaccaaatacctgaattattccaaagatattttagtgtcctttagacactctcagcctgctacccaacttgccggccccttaattgcactctggagtcgggtccaagtcgtaagggaggtcctagaaagagagaagctgtccttgtctgcatgggcctccctgctgtcttccccactccactccagcttcactggcttccctgcggtggccgcacagcaagcatgctcccgcctcacagcttttgcaactcctgttctccctgcctggaacatgcttcccagtgatattgtccattcccggtgtcatttgtttgctgtcagcactcccactagaatgtaagcgtcacaagagctttgttcactactgtatccccgcagtgcagggctcacatagacagttaataaatgtttgctgggttaataaatgaatgaatgaactatgttatctatttgatttcccaggtggctaggctcctgcgcatgtccttgaatttgctctccaggccctcctgtttggctgccgctctggctcctaagcaaggagtacccggaggtactctttttgacagtaatgcgttaaaggcaaagaagaaagtatggctttcacagttttactgggaggcctagaatgatttgaaacggacttttgtttcattaatgggaaaagcaaagcaaaacaaaaagcctatcatctaacactctttccctggatccaggaaattcttgtctgctctacctcacacccaagctcaggtgaccggtctgggtgcggcgtggagatggcgagagctaagtgctatggccgcgaaagggtgaagggcaggggaggaaaaggccgaggggaggcgaacgctcaggttcacacatatgcaagtgggctctacagcggacttcgaagcatacactcaactccccaccatgcgccggcccgctgctctacccctgaaaagctctcccctggcccgcgatccttgctggcctaccccttggtcgttcccatccccctctccgcccccgcccaacctgctggcctcactcacctttgtccctttctcccatccccacccccccaccaccctcgctttctccgggcccctccctgtcgtttgtctcccttttatttccctccttcctttgggcccccagtctgcggccctaggacaacgccttcccaagctcggacccagccaccgtccgccttcattacccctctgaagaacagggtggccccgaggcccaggtctggctgtgggggaccaggacctcaccccaacaggcgtcccttgcgttccctccacctggccaagcagcccccgcccttcccccgactctaggaagcgctagaagagggagttgtggtgggtgtaggcgaagggcgcgcaaaggtccaagcaccgagacctcgcaaaccgctccctgtccgctcctcgctcccgcacagctggattactgcggggaaatgaaaatgaccgcggatacccttagagactggtcctccaccccatgaacgctcagcttcctcttccctccctcccaaccctgcataagctggcggccagacaggagtctgggcgagcgccccaacccctgaccacaactgcctccggccccgagatgcttggctgaatctcggtagtgcccccagacgggaagccccttgttgggggggcgggggcgggaggcggggcgaggaatgtgcctcctcggagccggaggaggggtctcccgaaggccgtctcttccaccccgggttcccgactccccgccccctcggggtagctgttgcatcagcttccagattccaaaccaaagaaagtgggctccactaagctgggaaggcgtcgggcagcaaagccgccgccaggaggcagcgcttaatcaaaaatgtccgggccgagggggcccaggataccggagtccccggagcgtctttcatctgaagtcttagcagcagcgcggacctaacaaaaaagggagttgctgaattagttcaagaaaaggcaactggaaatgcttcatcacgttttaaggctaaaagatggcttgtaaataatataactaccttttatataccttttggataatctagctttggggttttttaagccaacgttggcgctctgcggagatccacagagagccaccgccttcaagagcagtctgatagaaacacacagagcttacggaatttcccagccgccaggcaaggaggaatgtagtccgaagtcatgatttgcccatcttgaagctcaatcatttaacacctaatttagccagtactgatatagcagagatttgacagctctgggaaaagaagcagaatatgtcgcaataaattatgtaaatagtaaggaaataatatgcaaagtagtgtattgagtaatttgtagccacagttctcacatttcttgcatgaggtgacagtgatttgttctttgtactgtcctaaaaagggagataatgaaagaattcccaaacagttcactcttctctccacaacttcttcaatcttagaatgttctcacaggcatgcaaaaaggaaaagagattgcaaaatgaagtagaattgcctacccagagtcagcttccttcgtcttatgttccttctccaatgtcattatcaatcacaacaattacaaggcacctaatttcccagagcaaagcacttgtacaaaagtaactgtaggggccgggcgcggcggctcacgcctgtaatcccagcacttcgggacgccaaggcgggcggatcatgaggtcaggagatcaagaccatcctggctaacacggtgaaacccagtctctactaaaaatacaaaaaaaaattagccgggcgtggtggcaggcgcctgtagtcccagctactcgggaggctgagggaggagaatggcgtaaacccgggaggcggagcttgcagtgagccgagatcgcaccaccgcactccagcctgggtgacagagcgagactctgtctcaaaaaaaaaaaaaaagtaactgtataaatacaaacttacagaacagaaggaggctatttggataaacatattagacaaaacatgagctcactacacccttgaccttctgggctaaagcaatcctccagcttcagcctcccaagtaactgggacttggtggtgggtgcctacaggtgggtacccagcttttttttttttttttagatgcagtctcgctctgtcgcccggctggagtgcaatggcaccatcccggctcactgcaacctccgacgccctggttcaagggattctcctgcctcagcgtccccagtagctgggattacaggcacgcgccaccaagcccagctaattttcgtatttttagtagagacgcggtttcaccatactggccaggatggtctcaatctcctgacctcgtgatccgcccgccttggcctcccaaagtgtggagattacaggcgtgagccactgcgcccggtttttgttgttgttgttgtttgttttgttttgtttttgggggggggttttggtttttttttttttttaagaaacagagtcttggctgtctctaaaaactacaaaaattagctgggcatggtggcatgtgcctgtaatcccagctactcgggaggctgaggcatgagaatcgtttgaacccaggaagcgggggttgcagtgagccgcgatcacgcagctgcactctagcctgggcgatggagtgagactctgtctcaaaagaaaaaaaagagagagagacaaagtcttgctgtgctgcctaggctgggataacaaaatgttaaagccaaatacagggcatgatgcccttgaaaagcaaagcagtttaagagaggaaacacaggaagcacagatgcctgatgcttcacattattcttaactccagtctttgccagttgaagtccagaggttaaaagacattcagtttaggatgacgaagctgctttcctgtggcttctgaggcagatgaagtcatagaggagtgctgtccaggtgccagacccctccctccaacagagttccatgaggtccctgagaatgctgatgatgttagttgtcagcgctctggggttctgtctgtctctctctctctctctatctatctatctctgtgtccaggtaggctgagatgagaggtagctgtttgggtgaggagcccttttctggtatttacaacccatggattgtccccctgctgtatcacactaaccacatcaaaggttaaatttagggaggcccagacaggaagattgcttgagcctaggaattcaagaccagcctaggaaacatagcaagaccccatctctacaaaaaaaaaaaaaaaaaaaaaaaaaaaatatatatatatatatatatgggctgaacttgtcttccttcttcttcttctttttttttttttttttttttttgagacggagcctcgctctgtggcccaggatggagtgcagtggcacaatcttggctcactgcaacctctgcctcctgggttcaagtgattctcctgcctcagcctcccgagtagctgggactacaggtgtccaccaccgcacctgactagtttttgtatttttagtagagatgaggtttcaccattttggccaggctggtcttgaactcctgaccttatgatccaccttcctcggcctcccaaagtgctgggattacaggcgtgagccatggcgcttctaaagacgcttctcttcccagatttcctagttccaatgacaattcccatcctgctcccaaagtcctccggctctggctccttgactcccacatctgttaaataattgtacttgtccacttttgcatgccgtgttcatattatacacattatttgttcacctaaatgcatatgccccactccaccccagatgtttttttttgtttgtttgtgacagtatcttgctctgtcacctaggctagaggacagtggtgtgattacaactcactgcagccttgacctccccaggctcaggtgatcctcccacctcagcctcccacatagctgggactacaggcacacgccaccatacctggctaattttttgttttgctttttgttttttgtttttccgagatggagtttcactcttgttgtccaggctggagtgcaatagcgcgatctcggcttattacaacctccacctcccacgttcaagtgattctcctgcctcagcctcccaagtagctgggattaccggcacatggccaccacatccagctaatttttgtatttttagtagacacagggtttcgccatgttggccaggctggtctcgaatcctgacctaggttatccacctgcctcagcctcccaaagtgctgggattacaggcatgagccacaccgcccagccaattttttgtattttttgtagagacagggtctcaccatactgtccaggatgacctcaaactcctaggctcaagcaatcctctcacctcactgacctcaacatcccaagtagctaggaccacaggtgcatgccactatgcctggcaaaacacacacacacacaaaaattaaattttagtagaggcaaggtctgactgttgcccaggctagtctcaaactcctgggctcaagtgatcctccaacctcagcctcccaaagtgctgggattacaggccatgagccacagtacctggccagtttctcatcttttctgtgtgtgtgtgtgtgtgtgtgtgtgtgtgtgtgagtttcactcttgtgtgcaatggcgcgatctcggctcaccacaacctttgcctccggggttcaagtgattgtcctgcctcagcctcccgagtagctgggattacagacatgcaccaccacacccagctaattttgaatttttagtttggggtttagacggggtttgacgatgttggccaggcgggtttcaaactcctgacctcatgatccacccgcctcggcctcccaaagtgctgggattacaagcgtgagccaccgcgcccagcctaatgagggccttttaaatacaaacatgcacacatgtatccacagacacacgcatcttggatattagccttttaattaagctgacttttaactattgagctccttaacaaaagaaaaaaatatatttttaaatctcattaccatatttcagctatgacaaaatgctactaaactaacgatgatcacactaattatacagtttctgagtgctctaagtgtaagcagaaattaacacctgctggctgttaaatgctaactttagtcgtttaaaaggaatttgcaagacaaaatcccaaaccagtttcttacctagtgatgggtctcaggctgtagactgttctctaccagcctagaagcaggaaaaaaaaaaaactcatcttccctattggaagtgagttcaaactcatggaagcaggaaaatgtaggaagcaagtaaaactccaaaaaaaaaaaaaaaaacagttgtacaaaataaactttagatctcgaccaaattttggaagatcagggattctctggaggggatgctctcagacctcagcaaattgtcctacttgtttgagccataaagttagctcatgctggtaccaagcaccgataggagatttcttttatttttttgagacggagtctcgctctgttgcccaggctggagggcagtggcacgatcttggctcactgcaatctccgcctcctaggttcaagttattctccagccacccgagtagttgggattacaagtgcatgccaccacgaccggctaattttgtatttttagtagagatggggtttcaccatgttggccaggctggtctcaaactcctgacctcaagtgatccacccgccttgtcctcccaaagtgctgtgattacaggcatgagccaccacgcccagccaataggagattttttttttaaggtcaagggcatctccactcagaattcctctgtgcttaccaaaatgtgaaaccccaaaatttgagacaggtctcagttaatttaaaaagtttattttgccaaggttggggatgtgcctgtgacacagtctcaggaagtcctgaagacatgtgcccaaggtggtccgggcgtagcttggttttatacattttagggagacatgaaaatgtaagaagtcacattagttctgtccagaaaggcagagacagctcaaagcaaggccccctcactgggggcccccaggtcacatgtaggtgagagacagatggttgcattattttgagtttctgacaagtctttccagaagaggtagtcagaatatgcatctgtctctgtgagtagacagatgactttggatagaattggaggcagatttgccctgagtggttcccaggttctcagcttgaagaggaccaagatattttcccttcacacctggcagacagttaatgggctcttttgtaggagtttcaggatttataaagcactttcactcacattatcacttttagatcgttttcacaaatgtaacatattaagcatttttaaaattaaaaaatgaaggataaatgacttctccaagacagtactgaatagcaagtgataaaaggaggggagtcgccaatcagggtttgccactttctagtacctacctcacagggttgttgcaaggataatattaagcaatgtgcggtggtagcacttataaaaatggaatgtcacatcttagctccaatacaatacccctttctcaggaaagtcatctttgatggtctactgtagatcaagttcacactataaactcacaaacaacatgtatttcctttcccagcactcaatgacaatattcatgtatgtcatcatttgattgtctgtttttttttttttagttggagtttcactcttcttgcccagactggagtacaatggcgcaatcttggatcaccacaacctctgcctcccgggttcaagcaattctcctgcctcagcctcccgagtagctgggattacaggcatgtgccaccatgcctggctaattttgtatttttagtagagacagggtttctccatgttggtcaggctggtctcgaactcccaacctcaggtgatccgccagcctcagcctcccaaagtgctgggattacaagtgtgagccactgcacctggcctgtcttgtttcttttataccgagagctctatcaggatattgatgtctggttttgttctccataaaatctacgcctaatacagcacttatcacacagaattttttttgagacaaggtctcgctctgttacccagactggagtgcagtggcatgatctctgcttactgcagccttcggcctcccaggctcaagccatcctcccacctcagcctcccaagtagctgggaccacaggcatgcgccaccacacccagctaatttttcatttttttgtagagagggagtttcgccatgttgcccaggctggcccaatttccgattaactctagatttgattacttttcttagtctaggaaaactgtgttacagtgatgcgaggatctgtagaatgacgtggatgttacccctgagatcaaagttactattaatatcaatttcaatgaactagagaccgctgtagggaggttgtgggaactgttcagaacggcttaatctgggaggacacgacttccactgagaatgcatgcgctgaacgacaattcgttttcacctcaaaaacctgtactgcagttttgtctctccttccgtacgatgacccaagatggcggagccgtgattgaaaacccagattcaagatggcgacttcctgcttccccgatagcgtcgcgcgtggccaccgaggccacgcctacttccggctaccccggctactcctgctcagcatggctgctttagggactgttctcttcagtgagtgggtatagatagggaccgtggactcgggggccctttggggacgggcacaggacccctgatccggctgcgcggcctctcccccaactctgctctgttctcccagcaggtgtccggaggctgcactgcagcgtagccgcttgggcgggcggccagtggcgactacagtgagtcctgggatgagggcacctgggggaccagaagctgggctaggtcctcacagatctgtttttctccacacaggcagggactggctgccaacccctccggctacgggccccttaccgagctcccagactggtcatatgcgggtaagcgctgatctggcagttaactccactggggagattttcacctagagggaacgcccctggacggggagctgggggtatcaaggtgggggcgtgtaaaagtgtttaactttttatttggaaaacggaatttggggaaagaaaccctcttgtttattttgtagattgcatttcgactaaggaaggtaaagctaaacaggatcttggcttgtggagataagcagaagataattctgacttggggccgccagggtggaagggggtgacaagacttctgcgtttttcaaagggggacatttttttttaaccaagaaccacttttctctgtggttagtgaattttcagtatttggtaccaaatgcagggagagctctttgaaaagctgcagaaataagcgtctcagaggggtagaaggatgaagactatggatggcaggctcccttcagaaaattcttttacctttacttacaaaagagagagggagggagaataaatattagccctagaagggagaaccttagagaagttgaagctactccccattctccttatgagactccagtgtacaagtaggaaatttgaggcctacagaagtgaattgcacatgatcatacagctaggtagtagcaaatccaggactagaacataggccagtcctccttgacaacacagagatctgaatatttaataccctattgttgctctctaggggtatgatcctgcttaattggataattggtgactgaggaagatggtgaagattttttctacttgttatttactgtaagaagcctggcatctccttgtagtagtatggactattggaaagactctggaattacatatgactgcttttttttttttttttttttttttgagatggggtcttgccctgtcacccaggctgaagtgcagtggcatgatcatcgctcactgcagccttgatctcctgggctcaagcagtcctcccacctcagccccccaagtaggtgggaccacaggcacacaccaccattcctggctaatttttttttttaacttttagtagagacaggctcttgctatgttgcccaagctggtcttgtactccttagctcaagtgatccacttcagcctcccaaagtgctgggattacaggcatgagccaccacgcccagcctatggaccttattcttaatccaggcttcccttctcgctaagtttgtggtcttggacaaattacttaattttatcttagtctcagtttccatatctgtaaaagaatacctatctcatgtggttcttttaaggataaaatgaaacaaccaatgtaaagcatgtggcatacacaatattggttccccttcctggtaaataacacctcttctctgtcttgccttcaaacttttgggcagagttttcactctgtttctttctttgcggaaagtaaactacttgggttagatactgcatcttttcagcaagtcagcaggtatttatggatttttattaacatgcttatgtgtctacactatactgtgaatagcaaaagctagcaacacagtccctgacccaaagaacttaaagtctaactgggacaaagcatggactttttaaaaattaagtaatagtattcagggccatgcatctacagttccagatactcgggaggctgaggcaggagaatcgcttaagcccaggaggcagaggttgtaataatctgagatcatgccattgcactccagcctgggcgacggagcgagaccttgtctcaaaaataataataaataatatttcaatactctgcgcctttccaaaaggacctgaggtagctaaataacacttaaaaaaataaaacagaagagtacagtaaatgtcccaaggcaaataggtgaatattaaatattcagtacttctttcagaagagaaggctgatggacttgaagagatgagcgtttctgggaaagttagggtttgagtggacctaaggatgaagatttggctggaagaaaaggaaaagagggcatttcattgtggagtgggatggaatttagcaaaggtacatagaacaacagtgatcacattgcttaagagtttctggttttttttgttttttgttttttttgagatggagtcaggctctgtcgcccaggctggagtgcagtggtgcgatcttggctcactgcaagctcagcctcccgggttcaggccattctcatgcctcagcctccctagtagttgagactacaggcgcccaccaccacgcccggctaattttttgtatttttagtagagacagggtttcaccgtgttagccaggatggtctcaatctcctgacctcgtgatccgcctgcctcagcctcccaaagtgctgggatcacaggtgtgagccaccacgcctggccaagagtttctgaagacaaaacagtagattcagcattgcagaggacctcaaatacaaggctagtgagagttcagtgaaatagagtagtaaattagccgggtgtggtggtgcgcacctgtaatcccagttactcgggaggctgaggcaggagaattgcttgaacctgggaggcggaagttgcggtgagctgagatcatgccattgcactccagcctgggcaacaagagcaaaagtctgtctcaaaataaaaaataaaaaaggccgagcacggtggctcatgcttgtaatcccagcactttgggaggccgaggcaggtggatcacgaggtcaagagatcgagactatcctggccaacttggtgaaatcccgtctctactaaaaatacaaaaattagccagggatggtggcacgtgtttgtagtcccagctactcgggagtctgaggcaggataatctcttgaacccgggaggcagaggttgcagtgagctgagattgcaccactgcactcctacctggcaacagagcgagactgtctcaaaaaataataaataaatgaaataaaatgaaatagagtagtaatatgtctaggagcttattctgggttatcgtacctcacccttgaagatgatggacatattttaggataattaagctacaatgtatatgaaatggaagagaggagctagagattggttcttcccttattcctatcacagtatttgcacaaggtgatgcagtccatctctaacacttgacttttctctcacttctacttgtagatggccgccctgctcccccaatgaaaggccagcttcgaagaaaagctgaaagggagacgtttgcagtgagtggttagagcaacagccagggctacctggaaggagaacatttaaatcataatttgtcttgagctgtgttgcacctaagcaaacatgtacccctcatacagaggttttattaataacagccaaaggttttttttgtttttgtttttgttttttgtgagacggagtttcgctcttgatgcccaggctggagtgcaatggcgctatctcagctcacttcaacctactcccgggttcaagcgattctccagcctcagcctcctgagtagctgggattacacacgtgtgccaccacacccagctaactttgtatttttagtagagacagggtttttctatgttggtcagactggtcttgaactccccacctcaggtgatccgcctgcctcagcctcccaaagtgctgggattacaggtgtgggccaccatgcctggccccagccaaaggttttaatagcactgtgagaagggaggaagagagtggggcactcccaggacaggaaccagtagtagacatcctgctgcacattttgctgtctccctctgcttcccaagccagaactcgctcccactggggagtcagcagcgtcattttccagatgaaacctctgaatttgtaagtggaaggatatatagtatagcgctgaagtcccagatgttatccacactgttttcctgtctgtttcagagacgagttgtactgctgtcacaggaaatggacgctggattacaagcatggcagctcaggcagcagaagttgcaggaagaacaaaggaagcaggaaaatgctcttaaacccaaaggggcttcactgaagagcccacttccaagtcaataaaaagcaactcctgcctcccttcctcaccctgtctctggatttcttttctatcacctagatgcttcatccagccagaagatagccttcacgttccccatctgtcttcagagaaaaagagctgggacaccaagaacaagctgttagatcactgcctgggaggcttggcttagtactctcatctctggttccattccagttcagctaagtcttgctttaaaatttttacctcctagctgggtgcggtggctcacgcctgtaatcccagcactttgggaggctgaggcgggcagatcacaagatcaggagttcgagaccagcctggccaacccagcctggtcaacatggtgaaaccctgtccctactaaagatacaaacaattagccgggcgtggtggggtgcgcttgtaatcccagctactcaggaggctgaggcaggagaatcgcttaaactcgggaggtagaggttgcagtgagccaaggtcacaccattgcactccaacctgggcgacagggcgagactccgtctcaaaaaaaaaaaaaaatttacctcctttgcaggccataggactagcccaactatgagaaatagctgttctgtgaacgtgaaaaggggacagcagttttcccagttttggccaggcagtcaagcctttaacagctcatgcacagtttaggccatgtacagctggcatctaataaatgttttcatgaaaaagattttctagccaaggtcccttttttggcaagcatctggtgtcagtcttcctaagattcagatatgtggtccaggaggttacccccactgggaaggctgatgtgggaagaatcatacctgggtgttgcgtgttctgccgagagtggggtcctgaggtctccatggttctgaatgcattccagagattggttgaagaggggcctgtacctcccaaccccagcttgtgtaggaaagccctacataagggctcagccctcagtcactgtggggtaggtagctgtttaataacacacaccatatacctcccacaaacctggaggctccacaggacctgaaaagcttttcattttattgatcatgaatctgagggcaaaagacctttgttttcattacaatactgagcactagacttctattcttctgccacagaagtgcatccctaggatttctggagcttcctacctgacctaatttctgtccaccctcctctattccttcctttgctttcttctcccttcctcctcgcactacctctgtcctctctcactggccaaatgcaattcttggatcttagatttcgctgatagtctagttttctgtctcccacacttttcctgcttctgttgtgcttcttttccagacctgtctagttcccaactcatctgtctccctttctcacggtcagctttatcctgccctctcccttccctacatacctccaccttttgttctgagtccagtaagtccctaaaggagattataactctttaagaattgcctcctttttcagtgtagaggtggaactaaaccccagagtcccaactcccaatcccttcttttacaataatttcacccaacttgatttgctttcccccagatcccacggccttgtacccttttcctcccagcgagttccaattaaaggtgcagccacattacaaatgacaataaaggaatcacctttgtctttctacaaaggttggagccacagatccggtatggttgtggggtttgttgttggtagttgggttatagtttggattttttagcagcagagggagggacatagacagttgtctacagggcccagaagataaccccctattagtaaactggccccttctccctctgcaggtctcatgggcatggaagaagaccccaccaccatcccacactctgagctcctcgttgcccctagccacatagcccccaataattcccaccctgaggtgagacaaatgctgaataccagaggaatcaagccactcagaatatgcttatagggacaaagtctcccacatcccgtcccctggatccccctacagccccctgctgtccatcgcggcctcaacccctgcagatggcagcctgcaccacaaaaaggcaacttagaggtgttttttttttttttccttccagttcttggttgtaattggattcaggctaaaacaaccacgtccccaaccaggaaaggagggcactggggcggggacggaggagaggctgtgggagaagggagggaccagaggagagagcgagagagggaaccagaccccagttcgccgactaagcagaagaaagatcaaaaaccggaaaagaggagaagagcaaacaggcactttgaggaacaatcccctttaactccaagccgacagcggtctaggaattcaagttcagtgcctaccgaagacaaaggcgccccgagggagtggcggtgcgaccccagggcgtgggcccggccgcggagcccacactgcccggctgacccggtggtctcggaccatgtctcccgccccaagacccccccgttgtctcctgctccccctgctcacgctcggcaccgcgctcgcctccctcggctcggcccaaagcagcagcttcagccccgaagtaagtgagcttcccggcccttcccggagtcgcgcccgccgggaggcgagcccgggggtctcctaggggacagcctctattcggagaggagggcttttgggatctccgctgctcaggcctgcaggattccccctccctttctttttcctcttcgtctccaaacttccagatcgatccaacttttgcccgcttccaaccagctgcccccaccccctgcgccgccgactctccttcccattccttcttttttcccagtccttggaagaactttacaactggggcgaactcccccttccccgattcccttgggctctgctctcagctctggaaccgcctgataaacatttggactccgctcaaaccccgcgctgtcccggctcctcgtcatgcgcgagagtttgttgtttcttcgacttcccagctctccagcgctctcccgccggcgcgccctccgatgggcgcttcggcctccccgggtggcccaggccttcagcggacgagtctgcggccaggtgggggtcgagggtggacggccgagcgtccagggccacagcccccgtctccccgagaggaccccgctgtgtccctacccgcatccctggcgtcgagggtcgcagcgccggcgcgctggccgcgtttccgtacacacaaagctctccttgtgagccgggcgatcggccgggtcgctgcctccccctatccccacccgcgtcggcgccttcaggccctttttgttgttaatagtttttctgtgttaattgcagggagcctgggggcgtcgcttggggaatggggagagggtctggtccggggtgccctcacgtcggggctggctcgggcgccccccaccctcaccccggcccagacggtggcccaccgggccccagaggaagctgcgtgggagttgtctgaggaggtttttcctctctctctcttattttggggtgaaggtgggagacggatttaatgagcttcttattttgggccatctcaacccactcagcctggcaagggcctgggtgcggttgggaggggccaggaagggccctagaagggggatgggatatgggtttggcttctcctccttggtcccaccccggagaaaactctttggaaagaatactgtcttctctctgcgtccctgaaagggtctggggccgactggaaaagtatggccccaggaatcggggtggaagacgaaacgtggagtgctcagagaccagggagagtaaaaacctgccctggtgctggaggctgagcctgactgtccgggaggagtcgtcctcttcccaggcctagagtcctctgagacctgaaagggagcgcccctaacaaaacgagcctgagcatctggggagctgccgaccgccaacttcactgccttaccttttttccctcccctgctttgctgggtcccccaggggaggggcggctgccctggctccgttttaattgggtcatgggcggtcccagtgccagaaccaccatttgcttctgggcccaggaagggagggaggagcagccccagaggctaggatccagggcctactgcagagctggaggtccccccaccctcccctggacccctaagccaaggtgggaggtgttccgttgactttctcctaggggataccttgcatctctctcattcgcaaagacaaagccagccgactgggttctttgacccaacatagttgcttttttctccaggccaatgtggagggaaagctggggtggtgcaggcctcatgcagctgggtccctcctaccaggcctccagagtcctgcaccagctccaggacagccctctcctccccatggcctgtctggcgctgggcccttcctcccacccagccgcagacacaagagtcctctcttctgtggtttcgacctcatagtctctgtgaggagagaaacttgcctaggcctggggggaggagagggatgggggcacttcctttccaggccttgcggctctcttgactccagggaagtccttcatttgactgagccttcatttttctcccgagggtatggggtggaggttgtaggtgtgaatatttagacccccctagcttcttgaacgactccagaggggatttcccccagagctcctggatgtggattctccccatctcttctgtcccgtcttccttctgtcgttctgtcttctccccatcttccttctgtcgttctgctctaggcaaattctctcagctttgctctctgagggttgacggggcctggcctcagtcctcctgccttccagcgtcagtagaccagtcccatccttccccaagtcctgaagcagctgctcctcaaccaagggtcataagcccggggtgtgtttatcctgcaggtatgctaggggcaaaagacatttcctgcatagttaggcacaggccacagcaggcctccccaggcactggctgtggcatcagccagaacaggtcagggcaagcctgcagctccctgagagcagccccggactggtgtggactgcttggctccctctggtataccaaaggttaaatgtcactccttcctctacccctgaggaggggctctcagagcctcagagctaggtggtgctagggttgttctagccaagactgttggctgggaaaaggctgggttgtttacatctcgggttctagctcgcatcagccttggggggggatcacttcccagaaccatgttgcaattcttgcccctgtgggctcaggtccccagtcagctgctcttgagtcacccccagtccccatgcaagactactgccccatcaccaggacctgagcccagaggtgaaggaccatgtggcaatccaatcctgatgaccttggctaggagatacagcacccaacagcagcctcccccatctcccctccaagatcccatcctgggcaacctacagccgcttcctgaactccctaagaaagcaaagctggagcagggactagagctatctgggtggtgtcttctccccataaaagaatccaagcatcttcatatttcatatataacttggcttgttttacttttttttttttttttttttttttgagacagagtctcgctctgtcacccaggctgagtgcagtggcgggatcttggctaactgcaaccttggcctcccaggttcagcaattctcctaccacagcttcctgagtagctgggattacaggtgcccaccaccacgtgcagctaatttttgtatttttagtagagacagggtttcaccctgttggctaggctggtctcgaactcctgacctcaggtgatctgcccgccttggcctcccaaactgtcgggattacaggcgtcagccaccacgcccagcctggcttgttttactttgaggctttaagaaaatactccattgttcttacaataaaggctgactttctcctcaacagggctttgcagtgtgtgtaccttttaatcaaacaccaaaaacctaacattaatttaatttaaggcaatatgccagcctttatattatgaccaattcacaacatacctgaaataaaatacagtcaccaagtctcctcctccacccctatgtcccacttcctctgttgagaatcttttttttttttttgagacggagtcttgctttgtctcccaggctggagtgcagtggcgcaatctcagctcgctgcaagctccgcctcctgcgttcacaccattcttctgcctcagcctcctgagtagctgggactacaagcgcccgccaccgtgcccggctaatattttttgtatttttagtagagacagggtttcaccgtgttagccaggatggtctcgatctcctgacctcgtgatcagcctgcctcggcctcccaaagtgctgggattacaggtgtgagccaccgcgcccggccactgctgagaatcttaaataggcctttaggttccaagccataggtcagatgctgcttggataaggacagcggcaggatcctggcttcagctggatcacacctcttaccacattccaagttcctagtttcccctcgtagcagccagccttagctctagctcttttttctgccctcctttctaaaaagatctcagctgtgagggtcctggggacatggcactcccatcccaggagggcctcaggtcaagcccaatagtagagctcactcagcctgtcaacacccctccccacacatcatgggcatagcccagtcccaggtggaacatgctatatttgtaagaacactgacatgggggagaaaagtgctagaaggaatcacagctctgagaagacatctcagaaccccattaaaccaccagggctctctctcattttcaagagagctacagccaaaagcctgtttgggcccatagccccgaggggacaagctatagccccgaggggcctgggccagagatcaggtctagcctgggagttcctccagacctgctgccggagccaagctgggaacccactgccctttccttgccaagccaaggctgtatgctgggcattgtcggggaggtagaggcaccctatgggccaggtggggacactctaagccatacccctttccctacaggcctggctacagcaatatggctacctgcctcccggggacctacgtacccacacacagcgctcaccccagtcactctcagcggccatcgctgccatgcagaagttttacggcttgcaagtaacaggcaaagctgatgcagacaccatgaagtaagtgctagaccctggcaggagttctgcctagcatccactgacaatgccagcgccagagatgttcctacctgaatgcctggcttgtgcaccccactcccccatatctcatccccacgtgctgatcctgaccctctcatattcaccctgacctcataaccttggcctttccccacattgacacacagcaagtcttacccaacactgatcgtggagacctttctctttcatacactgcactgatcccaatcctcgcacccaaacccactccagggccatgaggcgcccccgatgtggtgttccagacaagtttggggctgagatcaaggccaatgttcgaaggaagcgctacgccatccagggtctcaaatggcaacataatgaaatcactttctggtgagtccaacaggcaagcaacctttctcacatctggttattatttcctacccattgtgcttatgcagggactcagagaccccctgccccactcccctcagttcctgggaagcatccgtgggagtggggaggaaaatggctctcatccttgagagaggtgtagccatcaagggtgcaccccagtgccagagagccagagcctgaggatcccttgttcttgagacagaggcgttgcgcatgaggtagcaggaagagctgggtcaggcagaggtggctgggccgcgcagtcagacctgggagagtgcagggaaggagaatgttgcccctctttatcctaacacaccccatcctctccccacgtggctggacctcagcatccagaattacacccccaaggtgggcgagtatgccacatacgaggccattcgcaaggcgttccgcgtgtgggagagtgccacaccactgcgcttccgcgaggtgccctatgcctacatccgtgagggccatgagaagcaggccgacatcatgatcttctttgccgagggcttccatggcgacagcacgcccttcgatggtgagggcggcttcctggcccatgcctacttcccaggccccaacattggaggagacacccactttgactctgccgagccttggactgtcaggaatgaggatctgaatggtgagccaagtatccctgggacttactctggaaaaagccaacagtcatttgtaggggtggttcccctccctccttccaaaatctccgggctagaagggaccacagagaccttctgatctaacttctgacaaaagcaggagtcctgtttgagctatttacatctggtcccccctctcacccactgactggctttccagtcaaagacttcaaagcatccttattgcccacttttccagaccgatgtcatgtctcgctcccgggagaaactggggactagagagagccttggcttcccttaccacaggtcttcccgggatcggggtcctgcttccaagcactctctcacctccacccagaggagcttgctgactggctttgtgcttaaataccagataaaaagctagacctcagaatttggccactttggattgaaaacatgggcagcaggcttggaggtgaaaccaaagctgctggtggggaagcagggaggctgagggaagggactcaggctgctatcgtcactgtccccatccttccaggaaatgacatcttcctggtggctgtgcacgagctgggccatgccctggggctcgagcattccagtgacccctcggccatcatggcacccttttaccagtggatggacacggagaattttgtgctgcccgatgatgaccgccggggcatccagcaactttatggcgagtagtctacacccacgcctgctccctcctctgctgcttgttccctcctggtctacgcatttcccctcttttatgccttgcagtctccgcaccgccccctgccaacctgcccctgcctctatcagctccacttttgagcccatcttttgtgtcgcctcccagttggttgcttcagcctcccctagaagcccatccacacctttccaagggtattgtctgcccatctgtctgtccttccgtccccgcctcctcctaagtctgaaatgcccctcgtgttttctgccccagggggtgagtcagggttccccaccaagatgccccctcaacccaggactacctcccggccttctgttcctgataaacccaaaaaccccacctatgggcccaacatctgtgacgggaactttgacaccgtggccatgctccgaggggagatgtttgtcttcaaggtgagaagaagtgggctggtttgaaagacaaaagggccctatgggctgggcatggtggctcatgcctgtaatcctagcactttgagaggccaaggcaggtggatcacctgaggtctggagttcgagagcaggctggccaacatagtgaaaccccgtctctactaaaaatacaaaaaattagccaagtgtggtggtgggcgcctatgatcccagctacctgggaggctgaggcaggagaatcacgtgaacctgggaggtggaggttgcagtgagccgagatagggccattgcactccagcctggacaacagtgtgagactccatctcaaaaaaaaaaaaggcgggggggtactctgtggtagggcggctgggtggaagtgacaacagctggactaaaaactaaaactgaggaacaaacagcagtgcgggagctttggggactgaaccagagacctaggccgcaagacataatggacttttcctgcattgaccggcttccaggagcgctggttctggcgggtgaggaataaccaagtgatggatggatacccaatgcccattggccagttctggcggggcctgcctgcgtccatcaacactgcctacgagaggaaggatggcaaattcgtcttcttcaaaggtaaccaggcactccactttagtctttgggagtgaggcgggtctccctagaggagctgatttcctctaaagtccctagagcctaagttgaacccagacgttgccctcctgtcctccccaggagacaagcattgggtgtttgatgaggcgtccctggaacctggctaccccaagcacattaaggagctgggccgagggctgcctaccgacaagattgatgctgctctcttctggatgcccaatggaaagacctacttcttccgtggaaacaagtaagacctcaaccccttaaccccaggcctccctcagaaaccaccaccaccccaaattccctcagttctggagaaagacccactttacccccaacatgcttccctggagaaggagctggctgagcctctgctgttgcctagaaatgggcagcctcctttgggcaccgtgtgagtgggatgtgaccgggtcattccagacctggtcatttggcgcctcctgcccccagcactgcgcctccaccccagcagccaggcactgtcattagggctactggtggctccttgcagcctgggccctcccttccacccccaccttccgccgctttcagcagcaggtcctcattactcaaaacccctgtccccaccctgtccacagctatcctttgcccactggtggattcggtccgggtcttgcgcctcctgaggacatgcccagtgtccgccactgcccttcctttccccttccccaggtactaccgtttcaacgaagagctcagggcagtggatagcgagtaccccaagaacatcaaagtctgggaagggatccctgagtctcccagagggtcattcatgggcagcgatgaaggtgagaggggcaagggaaggtgtcgctgagagaaggatgggaatagggagttgaggaagagcgggagggaagcctgagggagtgctgtgtggaaaacaacggcgatgataataccacataccaggcgctgggctaggtgcttccacacgtggtgcccattcatccccaccaccttccaacctggtactataagcacccccattttacagctgaggaagctgatgctcacgaaggtggagggaagctcagctgccctcacattaacagagcttccctcgctcctctcctctcctctctttgggtcttcccttccttaccaccttctgattcactccctgcagtcttcacttacttctacaaggggaacaaatactggaaattcaacaaccagaagctgaaggtagaaccgggctaccccaagtcagccctgagggactggatgggctgcccatcgggaggccggccggatgaggggactgaggaggagacggaggtgatcatcattgaggtggacgaggagggcggcggggcggtgagcgcggctgccgtggtgctgcccgtgctgctgctgctcctggtgctggcggtgggccttgcagtcttcttcttcagacgccatgggacccccaggcgactgctctactgccagcgttccctgctggacaaggtctgacgcccaccgccggcccgcccactcctaccacaaggactttgcctctgaaggccagtggcagcaggtggtggtgggtgggctgttcccatcgtcccgagccccctccccgcagcctccttgcttctctctgtcccctggctggcctccttcaccctgaccgcctccctccctcctgccccggcattgcatcttccctagataggtcccctgagggctgagtgggagggcggccctttccagcctctgcccctcaggggaaccctgtagctttgtgtctgtccagccccatctgaatgtgttgggggctctgcacttgaaggcaggaccctcagacctcgctggtaaaggtcaaatggggtcatctgctccttttccatcccctgacataccttaacctctgaactctgacctcaggaggctctgggcactccagccctgaaagccccaggtgtacccaattggcagcctctcactactctttctggctaaaaggaatctaatcttgttgagggtagagaccctgagacagtgtgagggggtggggactgccaagccaccctaagaccttgggaggaaaactcagagagggtcttcgttgctcagtcagtcaagttcctcggagatctgcctctgcctcacctaccccagggaacttccaaggaaggagcctgagccactggggactaagtgggcagaagaaacccttggcagccctgtgcctctcgaatgttagccttggatggggctttcacagttagaagagctgaaaccaggggtgcagctgtcaggtagggtggggccggtgggagaggcccgggtcagagccctgggggtgagcctgaaggccacagagaaagaaccttgcccaaactcaggcagctggggctgaggcccaaaggcagaacagccagagggggcaggaggggaccaaaaaggaaaatgaggacgtgcagcagcattggaaggctggggccgggcaggccaggccaagccaagcagggggccacagggtgggctgtggagctctcaggaagggccctgaggaaggcacacttgctcctgttggtccctgtccttgctgcccaggcagcgtggaggggaagggtagggcagccagagaaaggagcagagaaggcacacaaacgaggaatgaggggcttcacgagaggccacagggcctggctggccacgctgtcccggcctgctcaccatctcagtgaggggcaggagctggggctcgcttaggctgggtccacgcttccctggtgccagcacccctcaagcctgtctcaccagtggcctgccctctcgctcccccacccagcccacccattgaagtctccttgggccaccaaaggtggtggccatggtaccggggacttgggagagtgagacccagtggagggagcaagaggagagggatgtcgggggggtggggcacggggtaggggaaatggggtgaacggtgctggcagttcggctagatttctgtcttgtttgtttttttgttttgtttaatgtatatttttattataattattatatatgaattccattcaaatcgttcctttttgttaacaaggggcatggggaggggtgggggtgggggggcagaggcgtctgaccccaggaacctgcagggcggggctgggtcggtgccctctaaggacaattttgaccttgttcaacctttccacaaagaataaattgtgtttcacattccttgtgtggctgagctctgtagagggtgacgggctgtgggtgagaggagctggatgaggggcgggcacacatcataagcagcgttttccatgaggtggggctttggcatttttcataaaggagtatgtttattcttagtggactaaagggattcaggggccagagttggggagcagggcatacccatagggggcagcggggtggctgacagagctcagctgctctcccaccacctggcttaaaaggctgccttgagacccaaggctcagagacaagaggaagtggtcaagctgatgccacttggaaaatcttcctaaattgcattaccgtgtcctgtgatccacccgcagaccctcagtttcctcatgcctctctgcctgaggcagggggattcccatgatcatattcgaccttgggctcactggctttatccgagccctcaggacctaagaagcctcttccaggcctggggctctgctgctaagacagaaggagacgagggagaaagagaaagaggtgtcgctgcggggcctgctaggagcagcccgtctctggccaaacagagatctcatcccaattgcccggaagaaccaggatggtcaggttggaagggcagaataacaaggctttgcttcctctttccttagaaactcctgccccagacagggttcccaggcttcctctgaaaccagcctggagggaggaatcagttcagtgctgagtcagctccgctggaggagagcagcccctttttctcaccccccttcccttcctgcctccacccagcccaccctgggctccagcccaaactccctccgccgcctgccttgcagagtcctggccccatctatgccagtcagtctatccagctgctattcagggctggttagtgtgattgctttggcagaaggggtactccaccttcctgcctgccaggaaccctgaccctacgcctggcctcctgcgcctccccctgccaacagctgtttggcagtctgtgtgtctcggtggaattggacaccacctcaccaccacccttaccggaggggatggggaccttgataaggtggcaggggaagtcaggggcatctgagggtggtagggtctgtgcgggtggcaaggaactcaaagatgagctcatggcccctttgtgtttttgtggtccacatctggaggcaattacagatgttatccagtgggagttttgcaaaacacagctggagccagtggaggagcctggggaggggggactgccagagagaagaggagggggagcctagggctcccgcgctggagtgcggtttccccatcacgaggaaattgtttggccctgattctggaatcacaagatgctctctggagccaagggggagaaatgggaatggaggaccagagacaaaggggaaagaggtggaagatgggcttataaaaccccccactgctaaatttgactggtttaaaaaaataaaataaaaattaaaacaagcttcacaagcggagagaatttcagggtggaggcggcagggtcccgtgcttctgacgtgcctgggcctgcctgatccaccccagtgaggctgcccggggaccctgggaggtgccttagtgatcacaagttcccgctgagtgaaccgccaggtcaggctggggtgaggggagagcagagggctctgtggcttccgaaagacctgcaaactcggctttcactggccctaccccgatctgtccattgggcctgacccagtttctatggttccaagttcctttattcgaaagcagcacatgtgagttggagcagccaggagggagccaaggggaatcttcaaggaggtttgggcagaacccaggaaagttggtgctaaggagacgctggacggggggcaagggccgaggaggagcagcactctgcccacgactgcaccccacacatctggaggggggccacggactcccttgtcatcacctccccttctccagggctcctggcaccagctgggcccatgactccagggctgccggccaggcgctgggtcagcgggaagggaagggaagatctaagaggagctaggtcctctagaggagagaggactgggcagagagacacccccacacccctccagaccccaaaacataatctggctagctctgccagtccttcactgtccctcccccagggccccttctccccacaatctgacagactttccagtggtctctttccactctgtatccctccttcccttccagcaatggtgaaactaacatttgctgaggtccttacaacacacagtgacacaggcactaatattgtccccatttaacaaataagggaactgaggcccagaaagataaataacttggtcaaggtcacaggttgttagtccaaatttaaaacccagatctttccaatttatttatttatttttctatactggcagatcctggcaatctcttggtgtctcttccagcatggaccctgggtagctgggcgttttcatggcagtgtgtgttctggggatctgtcagcacatatgtatttgcttattatggcttttgttgttgttgttgttttgagacagagtctcactcttgttgcccaggctggagtgcaatggcacgatctcagctcaccgcaaccgccacctcctgggttcaagcgattctcctgactcagcctcccaagtagctgggattacaggcatgtgccaccacgcccggctaattttgtatttttagtagagacagggtttctccatgttggtcaggcttgtctcgaactcccaacctcaggtgatccgcctgcctcggcctcccaaagtgttgggattacaggcgtgagcacccggctgtatttgcttattgtgcagcaatattatgggggataggagtgcagagggaaaaggaccccactttgccagcccatcgcctcccttcctggggacaggagccgtactctgaaggaaggaaggtggcaccaagactcagaagccaaagggatggaatgagacaatggcagcagctaagggaagggtgggattggtgaatgtttctgtgcaagggcatgggggggcagggggcttcaggggtggtgcccattcccaaagtccccaaggaaactccagccaaggctgctccgtcgtcctgcagctcctgtcccgtttcctacctaccaacccaaatctgagtacacctcttttaaaagctcaagtctgcacacctagccccagccttgggggtttctgccctcctctctcagtcttgtgaaagtagggagaccggaggccgcctgcaaggggctgggcagccagggcctggaagggaggcaggcctgactggccagaagccaccttccaaatgagctcacacacatattttccaccctggcccagggccgatggctcagctccttccaggccagccttccccagccaggcccagccccctctgtcctaccctgccaccagtcctggccctagggactccaaagcaagattactggcagcctcctggccagggcagtcactggcatccccaaggagcagcctcctctgcctccatgctgaggccatttgccccagattgcccttattcctttgtgacttacagaagaaggagaccagctccctgcctccaaagacccacacctggatagggagggatggtagaggtgatagaagaggcggtggaagtaatgaatgggcggaagggcttcctttgagtgcccgaagtagctcattgactcagggaccagccaggtctgggagctgcctcatcaccggccacatcctgctcactcactcagtttcctgctaggggcagttccctgacttggagcaggatggggtctgggtgaggcaaggccaggctgaccacaaagctgagaaaaaagactggcgtgtcagaaggcctagtggattcatacacacgcaacaggctccatttcactttggtttgtcaaagacatcactcattgcccaacttacagagacatgtagcaccaggccagagagcaggatcaattccccaaaaggctctctcgcctgctcagcacctgattctgtgctaggagtatggctgccctgactctatttcctggctccagttttgtcccctggagttctgtgagttagtatattcagacacggcagacaattcttcccattctggagtccaagatgacggtcactgtgagtagatcacacaatgttgctctctcataccaggtgatggtatagttctgtcaaggaattactataattcataataccaaccctatcacagccactggaaaacaggttctagcctcacttttcttacaaacgggtaaaatagtgctagacacacaggaggcactcagtaaaatttgttgaattgaattaccagtggtagttgtgattacataagtattgtatacatatgtacatattatggacacataagtagtgaatacataactcaaataattgagctgaacacttaaacttagtgcactttgtgagcatcatggtacatatatatttttgtgtgtgtgagacagagtctcgccctgtcgcccatggtggagtgcaatggtgcgatctcggctcaccgcaacctccgcctcccgggttcaaatgattctcctgcctcagcctcctgagtagctgggattacaggcgcccgccacacccagctaacttttttctttttttttttttttgtatttttagtagaggcagggtttcaccacgttcaccaggcagatctcaaactcctgatctcatgatctgcccgccccagtctcccaaagtgctggggttacaggcgtgagccaatgtgcccggcctttcatggtatattttaccttattattttttttttagattagtcaagtgcagtagtgagaagggggaaaagaacagaacaaggagtttgatctgtaactgactgtgagcaatcagttgagataacacactaccttcagaccaaccatcacgtcaatctttaaaaggttttaaaaaagaaaaatatattgaggtaaagaggttcatacccccagaactcctactttgtccctgtaggccccatcccctcccgcttaggtgtcaactctccactccctgcctgcccttaatctgggagtggttggtatcagtttgtgttgacccaactcttctggaaatacccagcctttggcttgcactcccagcccagcccacacctagactctgacctggagggcccagccaggaggcctctcttccctctatccctctaagctctatgtcagattccccaaactctcctctgctttgctggcctgtgctccagaggtctccccacctcatccctgcacaagattgcatgtaggttctgagaggaggaaagctgggtaagggacttagaggaacacaccccactctctatggctgcgcccactccatgtgcaagacccgcggggcagggtttgcagggtggtagcgcccccttgtgctggatgttgggactgcaaaccgaacctagggaactgagaggcagaggcaaagccagtcccgccagggccacgggcactaccagcctcttccttcccctgttccactttccatgtttccaccctggacacctgtacttaaaggggtgggactcggcgagacgggcagacaagccgctcttagctttccagctgcagagagggaaatgtcagagtttccgtctgctgtccctgtgtggaggttggtgggcagccctcactaactccaggaaaggacagggagtgggggggcggcgggtggtacaggacagatggtccgcgggaggggagaaggttggcacttctgtgccctctccttggagcgcctctgagttgtcacactgcccccctgtgggcgcctcagacacgaatcactccaggatgcctgtccccggggtcccagggtaagagtccagatgagactctgcactcctggactgcagaatgctatcacagaactccttctgaccaagacaagcaggcccctgtgtcccctttatctaagagtgggacatttctgtgccaattccctgaggcttttggagataacacccatgcctcttgagggacctctaacctgcacccatgcccctgtcctcgtcctcaccctggtgccatgagaatcctttggtctcagcctcacatttataaaggcccttaaatttctaattttgtagttaaaaaaattcctgttggttcttgtaaatagtactatatagctgtgttgtttgtaccaagtttgtatttgttaaatgtttaaatataccaagtattatcaaaatcatcttagcatttcttagttgtttttattattattatttagagtctggctctatcacccaggctggagtgcagtggcacaatgtcggctcatttgcaacctcatttcctggattcaagcgattctcgtgcctcagcctcctgagtagctgggattacaggcacccgccaccatgcctggctaatttctgtatttttagtagagatagggtttcaccatgttggctaggctggtctcaaactcctgacctcaggtaatccgccctcctcggcctcccaaagtgttgggattacaggcatgagccactgggcccagccttaattttttaatataccagaggctcaaaaaatggacatgatttgaggttacgctcaaatttccaaggggtgttcccaccccacataaaaaattgaactgcggctgggcgcggtggctcccgcgctgaggagggtggatccctgggaggctgaggcgggtggatcacctgaggtcaggagttcgagagcagcctggccaacatggtgaaaccccatcttgtctccactaaaaacacaaaaattagctgggcatggtggcgcatgcctgtaatactagctactcaggaggctgtggcaggagaattgcttgaacccaggaggcagtggttgcagtcagccgacatcacaccattgcattccagcctgcacaacaaagcaaaaaactctgtcttaaggaaaaaaaaaaaaaaaaagcctggcagggtgcggtggctcacgagctcgtgcctctaatcccagcactgtggaaggccaatcatgaggtcaagagatcgagaccatcctggccaacatggtaaaaccccatctctactaaaaatacaaaaattagctgggcatgatggcacacacctctagtcccagcgactcgggaggctgaggcaggagaatcgcttgaacccaggaggcagaggttgcagtgagctcagattgtgccactgcactccagcctggcaacaaagcgagacaacttacttcaataagctccctttgcccctgtcttctgtgaagtgggccatcctgaaactgatgagtcacagagttgtcaaggagtactgatggccccagacaggtatccctctatatcaacacttgccctcagcctctgtacctcaagcaggaagtagactgactttatttgctccatgaattccagtttctggccttcagagtatacagaataaacaaattcttgttctacactacagcttgtcaaacatttcaatctagttttcactaaagttaagctctccagccgggtgcagtggctcacccctataatcccagcactttgggaagccaaggtgggagaattgcttaagctcaggagttcgagatcatcctgggcaacatggtgaatacccgtctctaccaaaaaatacaaaaattagtcaggcatagtggcgccgggctgtagtcccaactacttggcaggctgggatgggaggactgcttaagcctaggaggtaaaggttgcagtgagccatgatcgtgccactgcactccagcctgggcaacagagtaagaccctgtctcaaaaaataaataaataaataaaaataaaggttaagctttcctttagttgaaaagcatttctagtttcataaacagcttatcatatgacatgacttagagacatttcaacattcctgtcaccttcctccgcattatttcattttactaatcttttataatgtggcttccagtatatgaggaggcagtaacaggtagtggctaggaacaagggctctggacttggcaattagtgtgtgaatctagtctttactgcttactggttgggaccttcagcaagttatatatcctgctggagcttcagtttcctcacctttaacatggagctaataatacaaagggtagttgagtagattaaaagacatcatctatgtgatgcctgtcactagtggtcactgattcattcactcaaaaagcatttattgaatacctactatgtgctagacattgtttttggcactgaggatacggcagtaaacaaatagaccctgccctcatggaacatacattcttgtgagaagagcagggataaatgtgatgaattaataaaatagtttattagatagtgctaagtgctaaggagaaaaattaattgaggaagggagatagacattgttgggggtgtaattttatacactggggtcagagaaggccccaccaagaacctgaggatatgagggaacaaaccaagtggttctcaggaagaagagcattccaagcaaaagcagaagtaaatgccaagactgaggtgagtacatggctcccatattcatgtcttagtgaacaaggtagtgtggctggaacagaatgatcaaggaagacagcaatagaagaggagatcagacaggtcatggggtgacatcccataaaaccctgtaagtcattgtaaagactttggctcatactctaactgaaaggaaggaagactgcagtggcgtaaaggaaggacgtggtattttagtacagtgtaaatactcattattattatatattattataaatactcattattattatatattaaataaatatttttttatttatttttcttttgagatagagtcttgctctgtcacccaggctgggagtgcagtggcgtgatctccactcactgcaatctccgactcccgggttcaaacaattctgcctcagcctctagagtagctggaactacaggcacatgccaccacaccaggctaatttttgaccatgttggccaggctagtcttgaactcctgacctcaggtgatccacctgcctcagcctcccaaagtgctgggataacaggtgtgagccaccctgcctggccagtgacttgtttctaatggagtctggcagcagtgacagtgtgtgacttccaagaataataagcaataaaagacattataaaaatctaaaatctaaaatcaaaaatatgttttgctgtcttttggatcactcattttgaagaaagctagctgccatgctgcaggacactcaagaagtcttatagagaggtccacaggtaaggaactgaggcctcctgccaacagccagcatgaacttgccaggcatatgagtgagccatcttggaggcagatcctccagccacggtcaaaccttcagatgattactgtcctggccaacatttggactgcaacctaatgagagatcctaagccaggttcatctaggtaagtcactttcaaattcctggccaatataaaatgattacaacaataaatgtttattttatattttaagctgtgaaattttgggatgatttctcattcagcaatagataactaataggtttgggtactaaaagtggagtgctgctgtgacaaacaactaaaatgtaagaatgactttgaaattcggcaaagggcagaagctggaaagactttgagaagagtgttagtgaaagtctaaaatgcctggacgcgacagttagtagaaccacagtggcctctttttttttttttttaaagacagggtcttgctatgttgcccaggctgatttcaaattcctggcctcaactgatcctaagtcactgagattataggcacaagccaccatacccagacatgatggtctttgaagaggcggccagtgaagacttaaggaaagtgaggaaaatgtgttttaaaactggaagaggccgggcgcggtggctcacgcctctaatcccagcactttgggaggccgaagcaggcggatcacgaggtcaggagattgagaccatcctggctaacacagtgaaaccccatctctactaaaaatacaaaaaattagccaggtctggtggtgggcacctgtagtcccagttactcgggaggctgaggcaggagaatggcatgaacccgggaggcggagcttgcagtgagctgagatcgtgccactgcactccagcctgggcaacagagcaagactccatctcaaaaaaaaaaaaaaaaaagaaagaaaaaaagaaactggaagaaaaaggattctcgttattcagcaagtttagcaactatagttagtgtgtagtaacatggaaagtaaaaaatgtaattaatgaatgggaaatctagctaaggagattttcagggagaatgttgaagttaacacctggtttcttctttgctgcttatagtaaagtgcgagatagatagctaagaaaaaaaaataccacttaaaaagagccaggaggccgggcatggtggctcacgcttgtaatccaggcactttgggaggccaaggcgagcagatcacaaggtcaagagatcaagaccatcctagccaacatggtaaaaccccgtttctactaaaaatacaaaaattagctgggcatggtggcgctcacctgtagtcccaactctcgggaggctgaggcgggagaatcacttgaacccaggaggcggaggttgtagtgagccgagatctcgccatcgcactccagcctggcgacagagcaagactccgtctcaaaagaaaaacaaaaagagagccaggaatttttggattttaaaattctcagcctctccagacagtaaatgatgttaaattttttaaatagcttctgggcaagtatcaaattcagggcactctcaggaaaacatggtataaagacaaagccaagattgagtgtaacatgctttgttaatatcagaaggatctaaggtggtactcaggaaaccatttagtctaacaatatggtttttggggtttttggtttttggttttggttttggttttttttgagacagagtctcactctgtcacccaggctggagtgcagtggcatgatcttagctcactgcaacctccgcctcctgggtccaaacaattctcctgcctcggcctcccgagtagctgggactacaggaacgtaccaccatgtctggctaatttttgtatttttagtacagacagggtttcaccatgttggccaggctgtttcaaactcctgacctcatgtgatctacccacctcggcctcccaaagtgctgggattacaggtatgagccacagcacccagcctaacgatatagtttttaagaatcttaagagccaggcatggtgggtcacacctgtaatcccagaactctagaaggtcgaggtgggaggattgcttaaggccaggagttcaagaccagcctggacaacatagcatggtcccatcctacaaaaaaatttttaaaattagtgggcatgggcctggtgcggtggctcccagcactttgggagtccaaggcaggcggatcacaaggtcaggagttcatgaccagcctggccaatatagtgaaacactgtctctactaaaaatacaaaaaaattagccgggcgtggtggcacatgcctgtaatcccagctactcggaaggctaaggcaggagaattgcttgaacccaggtggtggaggttacagtgagccaagatcacgccactgcactacagcctgggcaagagagtgagactccgtctcaaaaaaataaaaataaaaataaaaataaaatagtgggcatgaaagtatgcacctgtagtcatagctactccagaggatgaggcaggagaataacttgaacccaggagttctacactgcagtgagctatgattgtattattgtactctaacctgtgtgacagagaaagatcctgtctctaaaaaattttaaaaagaagctatggctgggcgcggtggctcatgcctgtaatcccagcacttccggaggccaaggcgggcagatcacaaggtcaggagttcgagaccagcctggccaatatggtgaaaccctgtctctactaaaaatacaaaaattagccaggcatagtggcaggcactggtagttccagctactcaggaggctgaggcaggagaatcacttgaacccaggaggcagaggttgcagtgagccgagactgcgccactgcactacagcctgggtgacagagcgagactccatcaaaaaaaaaaaaaaaagaagaagcttatgagtgttgcccctcagcagtctaaactgaagcctgagttagaaaagagtttatctcaaagagatttgtgagtacaacttttatctaattgagtgaaccccaataagatttaatggagattcgcaaaagttttaagaaaattgtattggcagaaatgctaccagcttgtattgaaacagatagagggaatacaaaataagaagaagtttttggacccccaaacttttttttttttttttttttttttttttttttcagatggagcctcacaccctgtcacccaggctggagtgcagtggcatgatcttggctcactgcagcctctacctcctaggttcaagtgattctcccacctcatactccccagtagctgggattacaggcgtgtgtcaccatgcctggctcatttttgtatatttagtagagacggggtttcacaatgttgcccaggctggtcttgaactcctgacctcaagtgatccacctgcctcggcctcccatagtgctgggattacaggcatgagccaccatgcccagtcttgacccccacacttctgcagcaaaagcaggctgagaaaacaacacagctgcaagcatgagcctttctataaaaaggaaaggtggctcagagggcagagcacaaagagcccaaagctggggccaagagctatgagaaattatgctcagatcctgagctctactcaaggaacagccaacctgtatccttcagtatttttctatagaatagagactacttcctatgtttatttatccttttttttccctgcccccagggacctctctttttttttttttttttttttttccgagacggagtctagctctgctgcccaggctggagtgcagtggtgcaatcttggctcactgcaagctctgcctcctgggttcatgccattctcctgcctcagcctaccaagtagcgggaccctgtcaccatgcccggctaatttttttgtgtgtttttagtagagacgggttttcaccgtgttagccaggatggtcttgatctcctgatctcatgatctgcccacctcgacctcccaacgtgctgggattacaggcatgagccactgcacctggcctttttttttgagacagagttttgctcttcttgcccaggctagagtgcaaaggcatgatcttggctcactgcaacctttgcctcccacattcaagcaattctcctgcctcagcctcccaagtagctgggattacaggcatgtgccaccacgcccagctaattttgtatttttagtagagacggggtttctccatgttggtcaggctggtctcgaacttctgacctcaggtgatccgtctgccttggcctcccaaagttctgggattacaggtgtgagccatcatgcccggcagacctctctctttttgtgaatagaaatatttgtagaggtaatcctatgcttttcccacatctcatcattgtatgttggtgatggaggagtaggacagggaatatgagttctctttttagttcataggtcttcagatcaagaagagctactcaaggagctgtacataggaattagtccagaagaacctcacctggaggcctgttttagatgacaagattctggacttcaagctgattttgtaatgggatgagacttttgagtcccttgggagggttgaacagatttgcatttgtgaaggacatgaacctttgggagccagagtgtagactagtgtagactagcatagccagccttcaggatggacctcaatgatctttacctgtcaatatttgtgcttttgtgtaatctcctcctacaatgcatagggcagacctgtgttactaagggatattgcagaaatgatggggtgtgctttctgagactgagtgttaaaagcattgtgacttccaccttgctctctcttacattgcccattctaggggaagccagctgccatgttatgaggacactcaaacagcttatagagatgcccatatggggaggaactgaggcctcctgccaacagccaatacctacttgccaggcacataagtgagccatcttggaaatggatccttcagccccagtcaagtcttcagatgactgcaccttcatgagaaacaccaagtcggaatcacccagctaagttacttctgaattactgacacacaaaacctgtgagaaaataaatggtcactgttttaagccctaagttttggggcaatttgctatgcagcaatagataactaaaacactaatattagcatcatccttactttatacatggagaaaattgggcatagaaaagtaaaaacttgccaagttcattcacctgataaatggcagtactggccagttctgcttctctaatatgttagcttttatgcaaccacgccatgctaattcattcagcaccagcagaaatctctaatctgtcaattaaatttatttgtatttttattttttgtagaaacagggtcttgctatattgcctaagctggtctcaaactcctgtcttcaggcagtcctctgaccttggcctcccaaagtgctgggattacaggcatgagccactgtgcctggcccctagtttttattattttattttattttattttattaatttttgagacggagtttcactcttgttgtccaggctggagtgcaatggcgcgatctcagctcactgcaacctccgcctcccaggttcaagcaattctcctgcctcagcctcccaagtagctgggattacaggcacacgccaccacacctggttcatttttgtatttttagtagaaacggggtttcaccatgttgaccaggctggtcttgagctctggaccttaagtgatccacctgcctcagcctcctaaagcactgggattacaggtgtgagccaccgtgccaggctcctagtttttatttttaaagaaggggtcttgctatgttgccctggctggactcaaacttctgggctcaagaaattctcccaccttagcctcccaagtttctgggcttaattcctctttacataaacaataattaagctacctgtcctttctgtaagttggtgtttttaacctaagttgtaggattttgcaatttttttttttttttttttttgaggcagagtctcgctctgttgcccaggctggagtgcagtggtgccatttcggctcactgcaagctctgcctcctgggttcatgccattctcctgcctcagcctcctgagtagctgggactataggcacccaccaccacgcccagctaatttttgtatttttagtagagacggggtttcaccttgttagccaggatggtctcgatctcctgacctcatgatccgcccacctcagcctcccaaagtgctgggattacaagtgtgagccatcgcgcccagcctgaattttgcatttttatctcctctgtcatcgtagatctctcagatccatcatcctaggttgtcaaaatctttagattccttattttgtcttctagctcccaattccaattcatgtcatcttaaaatctaattaactcttattctacatcttcatataattttgtttttttttttaaaacaaggtcttactctgtcacccagtctggagagcagtggctaatttttgtatgttttgtagagattgggtttcaccattttgtataggctggtctcaaattcctgagctcgagcaatctgcccacctcagcctcccaaagtgttgggattacaggcgtaagccactgtgcccggccttaattaatttttgtatatgttgactgggactctgcagattgacatcagttttgatgtgtgcattatgaatacctatttcaacttgagggtactaatcgtattatcattcagcccatattttcctattggcttaaatctagatagtctatgtttatggtactaagtaatactcccaaaaaagaaattgatttgtacttttatttattttttactttttatttatttatttatttttttgagatggagtcttgctctgttgcccaggttggagtgcaatggcgtgatcttggctcactgcaacctccgcctcccaggttcaagcagttctcctgcctcagcctcccgagtagctgggactacaggtgcccgccaccacacccagctgatttttggttttgtttgtgtgttagtttgtttattttgaaacaaagtctcactctgtcgccaggctggagtgcagcggcgtgatctcagctcactgcaacctccgcctcccgggttcaagcgattctcatgcctcagcctcccaagtagctaggattacaggcacccgccaccacacccagctaatttttgtatttttagtagagacgggatttcaccatgttggccaggctggtctcaaactcctgacctcaggtgatccacccacctcagcctcccaaagtgctgggattacagccgtgagccaccacgcccggcctgtattttatttatttatttttttgagacggagtttcactcttgtcacccaggctggggtgcaatggcatgatctcagctcaccacaaactctgcctcccgggtttaagcgattctcctgcctcagcctcccgagtagctggaattacaggtgcccgccaccatgcctggctaatttttttgtatttttagtagagacagggtttcaccatgctggccaagcaggtcttgaactcctgacctcaagtgatccgcccaccttggcctcccaaattgctgggattacaggcatgatccaccgcacctggccagctaatttttatatttttagtagagacgggagattcaccatgttggccaggctggtcttgaactcctgacctcatgatctgcctgcctcggcctcccaaagtgctgggattacaggcgtgagccaccgcgcccagtcgatttttatttttaattaattaacttttttctttttgagatggggaatgcacccaggctagagtaaggtggtgggatcacagctctctgtaacctcgacctccttggttcaagtgatcctcccacctcagcttcccaagtagctgagatcacaggcatgtgccaccatgcctggataatttatttttattttttgtaaagatggggtctccttatgttgtccaggctggtctcaaactcccgggctcgagcaatcctcccacctcagcctcccatagtgttgggattaccggcatgagccaccacccccagccaagaatgattttagaatgatgtgtctagttggtgaactatgccaggtactagtgatgattacctccatgggtcagaatctggtcaggtaaacaatccataacagttaattcagtagaagaaatgtaacaaagaacgagaaaaatatgatgaaattgctaaaagtccaaaaggagatggtgaggtagcccagagataagcaacagcaggaagctggaggaacaaagggaggaggtggtgtcaccagcacctaagaagccaggctacccagtgggaactagaaccatggaagatgcacggctgctgctaaagacaaagctgaggcagaggggatggggcccgccctgggtcctccttccctgcctcccctccagtctcccactagtgcctcctgctggctgaatctaccccaaagtcacttggccagagagcctgggaagtgcagtttgcaggaagaggcagcaggattaatctgaacacagacaagtaaatgactggcatccattctagaaattagccaggtgttagattccttgctctgaagattctagaatctaccatgtttaacagcaaggcctctgattcagacagcttatgtcttggctcttgcagatgctagtagtttgatcttgagcaaagtgtcaaactgtctatttcctcaattaaaaaatgaggacaaaaaataacacctacttcctaatgtggtcaggattaaatgagataatgtatgtgaagtgcttagaaccgtgcctaacatatggtgagtcctctataaaagttagatattatcatcttaaaaactaaacatcagccaggcacggtggctcacgcctataatcccagccctttgggaggccaaggcaggaggatggcttcaggccagcagtttgagatcagcccgggcaatatatcaagacctcatctctacaaataaataaatagaaatttaaaaataaacatctgtccatttcccactactttcactatttttcatagttcctcaaagatttccaagaatatttccacagtcccattcccaaaggtacttgatcatttaggatatgatttttatgggcctgaacactgaaactcactaagctaattaaagcttaaactcattataaagacctaggtcgtcttgaatttttccctcatcttttttttttttttttttggcttgcattcaatcttgaatattaactcccagtgtctgccacagtgtcttgcacttggaaggcacttaaatatttacagaatgaaagtgtgttctgcctgggtgccatttattcctgatgatgattatgcccaacagcacaggtcttgactattttctgcaaatttcagtttattcagcattccagaccatgggttctcttccccctttcttcacccccataactcttcccatctcactaccacctttcctgcttcctttccaaactcctactccctgagatgcccattcccatgggtactccccatggctgtctggcattgttaatttatgtatctgatctctctttccaactagactgtaagctccttgaagctaaagtgaagtcttaagaattccaggcatccaaaaagaatatagccagtgctcagctgaaacttccgtgaccacttttaggacataaacattttcaatttccccaacctctttgccctgcttccttttgcatctgcctctcaccttcagggttctttttcttttcttttcttttcttttcttttaatggggtctcactctattgcccaggctggggtgcagtggtgcagtcttggctcactgcagcctcaacctcacgggctcaagcaatcctcccacctcagcctcccaagtagctgagactacagatgcacaccaccacatccagctaatttttgtattttttgtagagacggggtcgtactatgttttccaggcttgtctcagaactcctgggcttgtcatttatagttatcccaatcccaatctgcatgagattcgagagattagcttcaggatccctgaagatatcaaaaatccctggcttccaccttcacagttctattcaatcttctcattaatcttgggagcaaagagagagttagggcgtgggaccaaggtccaagtggaagaagagcctttttatggccaactctatggtatcaggcccaactaaggccctacaacaataaatgtcattaatagaaaactcttctgagtctgggtgcggtggctcacacctgtaaccccagcaatttgggaggccaatgtgggtggaccaccagaggtcaggagttcgagaccagcctggccaacatggtgaaactccgtctctaccaaaaaatacaaatattagccgggcatggtggcacgtacctgtaatcctagttacttgggaggctgaggtgggagaatcgctttaacccaggaggtggaggttgcagtgagccaagatcgtgccactggaccccagcctgagcgacagagtgagaccctgtctcaaaaaaaagcaaaaaacaatcaaacaaacaaaaaagaaaacttctggctggcttgttacagtggtgttcacaactagttgatcacaatcagttacagatttctttgttccttttccactcccactgcttatttgattagcctttaaaaataatagggccggggccgggcgcggtggctcacgcttgtaatcccagcactttgggaggccgaggcgggtggatcacgaggtcaggagatcgagaccatcctggctaacacggtgaaaccccatctctactaaaaatacaaaaaaattagccgggcctgatggcgggcgcctgtagtcccagctactcgggaggctgaggcaggagaatggcgtgaacccgggaggcggagcttgcagtgagccgagattgcgccactgcactcccgcctgggcgacggagcaagactccgctcaaaaaaataaaaaaataaaaataaaaataaaataatagggccggccaggcgcagtgcctcacacctataatcccagcaatttgggaggctgaggcaggcagatcacctaaagtcgggagttcgagaccagcctgaccaacatggagaaaccctgtctctactaaaaatacaaaaattagccaggagggcgtggtggcacatggctgtaatcccaactacttgggaggctgaggcaggagaattgcttgaacctggaaggcggaggttctggtgagctgaggtcgtgcactgcactccagtctgggcaacaagagcaaaactccatctcaaatcaaatcaaataaaaataatagggctgaatgcagtggttcatgcctgtaatctctgcactttgggaggtcaaggcaggtggatcacttgaggtaaggagttcaagaccagcctggtcaacatggcaaaaaccgtgtctctactaaaaatacaaaaattatccaggcatggtggcaggcgcctgtaatcccagctacttgggaggctgagaatcacttgagccaggaaggtggaggttacagtgagctaacattgtgccactgcactctagcctgggcagtgaagtgagactgtctcaaaaaaaaaaattaaatataaacaaataaataaataggctgagtggagtgtctcatgcctataattctagcactttgggagaccgaagcaggaggatcacttggcccaggtgttgaagaccagcctgggtaacatggtaaaccccatctccacaaaagatacaaaaattaggccaggcacagtggctcatgcctgtaatcccagcactttgggaagccgaggtggacggatcacaaggtcaggagattgagaccatcctggctaacacagtgaaaccccgtctctactaaaaatacaaaaaattagctgccatggtggcatgtgccttagtctcagatacttgggaggctgaggcaggagaatcgcttgaacccaggaggctgaggttgcagtgagccaagatcgcgccactgcactccagcctgggcgacagagcaagactccgtctcaaaaaaaaaagatatgaaaattagcccggcatggtgacacacgcctgtagtactcaggaggctgaggtgcgaagatcacctgagcccaggaggttgaggttgcaataagccaaaattgtgcaactacacaattttgtagagtgagaccctgtctcaaaaaataaattaattaaaattaaaaattaaaattgccgggcgcaatggctcacgcctgtaatcccagcactttgggtggccaaggcgggtagatcacctgaggtcaggagttcgtgaccagcctgaccaacatggtgaaaccccgtctctactaaaaacacaaaaattagcccggcgtggtggcacatgcctgtaatccaagctactcgggaggctgaggcataagaatcgcttgaacctgggaggtgaaggttgcagtgagccgagattgcgtcactaaactccagcctgggcaacaaaagtgaaactctgtctcagaaaaaacaaaacaaaacaaaacaaaacaaaaaactattttatatcatttgtagaggggagaaagtggttaagatcagaatgtgcactctgtccagagccagattccctgggttcaaaccctagcttcatggccgggcgcagtggctcacacttgttaatcccagcactttgggaggccaaggcgggcggatcacctgaggtcaggagttcgtgaccagcctgaccaacatggtgaaacctggtctctactaaaaatacaaaaattagctaggcgttgcggcgcgcacctgtaatcccagctacttgggggggagggggcgggggagctgaggtgggagaatcgcttgaacccgggaggcagaagttgcagtgagccgagatcgcaccactgcactgcagcctgagcaagactctgtctcaaatatacatataggaatagtcaatatactttattgtttagggaataatgacagggaaataaattatgtacatattcaaaacagatgcggctgggcgtggtggctcacgcctgtaatcccagcactttggggggccgaggcgggtggatcacctgaggtcaggtgttcgagaccagcctggccaacatgatgaaacccgtctctactcaaaatacaaaaattagccgggcatggtggcagcgggcgcctgtaatcccagctactcgggtggctgaggcaggagaactgcttgaacccgggaggcgcgaggtggaggttgcagtgagagatcacgccactgcactccagcctaggcgacagagcaagactccgtctcaaaaaacaaacaaacaaacaaaaaaaaacagatgcaattccactcaattcccccaaccccacccctgataatattttccatctacgatcagttaaatctgcgaatgcagaacccaagatatggagggcccactgtactagatcttgggcaaaatacttaacttttctgtgcctgcatttctcggaataccttggaaattggaagtaataatagtatgtacctcacagggttgtttagaggattaaacccgcaaatgcttgtaaagtgttaatgtatttagtatatactaaaatagttcctaagtatttagtaaagtgcttacttagatctgtgcctgaaaagtggaaaaatctaaaattgtttgctatttgttgtgtttattttttcactgaaaattctgagcttcaatattgtttattaatgttatctatcagtgccacaggaaatcggtaacctccagctcacacaaattagaaacaccttctgtgactgataataatagttgctaccagatatggagcacttcctgtatgtcagggaacttgctctccttaaatgttagcaacaaccttaagaggaagttgcactatcataagcctcattttatacctgaggagaacagagaggttaagtaatttcctggaggtcacagccagcaaatggagaaggcgtacttattcatttatttaccatttattgagttcttcctgtgtctcagcaggagagaagccctgtaggtgcaaaggtaaacagtctaggccccagcctacgggaagtttcagtttgcagagaaggggcggggcgggggcgggaatgacgaataaatagttaccgtaccgtgtggtaatagctgtaataaagtctcactccgaaaagtgctgccggatctcagaccctgggacaagaaaagtactgagagcttagggcccaaaggaaagacatcacagttatggaataagcagacgtcctttgacaaacgtgtgacaaacatatgacaaacatgtcctgtaacgacaaacgtgttacaccccaaggattaaacaaagcagggttaaatgtggaagctgaagctgcaagtcaagggcccgtctgacaagtccggcagggccgggaaaggggttaaggcgagcaagtgggtgtggcccgtgcgttgattggcaggggtgggaccgggcttgtcacccgccccggctactccaacccctgggcgggcgggggtaccgcctgggcaagggccggggcgccgggccgagccacctcttcccctcccccgcttccctgtcgcgctccgctggctggacgcgctggaggagtggagcagcacccggccggccctgggggctgacagtcggcaaagtttggcccgaagaggaagtggtctcaaaccccggcaggtggcgaccaggccagaccaggggcgctcgctgcctgcgggcgggctgtaggcgagggcgcgccccagtgccgagacccggggcttcaggagccggccccgggagagaagagtgcggcggcggacggagaaaacaactccaaagttggcgaaaggcaccgcccctactcccgggctgccgccgcctccccgcccccagccctggcatccagagtacgggtcgagcccgggccatggagcccccctggggaggcggcaccagggagcctgggcgcccggggctccgccgcgaccccatcgggtagaccacagaagctccgggacccttccggcacctctggacagcccaggatgctgttggccaccctcctcctcctcctccttggtaagaaccgaaacgataccaacccccagccttctgtcaccgggccagcagctctaactccctccagtgcggccccgcactctatcctgcctgcccattccccccagcccctgccgccagccccagcactgccggccccaacccccaggaagtcttcagctgctccgctgggccctggtcctctctccggcttcccctagatcaccccaccaaccccacaaggccctgctgccggaccttccttccatggaagtcccacgccgcagccctctcccgccccccactccctcttccgattaactgcccggaagtcccggatggctcccttgagttgctcaggtgaagaagaaaactcctaaggagtgtctcacgctcctgccctttctcgttcctcctctaggaggcgctctggcccatccagaccggattatttttccaaatcatggtgagttgagggaacctctggggctccgtgggcttgggaatgagggagcagtcgagaaggactctctgttccctgaattccatgggacctaccaaagttttagaggggagataatttagcctttatttatagataaggaagctgaggctcggtgtggaccttcatctggtagttgctatgtactattttattttttctgggaatatctatgcttgatcgtcctaaccaggatgtagtctccctgagggtagaggcagtatttcctgctcctcctggttcagtggctggcacaaagcagacgtcagaattgttcgtgatattagtatttactggtgaagctatgaagaatgtggagagaaagagcgaagctagaaggctgtaactctaggctgtgtgtgggcaggggcagatactctgctcctccttgcagagcccagacttttggaaacctcaagcctccaagcggaaggggaagggtgggatgcaaaggggctgtctactacccgtgtcctaccttcctctctccagcttgtgaggaccccccagcagtgctcttagaagtgcagggcaccttacagaggcccctggtccgggacagccgcacctcccctgccaactgcacctggctcatcctgggcagcaaggaacagactgtcaccatcaggtgagaagcagaacaagagcaagaacccattcttctcccctgccccttcccctccattggaagtcttcagggatcacttctttttttttttttttgagacggagtttcactcttgtcacccgggctggagtgcaatggcgcgatctcagctcactgcaaccaccacctcccgggttcaagtgattctcctgtcttggcctcccgagtagctgggattgcaggtgcccgccaccatgcccagctaacttttttgtatttttagtagagacagggtttcaccacgttggccaggctggtcttgaactcctcacctcaagtgatccacccgcctgggcctcccaaagtgctgggattaaaggcatgagccactgggcctggcccattcagggatcacttctctatggaatttccatccttgtcaacaggtaaagagtagaatttgatttggcctagtgtgccctaaaagtctgactttttctgggtcagactcagtgaattgaggtggagctgggctggagtggacatctagcttgagtcctgcgcatctccaaaggacagaggcccctctgcaaacggtcctcagctcagatagaactgttctgaagagtccttccattcattgcatgtcctgcctgagattcagaactactccttaatcagcttagaacatccctcagcctctctggatcttttaaacattccaagtcaccccaggctcccctgaccttggtcattgtttggggatcatattaagtacctggctgtttgcctcacatagttcattttccatgaatttacccagaaaggggtaggcaaagagagagggcaatctgtggagaggctggtggggcaaagggatcagaatgccatggagaaccaatccaggtctcacatctggcacagtggggtgggataagatggtgagttctggttaattgaactgtatggtaatcaccagttactgctggtaccatacttgggtgacagtgctacaacaactggaatgcagtgcacctcttcttaactcagtcccagaacacaagtcaatttttccaaagggctctaggatatattttatggtctcatggcgataccatgaggtattcctaccatgttaggaagatccccattgactacattgacttaaaaataatttggctgccgggcatggtggctcacgccagtaatcccagcactttgggagaccaaggcgggtggatcacctgaggccaggagttcgagaccagcctgaccaacatggtgaaaccccatctctattaaaaatacaaaattagccaggtgtggtggcgggcacctgtaatcctagctacttgggaggctgaggcaggagactcacttgaacccaagaggtggaggttgcagtgatccaagatcacaccattgcactccagcctgggtgacaagagtgaaactctgtctctaaataaataaataaataggctaactgagttttcatttggccatttagatcatggataagcagatgtttatgcttcctgggacacaaggggcctggtggcaccaggggaggagaaagccagcagcagtcaagagtatctcatgtcctgctctcctctactcccataggttccagaagctacacctggcctgtggctcagagcgcttaaccctacgctcccctctccagccactgatctccctgtgtgaggcacctcccagccctctgcagctgcccgggggcaacgtcaccatcacttacagctatgctggggccagagcacccatgggccagggcttcctgctctcctacagccaaggtaggctggacagggatgtctgaggagcaggcagtgaaagccccaggcagaaggggaggatcctgagggttctggtgcttcacagcccctctccatggtgcctctgcagattggctgatgtgcctgcaggaagagtttcagtgcctgaaccaccgctgtgtatctgctgtccagcgctgtgatggggttgatgcctgtggcgatggctctgatgaagcaggttgcagctcagaccccttccctggcctgaccccaagacccgtcccctccctgccttgcaatgtcaccttggaggacttctatggggtcttctcctctcctggatatacacacctagcctcagtctcccacccccagtcctgccattggctgctggacccccatgatggccggcggctggccgtgcgcttcacagccctggacttgggctttggagatgcagtgcatgtgtatgacggccctgggccccctgagagctcccgactactgcgtagtctcacccacttcagcaatggcaaggctgtcactgtggagacactgtctggccaggctgttgtgtcctaccacacagttgcttggagcaatggtcgtggcttcaatgccacctaccatgtgcggggctattgcttgccttgggacagaccctgtggcttaggctctggcctgggagctggcgaaggcctaggtgagcgctgctacagtgaggcacagcgctgtgacggctcatgggactgtgctgacggcacagatgaggaggactgcccaggctgcccacctggacacttcccctgtggggctgctggcacctctggtgccacagcctgctacctgcctgctgaccgctgcaactaccagactttctgtgctgatggagcagatgagagacgctgtcggcattgccagcctggcaatttccgatgccgggacgagaagtgcgtgtatgagacgtgggtgtgcgatgggcagccagactgtgcggacggcagtgatgagtgggactgctcctatgttctgccccgcaaggtcattacagctgcagtcattggcagcctagtgtgcggcctgctcctggtcatcgccctgggctgcacctgcaagctctatgccattcgcacccaggagtacaggtcagtgggagtggggctggcagtagaagagtagaccctgagggtgaggctgggctgtgcagctacaggagaccacgaaagtgcccaccttggggagaggctcccatgatcagcttgtcagttgtgtcctgtaagggacaggtccagatcctgaaagcagtttcaagggaggagggacctcagatgacctttgggaaagccatggcacagctccagctggcctggcccgggtgtggaagtgggaggactgtccaggctgaggtggtctactctggccgagaactaccagtgactgagcagtcctcattccttctagcatctttgcccccctctcccggatggaggctgagattgtgcagcagcaggcacccccttcctacgggcagctcattgcccagggtgccatcccacctgtagaagactttcctacagagaatcctaatgatgtaagtcactccccacaaccctagcacctcctggtcccagttctgctgtggccccgcccctgtaccctccttcattcagcctttggccctctgactctgaggcctcctcatttccttgcagaactcagtgctgggcaacctgcgttctctgctacagatcttacgccaggatatgactccaggaggtggcccaggtgcccgccgtcgtcagcggggccgcttgatgcgacgcctggtacgccgtctccgccgctggggcttgctccctcgaaccaacaccccggctcgggcctctgaggccagatcccaggtcacaccttctgctgctccccttgaggccctagatggtggcacaggtccagcccgtgagggcggggcagtgggtgggcaagatggggagcaggcacccccactgcccatcaaggctcccctcccatctgctagcacgtctccagcccccactactgtccctgaagccccagggccactgccctcactgcccctagagccatcactattgtctggagtggtgcaggccctgcgaggccgcctgttgcccagcctggggcccccaggaccaacccggagcccccctggaccccacacagcagtcctggccctggaagatgaggacgatgtgctactggtgccactggctgagccgggggtgtgggtagctgaggcagaggatgagccactgcttacctgaggggacctgggggctctactgaggcctctcccctgggggctctactcatagtggcacaaccttttagaggtgggtcagcctcccctccaccacttccttccctgtccctggatttcagggacttggtgggcctcccgttgaccctatgtagctgctataaagttaagtgtccctcaggcagggagagggctcacagagtctcctctgtacgtggccatggccagacaccccagtcccttcaccaccacctgctccccacgccaccaccatttgggtggctgtttttaaaaagtaaagttcttagaggatcataggtctggacactccatccttgccaaacctctacccaaaagtggccttaagcaccggaatgccaattaactagagaccctccagcccccaaggggaggatttgggcagaacctgaggttttgccatccacaatccctcctacagggcctggctcacaaaaagagtgcaacaaatgcttctattccatagctacggcattgctcagtaagttgaggtcaaaaataaaggaatcatacatctcaaaattttgcaaattagctgcgagcctgagccccgcctctgcccatctcagtctatgctcacctcatcccactcctccctgtggagccctttgcttggccctctacctcctgccctcttcctgttcatctcccaaccactgcactcttgatttttataccacacagaaggtaagaaaattctaggaaccctaaggatcaatcctctccattttcactcaaatgcctggggcccagctctgcaatgactgactccagggcctctttcctcactgccagcatagaagtcaggggagccagctgggccctgcggtcaggaaggttctcatttttggagcataccctgagcccagatcataggagcagctgtccctggtgggacacaggagtcatgactcctaccctccaccctccacacccaccaggcatttagcagtctgtcctatgcaagacagatgaattctcagccaggatacctcaaggcaggcaaaggtgagtggagggagaattcacaaacattcagggtgtgtggtgctggcatcaccatggccaaatccaagaggtcttcctggaagagggcccaaactggaaccaaaagaatgctgtcagcagttggaatagagctgtgaattctagacagggggagtgtccccagaacaagcaaacggaggagacaagagggcaagggttataggaaagaccctgggcctgagagcacaagcagcggccagagctgcagcgctggggtgggtgatggagggaatgattcgcaagcagtgttggaacccagcccctagtgagcaaagtgacagaagctgccccagagtttggaaggaagatcgaggcagaagatgtagaaggaagctgtgggggtgggagtgatgcctcaggaacaaaactgaggaattccctaacggacccagtccctggggaaagaggctcccctcaggctctccttgtctagccccacacctggcagagcctgtcacccagcctagccccacgcctggcagagcccatcacccagcctagccccacacctggtggagaggccctgttgattacaccctgtcagcctcctcaaacccagcactaattgcacaattttcctctcttctagtgagcaagagcctgaggaagtagcagagaggggtgtgggcccatgtgcagttctgggaccctggcaccttggctcagggaagacccgagctcctttcactgcagaccctctccagagactggggagagggctctggagaacctggttcttgcttactgttctccctttgggccctccttcccaaacgcaaacaatccaggatccactcagcgtcaggcccaatggaaatagtgaagcagtgattttccctcccctgcctctccatagcctggtcttttgccctctcctttgctcttctcttcccccatagccacctcaaatacctgcagcctgatatcttcatcccttcatccagaccttttctctcctagtggtattgcaaactgaaagtggacaaagacttaaggtaaacctgctcctcatggtggaatgcttccaaatgctggaaggaggactttagggcagagttcactaaggaggcttgtgcttatagatcagtgggcctgaaagaagtttctctaggttctggttgtgtgctgtacgaggtgtaggtagtaataatactcttgtcagccacagtgaagccccaagctagccgggataggggactgaccttgtacaggcagcatggagaaactaagacagagtgtcctgcccaagtgatggcactggggagcagtcactcaggtttatttccaccagggcccaagaaaaaaagaaatgaggcaacctaaaattccatcaagatagataccaatatccaaggtgcttggtcttagcggtgtgggacccacgttaaggctcttggtgggaaggtgggaggtgttttcagcatgagatagggttcaggctgtgaatcagagtctagagcctaagataaaagaagataccagggctgggccacggtggctttcgcctgtaatcctagcactttgggaggccaaggcaggcagactgcctgagctcaggagttcgagactagcctgagcaacacggtgaaaccctgtctctactaaaatacaaaaaagtagccaggtgtggcggcatgcacctgtagtcccagctactcgagaggctgaggcaggagaattgcttgaacccgggaggcggaggttgcagtgagtggagatcgcgccactgcactctagcctgggtgacagagcgagactccttctccaaaaaaaaagaaaagaagataccagaactcagtccttaagaaacaaaattctgccaggcgcagtagctcacacctgtaatcccagcactttggaggggccaaggcaggcggatcgcttgaggccaagagttcaagaacagcctgggcaacatgatgaaaccctgtctctaccaaaaatactaaaaattagccagtctcacaacctggtctcaaaataaataaatagatttaaaaaaaaaatcatgggcctgaaccaagctccagacctcactaggaggggagaaggaccccccagccacacagcccaaggctgcagaagcacctaggtggttagagagtgagtgcctggatggggcgcagtggctcacacctgtaatcccagcactttgggaggccgaggcaggcggatcacgaggtcaagagatcaagaccatcctggccaacatggtgacaccgtgtctctactaaaaatacaaaaataagctgggcatggtggtgcgtgcctgtagtcccatctactcgggaggctgaagcaggagaatcacttgaacctgggaggcaaaggttgcagtgagctgagatcgcgccactgcactccagcctggcaacagagcgagacaagactccatctcaaaaaaaaaagtgagtgcccgatgatgccagattcttcatcacctgaagtgaacccacacaacagggctgggccatgggcatcataaaccccattttgcaagctcaggaggagctttagggaaatcagaagactggcccagtctctaccaagtggtggatttagagccggcatggcttcgttccaaatctcacccttgtcccaccattccatgggacctcccattcctgagggagcctggatacgggcaagtgcacaacccgggaggttgaggttacagtgagccatgatcgcaccactgcagtccagcccgagcaatagggtgagaccctccctctgaaaaaaataaaaatactcattttggaaggaagtcattctaaaatgttacacttgtcttcagcatatctgcaatataataattttctgcataactgaggatcattcacagaaaccaatggcttttctccagcagtgtcttctgaagttgtaacagtaggggcacggggagctatttgcttttatgctaaatgaccttagaccacttataaaatgcatatgagtgctttaaatgttattttgtgtgtgtgtggtgttgcctccctgactacaaggggtcacttgctactctaaatgtgtttctaatctactagtacaggaacacacatggacacgttaaaattgtgaataaaagtaagtaaaaagtaaaagtaagtaggccatgactgaggactggagaatctacccagtgagtaaagcacaggagtattttagcagctgaggggtcctttctgctccctcaaaccctgcactgttgccctatagctgacctccaaataagtgaagtgtcactgcacattgttcccaagattattctttgcctcttccattggaagagtccactgaggatagcaatatagactgttcccaataataggagacagttggaatatttaagagaaggaaagctgcacaatgtagaaatgaaaaatccttggcactggaaagatgtgggtgggattcctggtgttcccattttccagctgcaagattgctttagggacggggcacccacctaccactgtgggccttgggctcaagaagatgaaaggagataatgcaagaaagtacttagcacagcatctggcaaaaacggggcaaggaaaggaaatcggaacgtgtgtctgggagcttaagggtgtcaggaaggaggacaagaaggaaaggggcaggagaaggaacctgaagggaaagggaactgggcagaaaaagaacggtaaaagagatgtgctatctgggcttcctacaaacaggcagacatcacccattgcgtacctgccttgcatagcccagaaggcctggcagctgcaccaaaaaaacattaacagtgggtaggggagttggggggtagctggcactcccccttccccacccacttaagattgggaacctcgtgtttgagatagctagctttgtctcacccttttttcctgctctgattatcgttagcttggtgggcctggcagggagagaaggtggaagagtctccacagtggtttgcccctacctgaacttagtggcaaaatgaagctgcccaaatgaagcagctgaatttccttcctcagagcccgcatctgcctaggggctgggaaatgagtactttcgtggctcttagcccagaagaggcagggtggagaaggaaaaggtggcagggtggctgaccctcagtccccacacctcttttggcctgcatctctttgtctttcagaccagcttttaatctttctgcctcttgcccctgtgcagccactgagcacgctctctgggctagacactgggctaggggtctggaaatacaaagacaaatgatgcgtagtcctggctgctggagaaagaccttcacctccccaggtccctgccttctgtcaccctgagctcccttacccactgacaccccctgcaacccttgtctgttctgccccttgactgttctgtcataactcaaccaagctctgcagtgtgtgtgctcccagagagaagcgacacaaagaaaagggagggggggcagaaaggagggaatcccgctgacatcactgctcattagcatgtgtgacctcatcagggggtgggacaatttccccaggtgtctaggggggagggcatgtgtgtgtgtcgggggggggggtggtatttaaagggaaaagctgacagtgctgctgagtgagggagagggtgctgcgagctgctgggctgcacacgcacacgcacacgcacacgcacactgatgcacacggacctggacacagacatggacatggacacagaaaccacagcactctgcccctctggcagccgccgggcctcccctccagggacgcccacaccaggtgagggctaacctgggcaggttccggctgaaaccatgggggtgggagctgaagctttggtggggaggtcagaactaggggttgagggagcttgagctcagtcagcaagaggagaagagcaattgagaaagtggagaagacccctgctcacacaagggattggggctgggctagggtggaggggaagagctgcctaaatgccccctcccccagcactcccagggctttgcttgagaaactggtacatggcccctagctcagcctcattcccgaggctggaacaggcaagaaggaaggggagaggaaaggggcagcccacaagcctgggaatcacaggcaggggctaccccggggaactattgtaagggttcttctggctgctggaggccctggctgctggccaagtattgatcctgggctatttccagcctccctctagccccctttgttgtgtctgttgttcctcctccagttaccctgacccacgcattgtcactctccctttcgctcacacacacacacacacacacacactatctctctctctctacttctactgctctatgaacacaatattctctcccactcacagggacagacagggatgcaggattctcacatccaaccacgcaatgagggatgctcacctacagggccacgggaagcagcagcccctctctctctctcacacacacacacagagaacccacagagacccagcacgcacatcatctcaaaaagcaaaggccctttcctaggaagaagctcactacaaagttttttactctgctatacctactccccagacactgggcagcagtttcagcttgtcatcctctctgctcctcagtttggggattaccagtgctggaaacaggaggaggaagggcctcttgatggaaaaagaggcagcttccccaaacctcccccaactccaccgtacagggccagaggcctagtctgggggtttgcctgtgtatcagtgtaaagtgtgagtgggtatgtgagcctgcattcaggtcccttccctgcatggggcacgttttgaataggttggggttgggaccgcattggagaagctatcatgtcaactccagttcaggcttctggagactttagtgtaagaggtcaggccagacattctcagttccttctgggtaatggtcatcaagtgggtgtagctgggcctctgatactggaacagcctggattgagccttctgcatatggttgagcatatcccactcatagcttccttttctttgccctcccattttattttagaagcagatgccacgctactaaagaagtcagagaaactgttggcagagttggaccggagcgggttaccctctgcccctggggcccccagacgaagaggcagtatgcctgtcccctacaagcaccagctccggcgggcccaggctgtagatgaacttgactggccacctcaggcctcatcctctggctcgtctgactccttgggctcaggggaggcagcccctgctcaaaaggatggcatcttcaaggtcatgctagtgggggagagcggcgtgggcaagagcaccctagcaggcacttttggtggtctccagggagacagtgctcacgaaccggagaacccaggtatttggggaagccctccaggggttgagggggctctggggccctggtcagggaaggaagtgctcgtgacctgagcagcccctgaaggacagagcttaacagaagctt

SEQ ID NO: 78 - DNA, 189993 bp, Homo sapiens
gaattcaacttatttcaaacaaagagtgtttctcaaagtcactgcaaaaataggtgtttctgttccttaaaaaaatctacatggttaagatcctcccacttttgacctgtgagttgtgataaaaagcttccagaaaactcatctcagtgacttgattatgaaatgctaccagtttgaagcagtcactgaaaaacataaggtcataaatcaggaatccagaagaaacaatgaatagcaactttatcttcacttcacttctaacactggctctccaaggtaacagccctatcctgtacccagagtggcccttctggagaaggtggctggtttgacctatgactgttgagtgttttacattacagggtctgggagagcagactggatcaagccccaggagacagaagtatctggaacagaagggaagactgtgaacctactttgtaactatggtacatcatcggggagctatcttgatctctgctggttttgacagtatccgagccaggcatcagaatacattctctacagagggtggggatattctggaaaaggagatgccagttttgccataggaaagtttattcaaagagtacagcaaatgcaataaatgtgtacattagaaatctggttcctgcagacactgccttatattactgagatgcacaaaaagaacactttctaggggtgtcatacaaaaacaccagcgcacaggaggaaggagagcatttgttataaccacactgatttttttttttttttttgcaaaggcgtcattgtaagtggaagacactggatcaggagaattctgctttaataatagctatatatagtaatttgtaggcaaatagcttgagcttttagagtttccatttcctgaaattagatagcaattctaatttgtaagcttttatgagacatggttttaacacttggattaagtgcctagcatgtcctacatgctcagcaaatggcaaatatcttttcttgctctccctctctgtctaactactttgacctcaaaggacccttctttcactatctgagaatcttctatatactcctactggtaaaataacaacaacaataacaataataataataataaccctaaaaacatacatgcaagacctagatagagaaggcttctttgcccagggatcaatggtcattgtgccaggattttaaaagtgtatgctcagcaaatccaacaatcagaggacaaaaggaccccgagacactagctcctgagttcatagaccagggcagttgggcatttatcgtgatctgaacaagaacaggagagagttcctcacaagactaaagagaagagaaagacatttagcattaggtgggtggtgggagagaagagagaaattcttgggaagactacagccatgttctggtgtcagatctgacctccctagatggagaagagaggccaagtgaggcagtgggtcctcagcccacctggtagaggaagagggcacctgccacttcctgcactggttcaaactacactcctaacagaatcctatcatttaatctggatgtgagcaaagcctagcatctttgtttggactggtgatagatgaaaggtaaaagaggaaggaagatttaatttagagccttattcaatagtctgcagcagcactagcaccttactgcttgcaggccggaaacctcaaggtctagcagttcacagtgaagcctgcaccacactggctgctgagtaactgccccagtcactaggagggcttggaaatcagacagcaaatgacaccttaaaaaatatgtataaggccattcttgcactgttataaagaaatacctgagactgtgtaatttataaagaaaagaggtttaattggctcatggttctgcaggttttacaggaagcatggtgctggcatctggttggcttctcagaaggccccaggaagcttataatcatggtggaaggcaaagggggagcaggcatgtcacatggccagagcaggagcaaatgagagagagtgagggggaagatgcaacacactttatttaaaccagatcttgtgagaactcactcactaaagcaaagacagcaccaagccataagggatcccacctccatgatacaaacacctccccccaggccccacctctagcactgaggaatacaattcaacatgatttggatggggacaaatatccaaactatatcattccactcttgatccctcctaagtctcatctccttctcacattgcaaaacacaatcataccttcccaatagtcctccaaagttttaacaaattccagaattaactcaaaagtcccaagtctcatctgagacaagtcaagcttttccaccaatgagtctgtaaagtcaaaaacaagttatttactcccaagatataatgtgagtatacacattgggtgaacattcccatttcgaaagggagaaattggccaaaagaaggggccacaggtctcatacaagttcaaaacccagcaaggcagccattaaatcttaaagctccaagataatctccttagactccatgtctcacatccaggacacactggttcaagaggtgggctcccaaggcgttgggcaactccacctctgtggctttgcagggtgccacccccacagcttctctcataggttgttgagtgtctggcttttccagacacagggtgcaagctgccagtggatgtactattctgggatctggaagatggtgacccctttcccacagctctactaggcagtgcttcagtgaggattctgtgtggggcctccaactcctatttcccctccacactgccctagtagaggttatttgtgggggctctccccatgcagcagtcttctgccttggcacccaggctttctcatacatcctttgaatctaggtggaggctgccaagcctctttcactcttacattgtgtgtgcctgcaggcttaacaccacatggaagctgcccagagttatggcttgcaccctccaaagtggcagcctgagatgtacctcggcccctttgggtcatagccagagtggccaggatgtggggagcagtgtcttgaggctgtgcagggcagcagagtcctggacctggcccctgaaaccattctctcctcctaggcctcaaggcctgtgatgggaggggctgctgcaaacatctctgaaatgcctttgaagccttttccccattgtcttggctatctggctgtcttttagttatgcaaatatctctggcaagcagttgctttgaggcttgcttgaattcctttcctgaaaaatctttttctttctctcccacatggctaggctacaaattttccaaacttttacactctgctttttaaaatacaagttctagctttaagccatttctttgctactgcatctgagcataggttattagaagcagccaggtcacctcttgaatgcttcactgcttagaaattgcttccaccagatatactaaattatcactctgaagttcaaacttccacaaatccctagggcaggggcacaatgcagccaagtttgttgctaaggaatagcatgggtgacattcactccaattgccaataagttcctcatttccatctgaaatttcatcagcctggccttcattgcccatatcactatcagcattttggtcacaatcatttaaccagtctctaagaggttccaaattttcgctcatcttcctgtcttctgagccctccaaatttctcagacctctgcctgttacctggttccaaagctgcttccacattttcaggtatctttatagtaatgccccacttctcagtaccaatttgctttattaggcctttcatgcaccactataaagaaatacctgaaacttggtaatttattaaaaaaaaaggtttaattggcttatggctcttcaggctttacaggaagcatggtgctggcatctggggaggcctaaggaagctttcaatcatgacagaaggcaaaaggggagcaggcatgtcacatggccagaacagacacaagacagagagagtgagggggaggagccacacacttttaaatgactagatcttgtgagaactcactcactattgcaaagacagcaccaagtcatgagggatctgccctcatgatccacatatttccccccaggccccacctccaccattggggattataattcaacataagatgtgggttgggacaaatatgcaaataatatcacaataatttcttttataaaaaagtgaaaaatacttttattagagaataattttcaaagatctgtttaaaactaacttttaaaaacaatgaactatgggaaacattcactaatgcataaaataaaatatgtaatctttttcattttcagtttgtgcaaagttattttcacaccctgctggtagcaacacaatatattggtacaatcttttacacagtgaattacttggaaagggattttgagattcattaaacagttcatgcctttgaactgtttgaaactgaatgaacacctttgatccatttctcagaatttatattaaagattgattttaagtagaaaaaaccctctaggcaagaaaatagtaaaaatttctcaaccagttagaggaatttggatggcaacttgactgaatactttacaactatttaatgagttaataatactaaaaacatagtaatgctcttgacatacagttagagaaaacatagagttcctataataaccatatgctcacactaatatcgaatgaatgaagcacatagataaaaactggaagttttgatgcaaaactgaaagtatgaaattatttagtgtatgtacttgcaatattttaatttttattttttcatggaataactgtgaacttgtgcctacaataaataacattttaaaaattctcttgactccaaatgttgtagctagtggaaaaacaaacaaacaaggatctcaaccccagctctgtgcctcagctgtttctcctttcttcaactctggggcatcaattttctggttcccttcccttaactaagtcctcttcttcattattccccaagacctgctgacagaaactctgctgaaatattatttgtgtctcaaacctatctttgatatgggcaaataaggaaaaaactattttcagttcttttctattttctctgcagtagactcagtagctagaagattgagctgattgtaccaaaaattaagaattcttcattgacatcacatgggaaaaccatctccggttttccaagaaggaagattaggtaaggctatataccttgtcattttttttaagttggaacattaaagataaagcttaagtcctctctgctcatgttttcatctgttctcttttcccagagctaaatgttgctctgggtttgtgaaaggaaattaaatcttgggaccccaaactcattgagccaaagggaaaagttaagctgcgaactgggccatgcaaacctgccttgccctttcagttcctacataagatggctacaagatgaaaagctacatgactccaccatattttgcccacaaggaaattcctagtgagctgcaagatctttaccctatagtgtctctgttaaaatttcaccttggaaggccgggtgcggtggctcatgcctgtaatcccagcactttgggaggccgaggtgggtggatcacgaggtcaggagactgagaccatcctggctaatgtggtgaaaccccatctctactggaaatacaaaaaattagccaggcatgtggtgggcgcctgtagtcccagctactcgggggctgaggcaggagaatggtgtgaacctgggaggcggagcttgcagtgagccaagatcgtgccactgcactccagcctgggcaacagagtgagactctatctcaaaaaaaacaaaaaacaaaaaaaaatttcgccttggcaatgtaaactgatagcttattatctttacaggtgcagtcaacccctgtccaccagacataaatacacatctgattgttcccctgccccattttgcctatgttatcttgtgtaaaaatgcaaattccctgcattttttctctgccccatttatctatgtcatcttatacaaaaaaaaaaaagcagattcactaagccagacaaaggcatgaataactatttttccctacccttctcttacctaaaaattgtatacttctcaatatcccaccctttcccctttaaatctggagccctcaaaatcatcttcggagaaagtcatagacctgtctcctgggcacacatccttaactttggcaaacaaacctaaaatgattgagacttgtctcaccatttttctcaattgacacgtttataatttacattttaaattctttatctttattaatatgcacatataaatgtacatactcatgggaaatataaactatgattttatggcatttttaactaaatgttacatatgatatgtttttctccacaatttcctttcattttactcaacaaaatagacttgaagactagccaggttgatagagatcatctcatttccttttaattcatgtaaagtaaatcattctatcaatatgctatatttaataatactgatagtaataatattatttctccacaaagtagacaactaaggttcagaaagattaatttgccaaggtcacataattagtaagtggcagaatgaaagacaaatcaaatcttctgactttagaaagttcttctgtctttctcatttccaacatgtttagtggcaagagaaaggttttcttcacagaaacctaatatcccaagcaaatttgtatgtaggatttctcttgaaaattacctctcacttggctctgttcttatggctattaggcaataaatactaataataaaaataaaaataacaaaaacccctctctcccatattttggaaatttttcaatgcaacacaatggtcaatgttgttcattttttccctcatttctttgtctccaaccaaagaagcatatctctattttaattactcaacagtggggaatcaaactgattgggatataaacctaggcatttgagctggcaatggctaccctctttgggtcccctccctttgtatgggtgctctgttttcactctatttcactctattaaatcttgcaactgcactcttctggtccatgcttgttatggctcgagctgagctttcgctcaccatccaccactgctgtttgccaccatcgcagacctgctgctgacttccatccctccagatctggcagggtgtctgctgtgctcctgatccagcaaggcgcccattgccactcccaattgggctaaaggcttgccattgttcctgcacagctaagtgtctggcttcatcctaatcgagctgaagagtagtcactgggttccacagttctcttccatgacccatggcttctaatagagctataacactcaccgcatggcccaagattccattccttggaatctgtgagaccaagaaccccaggtcagagaacacgaggcttgccaccatcttggaagtggcctgccgccactttggaagtggcccaccaccatcttgggagctctagaagcaaggacccccggtaacattttggtgaccatgaagggacctccaaagtagtggtaatattggaccactttcactcactattctgtcctatccttccttagaattggaggaaaatactgggcacctgtctgccagttaaaaatggttagcgtggccaccggacttaagattcaggtgtgaggctatctggggaagagctttctaacaacccccaacccttctgggttggggacgttggtctgcctggagccagctcccactttcaactttcttggggaagtggagggctgactagaggcagaaagctctcatccagaactcccagcagtagccggttgagaccatggcgcagccagaagtctctagtcaacagtcgcccatacctcctgggtcccgaccacaactttcttgaaagtgtagccccaaaattctccttacctctgaatctacttcctctgatccctgcctcctaggtactaatggttcagactttcatttcctctagcaagttgtatctccaaagggatctaaggaagctctacactgtgtccttaggcacttaggctataacccagggagtcttatccctggtgtccctcccaatttaggtatacggctctcaacatgggctgttatgtgggacacattccccaccacccttgtcagggccccaagtttgtaatggctaagagagagagacagagagaagacagagagagagagagatggagagagagagagacaaagatggagagagagacaaagagggagtcaaagagaaaaagatagaaatagaaaaagaaaagtgtgccctgttcctttaaaagccagggtaaatttaaaacctgtaattgataattgaaggtcttgtccatgaccctataacactccaatacttttttatttacactttgttgtcagtgtaaataagggcttagcccgaaagcactgaggccactgacaacctgtagctttcctatcaaaaatccttaacccagtaacccacggatgggccaaatgcattcagtcagtaccggcaactgctttgctaaaagcagaaaagtaacttttagaggaaacctcattgtgagcacacctcaccagttcagaattattctaagtcaaaaaagcaaaaaggtagcttactaactcaaaaatcttaaagtatggggctattctgttagaaaagggtaatgtaactccaacctctgataattcccttaacctagcagatttcctaacaggggatttaaatcttaattaccatacaaaggtccgaccagacctaggaagaactcccttcaggacaggatgatagatggttcctcccaagtgactgaggaaaaaaccacaatgggtattcagtaattgataaggagactcttgcggaagcagagttagaaaaattgcccaatagttggtctcctcaaatgtgcgagctgtttgcactcagccaagccttaaagtaattacagaatcaaaagactatctcaatcctgactcaaaaggttacctacaccctctctgaaatgaatttgcataagaactgttgtttatgggaatgcatcttgatggggcagctgggttgttatgaaatactcaggaaactagcccagatctaggactcacccctgagagcaaaggcaatgttgggcatgctggtaaaggaccgctagaatccagcagccaggaccactttctttgtggtcaagaaaggtgggaaaacaggtgcaggactgctacactggtaagcataactaatccgataagcagaggtccatgggtggttacgcaccctggaaaggaataagcattaggactatagaggacactctaggactaatgctcatcggaaaatgactaggggtactggcatccctatgttcttttttcagatgggaaatgttccccccaaggcagaaatgcccctaagatgtattctggagaaatgggaccaatctgaccatcagacactaagaaagaaatgacttatattcttctgcagtaccacctggccacaatatcttcttcaaggggcagaaacctggcctcctgagggaagtataaattataacaccatcttacagctagacctcttttgtagaaaagaaggcaaatggagtgaagtgccatatgtacaaactttcttttcattaagagataactcccaattatgtaaaaagtgtgatttatgccctacaggaagccctcagagtctacctcccgaccccagcaagaccccaactccttctccaactaataaggaccccccttcaacccaaatggtccaaaaggagatagacaaaggggtaaacaatgaaccaaagagtgccaatattacacgattatactcgctccaagcagtgggaggagaatttggcccagccagcgtgcatgtacctttttctctctcagatttaaagcaaattaaaatagacctaggtaaattctcagataaccctgatggctatattgatgttttacaagggttaggacaatcctttgatctgacatggagagatataatgttactgctaaatcagacactaaccccaaatgaaaaaagtgctgccataacagcagcctgagagtttggcgaactctggtatctcagtcaggtcaatgataggatgacaacagatgaaagagaatgattccccacaggccagcaggcagttcccagtgtagaccctcattaggacacagaatcagaacttggagattggtgccacagacatttgctaacttgcgtgctagaaggactaaggaaaactaggaagaagcccatgaattattcaatgatgtcccctataacacagggaaaggaagaaaatcctactgcctttctggagagactaagggaaggattgaggaagcatacctccctgtcacctgactctattaaaggccaactaatcttaaaggataagtttatcactcagtcagctgcagagattaagaaaaaacttcaaaagtatgccttaggcccagagcaaaacttagaaaccctactgaacttggcaacctcagttttttataatagagatcaggaagagcaggggaatgggacaaatgggataaaaaaaaaaaaaaaaggtgactgctttagtcgtggccctcaggcaaatggactttggaggctccagaaaagggaaaagctgagcaaattgaatgcctaacagggcttgcttctagtgtggtctacaaggacactttaaaaaagattgtccaagtagaaacaagctgcccccttgtccatgccccttatgtcaagggaatcactggaaggcccactgccccaggagatgaaggtcctctgagtcagaagccactaaccagataatccagcagcaggactgaggatgcccagggcaagcgccagcccatgccatcaccctcacagagccttgggtatgcttgaccattgagggccaggaggttcactgtctcttggacactggtatggccttctcagtcttactctcctgtcctggacaactgtccttcagatctgtcactatccgaggggtcctaggacagccagtcactagatacttctcccagccactgagttgtgactggggaactttactcttttcacatgcttttctaattatgcgtgaaagccccactcccttgttagggagagacattctagcaaaagcatgggccattatacacctgaacatagcagaaggaacacccatttgttgtcccctgcttgagaaaggaattaatcctgaagtctaagcaacagaaggacaatatagacgagcaaagaatgcccatcctgttcaagttaaactaaaggattccgcctcctttccctaccaaaggcagtacccccttagacccaaggcccaacaaggactccaaaaaactgttaaggacctaaaagcccaaggcctagtaaaaccatgcagtagcccctgcaatactccaactgtaggagtacagaaacccaacggacagtggaggttagtgcaaaatctcaggattatcaatgagactgttgttcctctatacccagctgaacctaacccttatactctgctttcccaaataccagaggaagcagagtggtatatagtcctggaccttaaggatgccttcttctgcatccctgtacatcctgattcccaattcctgtttgcctttgaagatccttcaaactcaacgtctcaactcacctggactgttttacgccaagggttcagggatagcccccatctatttggccaggcattagcccaagatttgagccaattctcatacctggacactcttgtcctttggtatgtggatgatttacttttagccacctgttcagaaaccttgtgccatcaagccacccaagtgctcttaaatttcctcaccacctgtggctacaaggtttccaaaccaaaggctcagctctgctcacagcaggttaaatacttagggctaaaattatccaaaggcttgagggccctcagtgaggaacacatccagcctatactggcttatcctcttcccaaaaccctaaagcaactaagagggttccttggcataacaggtttctaccgaatgtggattcccaggtacagcaaaataggcagatcattatatacactaattaaagaaactcagaaagccaatacccatttagtaagatggacacctgaagcagaagcagctttccaggccctaaagagggccctaacccaagccccagtgttaagcttgccaaggggcaagacttttctttatatgtcacagaaaaaacaggaatagctctaggagccatcacacaagtctgagggactagcttgcaacccgtggcatacctgagtaaagaaattgatgtagtagcaaaggattggcttcattgtttacaggtagtggtggcagtagcagtcttagtgtctgaagtggttaaaatgatacagggaagagatcttactgtgtggacatctcatgatgtgaatgccatactcactgctaaaggagacttgtggctgtcagacaaccgtttacttaaatatcaggctctattacttgaagggccagtgctgcaactgcgcacttgtgtaactcttaacccagtcacatttcttccagacaatgaagaaaagatagaacataactgccaacaagtaattgctcaaacctatgccgctcgaggggactttttagaggttcccttgactgatccccacctcaacttgtatactgatggaagttcctttgtagaaaaaggacttcaaaaagtggggtatgcagtggtcagtgataatggaatacttgaaagtaatcccctcactccaggaactagtgctcagctggcagaactaatagccctcactcgggtactagaatcaggagaaggaaaaagggtaaatatatatacagactctaagtgtgcttacctagtcctccatgcccatgcagcaatatggagagaaagggaattcctaacttccgagggaacacctatcaaacatcaggaagccattaggaaattattattggctgtacagaaacctaaagaggtggcagttttacactgccggggtcatcagaaaggaaaggaaagggaaatacaagggagccaccaagttgatattgaagtcaaaagagccacaaggctggaccctccattagaaatgcttataggaggacccctagtatggggtaatcccctccgggaagccaagccccagtactcagcaggagaaatagaatagggaacttcatgaggacatacttccctcccctccagatggctagccaccaataaaggaaaaatacttttgcctgcagctaaccaatagaaattacttaaaacccttcatcaaaccttccacttaggcattgatagcacccatgagatggccaaattattatttactggaccaggccttttcaaaactatcaagcagatagtcagggcctgtaaagtctgccaaagaaataatcccctgcactgcaggccatacatttcaatccctgtatctttaacctccttcttaaatttgtctcttccagaatcaaagctgtaaaattacaaatagttcttcaaatggagccacagatgcagtccatgactaagatccaccacagacccctggaccagcctgctagcccatgctccaatgttaatgacatcgaaggcaccccctcctgaggaaatctcaactgcacaacccctactacgccccaattcagcagaaagcagttagagtggtcatcagccaacctccccaacagcacttgggttttcctgttgagaggcgggactgagagacaggactagctggatttcctagactgactaacaatccctaagcctagctgggaaggtgaccgcttccacctttaaacacgggacttgcaacttagctcacacctgaccaatcaggtaggaaagagagctcactaaaatgctaattaggctaaaacaggaggtaaagaaacagccaatcatctatcacctgagaacacaatgggagggacaatgatcaggatataaacccaggtattcgagctggcaacggctaccctctttgggtcccctccctttgtatgggagctctgtttttactctatttcactctattaaatcttgcaactgcactcttctggtccatgtttgttacggctggagctgagctttcgctcaccatccaccactgctgtttgctgccgtcgcagacctgccgctgacttccatccctccagatccggcagggtgtctgctgtgctcctgatccagtgaggcacccgttgctactcccgatcgggctaaaggcttgccattgttcctgcatggctaagtgcctgggttcatcctaatcgagctgaacagtagtcactgggttccacagttctcttccatgacccatggcttctaatagagctataacactcaccacatggcccaagattccattccttggaatccgtgaggccaagaaccccaggtcagagaacacgaggcttaccaccatcttggaagtggcccaccgccattttggaagtggcttgccaccatcttaggagctctgggagcaaggaacccctggtaacaaaacctgatgtttgttctctactaaggaataaaacaggcatacatgtgagataactataaagagtcaggacatgatagaggtctgcacactatatcagaagccctgtttccagctctgtggctgcagcatcgcacaactccagtgctctgcctgaggctggctgtgcatgcagagctgagccctaggttttggcaggacaagacatgttttattcagggagatgagaaggcctgtcaacatgtactgccccacctgctgcggccaactgtggcctccatcttccccagtaggcagggatggactgagggaggaaagacacctgcggcacatctgaaagatgctttgggccggggacaaaaaagaagtgatagaaaccaggctgtgctttttattgctgtcaggacaattttcttaggacatgggggtttcttttttttttcttttttttttttttgagacggagtctcacactgtcgcccaggctgcagtgcagtggcgtgatctcagctaactgcaagctccacctcctgggttcacgccattctcctggcttagcctcccgagtagctgggactacaggcgcccaccaccatgcccggctaattttttgtattttttagtagagatggggtttcactgtgttagccaggatggtctcgatctcctgacctcatgatccgccaacctcggcctcccaaagtgctgggattacaggcatgagccaccgcgcccggacaggacatgggggtttctaaacaaggctcttcagtatcagctcattgtgagtcacagatcagatctgcccagttctcttttgctgttgacattgttgtttcctctgcaggattcagcagtactgaaagggttattcagtcccaacatgggatctttacacaagaaggggagcttgtgaaatgcaagtactttgcaaatagctcaacttattttctttcttgttttgggcagcattccagtgaggaaatatttcacctgatttctcagagtttaggagcatccaggaacgcaaggaataaaaaatgttctgtgaacctgcaaatagctgccaacactgtcattctcaccatttcagttatgagaccaaaagactcaggaaacagtttctgtgcactcaagacatctacagtaagaggaacaataaaagttgtagttaaaaaaaacaaaaaacaaaatactcagagcttgtaccccagactcatctgccacagggactgggagagatccacgggccctaaactgaaaaaatgtgagcctgtggacagcattcatgaagtatggacaggaaacaggtaactgttgcaagaaaaaccctctcaaactgcattcattgagcagtgctttcaatccacagtccttaaattgactttctccttcaaattttagcaggtaacaaaacagtactttattttaatctaattatttttcttttttctttaactttttatttgatatatttcaaaatataaaataatactgcttattgtaatagatgaagtaataaaaagttttataaagaaaaagttaattctcactcatctgctccctactgaagtaaataatattaataacctgataagtgtcctttcccactattctttctgcttatataaatataggcaaaaatccctcctagtggaacaaatctgtttggggttttttttgttttgttttggtttggttttctgagacggagtctcgctctgttgcccaggctggagcgcagtggcatgatcttggctcactgcaacctctgcctcctgggttcccaccattctcctgcctcagcctcccaagtagctgggactacaggtgcccgtcaccacgctcagctaattttttgtagttttagtagagacggggtttcaccgtgttagccaggatggtcttgatctcctgacctcgtgatccgcccgccttggcctcccaaagtgctgggattacaggcatgagccaccactcctggccacaaatctgttaataaatgtgtgaccaattggaatttttcctctgaatcgccttttacatctttgtccatttttcttttaggttatatatttctcacttaaaaatgcatgctagagatgtcaaaaattttttttatttctccagtctattgtttgtcttctgattttgtttatagcacgtagcatggtatcctttgcctctaaatatactctaaactgtatatagttaaatatgcctgtcttctttatatcttctgcatttctaccatacttaaaaatagtacaggtttatataaatattcccagattcttagacaacagttttatcattttgctttttacaataaaatctttcaaccatctggaaactgtttttatatatgaaatctattttccactattgaaatgtctttgtcatattttatgtttcttaaacataatcaaattatatacatccatattaagaactttaccagtatccaaacattacagaataatgtaagaatcacagtggaactgggtgctggtgaaaataatcactgaattctccagtgccagtttgaaaggagaaattattagccattccactggggtgagaaaggccaatgagtttgactgatgttaaccaaagagagattaaaggatggactaaaagtataaaggggtgacatcttggggaaatgcaagtcttgtgcagagagaggaagatgtttaacttatcctactcaactcctttcctatatgaccggaggtgcctagtccagcttccacccactccactaagttgaggaatagctatcatcacatgtctggaagataatcagcttctgaactggcagagcgtctctggttcttgtggcaaagacataaaatgtgggagaaagtagagaaaaagaaagtgtggtagcctgcattcccaccttttattgaggcaatttttcatgtactagtggttttaatgaatctgtataggtctgaaccaacttgaacctgaacctaccctgcctccaaacagctgtcacttaggggaaggctctagcacaggaggctgtggattgacccatgtgtgaactggaggaggaggaggaggttgagcttgagaacgatcaccactccaggaaatcacgcagatgaagggccctgtagccccctgaagaaaacactagcacaccgttgtgagaaagcacacatttggatttctgccaccaagagggaatccatggccaggaagagataagaaccaacaggaaggagaaggaacctctccatcagaaccctgagaaattcacataaggaaacagcatctgagcaaccaagaagacaaggcccctcagcccaggagaggctgaaaagagagtcctttatttctcccaccactctgcccaacagctgagggttgacatggggtgaagtctgaaagaatagcacatctacctgtcagtggagctcccagagtcttcctgctgggtgtgggtggagggtagagctttgactctaaaatactaattaagttcaaaatgaatacacacatagttggaacaaaactgctttagtaactaaaagagaaaggataacctgtttcccagtggaaaagagatgattgataagtgaaaaaaaaatgaaaacaatttcacactcacatttatctcatgacttgaaatgctctagtcagcacagtaatatctggatctctttgggtattttctattaaatgttccgcttattggcttaatccttcacttatatcatattgttttgtttagagtagtttagagtaagtttttatgtcataaaaaaactgatcttaatattccttttcaagaatgcagttgaaagttcctagatatttgttctctcttatgcatttcatcttgttcaaacaaatggcattctgactgtaactactttggaaagtttaacattttaggacattatatttttccacaaaagaaaaatccatctatttaggtcttattttaaaagtaaattttgcatgtttgtttgtttcttacataccttccactttctttttttttgagacaggatcttgctctgcagcctaggctggagtgcagtggtacaatcatggctcactgcagcacagacctcccaggctcaaatgatcctcccacttcagcctctaaagtagctgggattataggcatccaccatgcctgactaattttgttttttagagatggcgtctcactgtgttgcccaggctggtcttgaactcctggcctcaagcaattctcctgccttgaccttccaaagtgcagggattacaggtgtgagccactgcacctggccagatttctgcttttcttattaaatcaattgctaaatattgtatcatctgtgttgcattattactgaaatttttcttcatttagagaaatttattccatataaggaaaaattactaatttttaatatttgcttaatagccaacaatttttgttacttgttgatttttagcagtactatgaccaaagtggcacatgtacatgtttattttttaaattcctgaatagtacagaaaagtctgtattacaaatctggtttcttatttctctccaactttcaatccttgtccataaatatttacacttttaagtctggatcttctagcagtgagctccatatttctaaataatatgttttaactacttcttgcaacatacattttattcttttattttatttacttatttttttagatggagtctcacactgtcaccctggctggagtgcaatggcatgatctgggctcactgcaatctctgcctccggggttcaagcgattctcctgtctcagcctcccgagtagctgggattataggcatgtgccaccacatccagctaatttttgtacttttagtagagacggggtttctcctcgatggccaggtttgtctcgaactcctagccccaactgatccacccgccttggctgcccagagtgttgggattacaggcatgagccaacgtgcctggctgcaacatgaattataggtgttacctgttgactttcgttttgttttttaaatagacttaattttttaaagcaattttaggttcacggaaaaattaagcagaaagtagagagtttcccatatacttccaggcctcacatatccacaggctcccatgctatggacatcttccaccagagtgataacatttgttccactgatgaagctacattgacgtattattattacccacagtccatagattacattagggttctctagtggtgttgtacgttacatgggtctggacaaatatataatgacgtgtagccgccattacagtctcatacaggttgtttcactgccccaaaatcctctgtgctctgcccgttcactcctccctccccccagctcctgacaaccactgatcttgttactgtttccatggtgttgactattccaaaatgtcatatacttagagtcataacagtatatagcctttttagattggcgtctttcacttagcaataggcatttcagatttttccatgtgtttcatggcttgatacctcatgtcttttgagtgctaaataatattctgttgtctggatgtaccacagtttatttacctattgaaggacatcttggccacttccaagtttgggcaattatgaaggaagctgctataaattcatgcacattttgaactcatttgcttaaataagaaagagcataatttctggatcatatgcaaagaatatgtttagctttgtgagaaactgccagttttcttccaaaatggctgtaccattttgcattcccaccagcaaggaaggagaattcctgttgctccacaccctcactggcatttggtatcgtccgtgttttggatttttgccattctatctggtgtggagaggtcgctcattgttgtaatttgcaattccctagtgacatttgcatggagggtatcttttcatgtgcttatttgtcatttatgtacatttttaatacgtttcactttgggggtcatttagccttcacctggcaaaacaaacaaatgaaaatttacacataattctgtgaattaatttttaaaaacttcataaacctcacctttatccacttttattcttacttatatttacctagtcagacttttcagaactttttccaagttgtcagaacatatttaaaataataaaattaaaataggaggaatttttgcctgtcacctttgctcttctctcttttccctcatccactcccacaccttttcttctttagtttccttccccaaccattccaaacactcattatgcccaagcctctttggacacttcgatcaaaattttctcctctatatcatccggaggaaatgcaccgtttgctcagggacacttagctcacctgcttcccacgttttctctcggtctccacttgtgtctggactgagtgttgctgaccaccacagcatcaaagagcctgtgagaccactggatgcagtctgggggtcagtgacctcagaggaaataccttcagtgtcccacgggctctgcaggtcagtgcactcagagtgagcttcctcacactttgctggggaaagtgtccagtagcttcaataatctcatgaccaaaagactgaagagaggggagaagacatccgagttcacattttcaggcaatagtagctgacatttcctgaatgatccttgtgtgtcaggcaccttaggtccgttcatgacttaccacatgtttctgtatgacagcaccatggggaagcttctgtaattaattcctattggataggttgctgctgatggaagtggggtctccaaatcctctatcccagagtctgtgctgttctgcagactgaatatgctttctccccaccccttcctcaggctttggcaaaggagacctctgaaaaatggcacttagtatattattgacttttgttttttaattggcttttggactaatgaggtcagtataatgtgtgaaaccaaactagaaggcagtgctggtaagtttgttgagtctctgacaaatatttggattctgagcaattcaaacatccaggcaactttaaaaggtcttcttcctctgagactcatagtgacttatacaaataaaaataaaagattagtaataatagtagttcatcaaacactgcatttacttatattttctcaaatactattttcttttttttgaggcagagtcactctgttgcccaggctggattgcagtgatgcaatcttgactcactgcaacctctgcctcttgggttcaagcgattctcctgcctcaatctcctgagtagctgggattataggcatctgccaccaggcctggctaatttttgtatttttagtagagacagggtttcaccctgttgtccaggctggtcttgaactcctgtgatcacccacctcggcctcccaaagtgctcaagtgatcacccacctcggcctcccaaagtgctgggatttcaggtgtgagccaccatgcccagcttcgaatactattttctaccataccatttaaatgtcattcaaatttaatattttcaacaaattttgaaagaaggcaatcaggcaaatttcatctcagtcaaataatccctaaagttacacatgctgtggctgtacctttctcaactttgtttcccttcatccagttaagacttggttgtgcagagttaggggctccgcaggtgatgacatgatcaaaggccctgacccttgtcacaagagtactcactaagaataaaagtgtttgacatcctctcagcaactctgatgtgtaatcccaccagcaattagtgtttttctttctccgcgttgattacagatagtttgcttttccctgtatgactgcaaaggtgtgtatatttgaatgtatgtctgtatgttgtttgggttgcagggaaggaaggagtagaaaaaggaataagaggtggctgtgattggctggtcgctctgaatgcaaataactctatgcttttcacctttagtgaatatataaatgtctcaggataggagcgataataaataatgccaaagatcttccttagtggtcctgtggcttcattgaaggcatacattgaaatgtttctagccaggtgcagtggcttacacctgtaatcccagcactttgggaggccgaggcaggtggatcacaaggtcaggagttcaagaccagcctggccaagatggtgaaaccccaactctactaaaaatacaaaaaattagccgggcaaggtggcacgtgcctgtaattccagatactccagaggctgagacagagaattgcttaaacctggagaggcggaggttgcagtgagccgagatcgtgccactgcactccagcctgggtgacagagcgagactccgtctcaaaaaaaaaaaaagaaagaaagaaagaaagaaatgtttctgaacaggggaaaagccaaatgcaatgggcattcccgaaagactgaagaaagaatacgtgcaagttgattcttctggggtttccaggaaagttgggaaaagaaaatgaatcatttaaaaagtggagagctgatgcctggccctctgtacttgtttctctcagggaagaaaggcagcagaaagtagagcagtgtcccagtccacacgtgtccagggaagagaggcttctatttttaactgcagttacacaagactgttggcttttatgtttcagacgcagtgctgtgaaagaccatgtccttgtagttttcattatttcagaggtaaaatggaaagcaggagtaagagccccaatcattaagaacacggcttagctctctgcagatcacagactcagccaccaactcctgccctgtaaccatggagatgcccccacttcagtctgtacacaaccccacaagaggaaccacttactcgcttccttttctaatcagcatgaaataatatttttcataattattatctgaggcttttctatttcctcctctctatctactttgacaacataaaaatatattagggcctggtcgtggtggctcacacctgcaatcccatcactttaggaggctgaggtgggaggatcacttgagcccaggaggtcgaggctgcagtgagtcatgatcatgccaatgcactcagcctgggcaacagagtgagaccctgtctcaaaaatatatatatatacacatatgtattaggcattatgctgtacacaaagagcttattatctaatacacatgataatatctgtcactagatgtaagctttatagagataccaatttttttatccaataaccactaaccaaacaatgatcaaataaataaatggcaggttatatgtataccgatgtgtaaaggcaaatttatggccaatggttaaaatttactgaaaacaaatttcagctcgctataaaaaagaactagcaatcagagttttcccaaaaagaaacagacagctttaaggcataaaatattcctttctacaggaaatattcaaagaaaagtagaatgcccatttccagtgatgttgcagaattacaaaatgatatgattttgtgcaaaactaaaacatgtaagttttgtatgggggaaaatagcatcgaagaacagaacaaccaaacagcttgtaaaatgcatcgtgaataaaaaaagctacttccagcttaatggaaattggattttggatttgtatttgaagcatgtgtaggatttaaaatgagagagatggtaagagaatacatgccaggcaggataatcttatcaagggcaatgatcaagaaataacagagagaaaggtttaggaaattagaagtttccaaatatgactgaaagaaccaatttttattggaaaatgctgtgagataagagggaatcttggcttgagacaattgttagtgtaagaggactgcacacagcccagaactgggtttctttccagacaaagagaaaatggtatgagattatccatccttaccataaacaacattaaggaatatcttgaaattgtttttcagaaagagctaatattaacctaaatttaaactgttaaataacatcaaagatttactttacaagcacatttctaaatgtactgaaaaactatatttccataataattgattcaatggacagataaatttccttttccctgagtagttctatcatcaactaatagcccttattgcaggaaacgaaaaatctaaacacttttccgaaagtgtcgcgattccccgatcactttccagcgtgaattttcttaggggtgaggatgggaacactaatagtttctctgcactcaggaacctcataaaggacaaactttcaaatcaaataatacagaccaaataaataaaacagagctacatcttgctttgctttacacttcgttctcttccttgtctgtctgcaaaaacctttgcatgattttcattgaaaataactcctgaattgatgcgagattttacttaccctgggacctacccaggcctggtttagatatgttcccatagtcttccctgctcttccgggtactgagttaccataaggataaaccaggcagacagttcttagacattagggctaatttctaatttacccccctgtgtctttcttttatcatcacaaacatgtttggtgtctaatttggtttactcttaggaaaggatggtttggagtacataaaacagaatggttcctcaggcagcaatatgctacagttttagagatcttgtagctctatttttctattaattgatgcaggttttgagaatcaacaagcacattaaaaatagacatcaacactatagtaaaattaaaacagttattctgtcttttgttgttgtttccacattattcagaaagagaaaagtactctttaaaattagaaatggagaacaacaaggaagagaaatctattttgttgaaaaacagcttttggtaatattattcagtgaaagatgaagtgacagacgtggaaacttctagtcaaagtttgcagcttttatttgcattgaatatctatccaagatgaatcatcctagaaaagcagccagtggacttggaataatctcgctcaccatggtttctgccaaggaaggatttctttggcgcagaatgttgggtatttatttggggtcttgaatgggtgaaagagacaaagaacaatttacgagaaagaaaggagaagaaggaatggatccatggacagaaaagatttgtcctcaagggtacatccaagatttgctttaatctgtcatataatggaaatttgaaacagttattagcacaggttcacagcttctcaaaactaaaaaccattgtggaaaagaggctaagcacaaagatgtaagcactaaatgagtataactgctttgcagacagtttcatgtcagtggacatgtgccatttttcttctttttttttttttttctgcccagtgcagctgccacatattattcaatgcacaactttacagggcatcattcacatcttagtaagacatggagaaagacaatgctgagataaagaaaagcagatttccgagagcatcatcagagcctacaaattcagctctgcctggagctgcaaaagtcaaaatattctttttggggatcaagccagcatgaattgagattctgtcatttacagccaatggattcataattctcatagccaaaagggagagggatacttttggttctctgctattttatgagctgaatttatggtccacagaagcattttctactcaaaataactagagttatgtaaagacaaataatcattggtctactctcattatgggaaataagagccataataaccctatgtgtgttttatgaatttcaaatgggaaaaattttgaaaactactaaaaattcataactctacattataaacataagaactcttactttttctatttttactttttaatttccacttttgttactatttttacttattttccttgtttacatttttgcacatgaggaaatcatattgtaagaataattttatgaaattttattctcatttttagaattaaaaatgccttggatttatagtttgaattggctactatttcacaccgtagatatacaatactttataattttcctgattggggatatttttattatttatttccaatttttattattttaaatagcattgtggtaaacatctttaaatatacattttattttatttatatatatatttttattatactttaagttctagggtacatgtgcacacgtgcaggtttgttacatatgtgtacatgtgccatgttgttgtgatgcacccattaactcatcatttacattaggtatatctcctaatgctatccctcccccctccccccaccccacaacaggccgtggtgtgtgaacttccccttcctgtgtccaagtgttctcattgttcaattcccacctatgagtgagaacatgcggtctttgggttttttgtccttgtgatagtttgctgagaatgatggtttccagcttcatccatgctacaaaggacatgaactcatcattttttatggctgcatagtattccatggtgtatatgtgccacattttcttaatccagtctatcattgacggacatttgggttggttccaagtctttgctattgtgaatagtgccacaataaacatacgtgtgcatgtgtctttatagcagcatgatttataatcctttgggtacctacccagtaataggatggctgggtcaaatggtgttgctagttctagatccctgaggagttgccacactgtcttccacaatggttgaactagtttacagtcccaccaacagtgtaaaagtgttcctatttctccacatcctctccagcatctattgtttcctgactttttaatgatcgccattctaactggtgtgagatggcatctcattgtggttttcatttgcatttctctgatggccagtgatgattagcatttaattttcatgtgtctgttggctgcatgaatgtcttcttttgagaagtgtctgttcatatccttcgcccactttttgatggggttctttgtttttttcttgtaaatttgtttgagttctttgtagattctggatattagccctttgtcagatgagtagattgcaaaaattttctccaattctgtaggttgcctgttcactctgatggtagtttcttttgctgtgcagaagctcttgagtttaattagatcccatttgtcaattttggcttttgttgtcattgcttttggtgttttagacatgaagtccttgctcatgcctatgtcctgaatagtattgcctaggttttcttctagggtttttatgattttaggtctaacatttaagtctttaatccatcttgaattaatttttgtataaggtgtaaggaagggatccagtttcagctttctacatatggctagccagttttcccagcaccatttattaaatagggaatcatttccccattgcttgtttttgtcaggtttgtcaaagatcagatggttgtagatgtgtggtattatttctgagggctctgttctgttcaattggtctatatctctgttttggtaccagtaccatgctgttttggttactgtagccttgtagtatagtttgaatacaggtagaatgatgcctccagctttgttcttttggtttaggattgacttggcaatgtgggctcttttttggttccatatgaactttaaagtagagttttccaattctgtgaagaaagtcattggtagcttgatggagatggcattaaatctataaattaccttgggcagtatggccattttcatgatattgattattcctatccatgagcatggaatgttcttccatttgtttgtatcctcttttatttccttgagcagtggtttgtagttctccttgcagaggtccttcacatcccttataagttggattcctaggtattttattctctttgaagcaattgtgaatgggagttcactcatgatttggttctctgtttgtctgttattggtgtataggaatgcttgtgatttttgcacattgattttgtatcctgagactttgctgaagttgcttatgagcttaaggagattttgggctgagacaatggggttttctagatatacaatcatgtcatctgcaaacagggacaatttgactttcccttttcctaattgaataccctttatttctttctcctgcctgattgtcctggccagaacttccaacactatgttgaataggaatggtgagagagggcatccctgtcttgtgccagttttcaaagggaatgcttccagtttttgcccattcagtatgatattggctgtgggtttgtcatagatagctcttattattttgagatatgtcccattgatacctaatttattgagagtttttagcatgaagggttgttgaattttgtcaaaggccttttcggcatctattgaggtagtcattggtttttgtctttggttctgtttatatgttggattatgtttaatgatttgcgtatattgaaccagccttgcatcccagggatgaagcccacttgatcatggtgcataagctttcggatgtgctgctggattcggtttgccagtattttattgaggatttttgcattgatgttcatcagggatattggactaagattctcttttttttgttgtgtctctgccaggctttggtatcaggatgatgctggcctcataaaatgagttagtgaggattccctctttttctatttattggaatagcttcagaaggaatggtacaagttcctccttgtacctctggtagaattcggctgtgaatcatctcgtcctggacttttttcggttggtaagctattaattattgcctcaatttcggagcctgttattggtctattcagggattcaacttcttcctggtttagtcttgggagggtgtatgtgtcgaggaatttaaccatttcttctagattttctagtttatttgcgtagaggtgtttataatattctctgatggtagtttgtatttctgtgggatcggtggtgagatcccctttatcattttttattgcgtctatttgattcttctctcttttcttctttattagtcttgctagtggtctatccattttgttgatcttttcaaaaaaccagctcctggattcgttcattttttgaagggttttttgtgtctctatctccttcagttctgctctgatcttagttacttcttgccttctgctagcttttgaatgtgttttcccttgcttctctagttcttttaattgtgatgtcagggtgtcaattttaaatctttcctgctttctcttgtgggcatttagtgctataaatttccctctacacactgctttaaatgtgtcccagagattctggtatgttgtgtctttgttctcgttggtttcaaagaacatctttatttctgccttcatttcattatgtacccagtagtcattcaggagcaggttgttcagtttccatgtagctgagcagtttggaatgagtttcttaatcctgagttctagtttgattgctctgtggcctaagagaaagtttgttataatttctgttcttttacatttgctgaggagtgctttacttccaactatgtggtcaattttggaataagtgcaatgtgttgctgagaagaatgtatattctgttgatttggggtggagagttctgtagatatcaattaggtctgcttggtgcagagctgaattcagttcctggatatcattgttaactttctgtctcattgatctgtctattgttgacagtggggtgttaaagtctcccattattattgtgtgggagtctaagtctctttgtaggtctctaaggacttgctttatgaatctgggtgctcctgtattgggtgcatatatatttaggataggagaattgatccctttaccattatgtaatggccatctttgtctcttttgatctttgttggtttaaagtctgttttatcggagactaggattgcaacccctgcctttttttgttttccatttacttggtagatcttcctccatccctttattttgagcctatgtgtgtctctgcacgtgacatgggtttcctgaatacagcatactgatgggtcttgtctctttgtccaatttggcagtctatgtcttttaattggagcatttagcccatttacatttaaggttaatattgttatgtgtgaatttgatcctgtcattatgatgttagctggttattttgctcgttagttgatgcagtttcttcctagcatcaatggtctttacaatttggcatgtttttgccacggctggtgctggttgttcctttccctgtttagtgcttccttcaggagctcttttagggcaggcctggtggtgacaaaatctttcagcatttgcttgtctgtaaaggattttatttctccttcacttatgaagcttagtttggctgaatatgaaattctgggttgaaaattcttttctttaagaatgttgaatattggcccctactctcttctggcttgtagagtttctgccgagagatccactgttagtctgatgggcttccctctgtgggtaacccgacctttttctctggctgcccttaacattttttccttcatttcaactttggtgaatctgacagttatgtgtcttgtccactccagaccctgtttgcctgggtatcagcagcagaggctgcagaacagtgaatattgctgaacagcaaatgttgctgcctgatcattcctctggaagtttcatctcagagggatacctggccgtgtgaggtgtcagtctgcccctactggggtttgcctcccagttaggctacttggggtcagggacccacttgaggaggcagtctgtccattctcagatctcaaactctgtgctgggagaaccactattctcttcaaagctgtcagacagggacatttaagtctgcagaggtttctgctgccttttgttcagctaggccctgcctcccaaggtggagtctacagaggcaggcaggcctccttgaccttcggtgggctccacccagttcgagcttcccggctactttgtttacctactcaagcctcagcaatggtgggtgcccttcccccagcctcgctgccgccttgcagttccatctcagactgctgtgctggcaatgagcgaggctccgtgggtgtgggtccctccaagccaggcacaggatataacctcctggtatgccctttgctaagaccattggaaaagtgcagtattagggtggaagtgtcccgattttccaggtgccatctgacacagctttgcttggctaggaaagggaatttgctgacctcttgcacttcccggatgaggcgatgcctcgccctgcttcacctcatgctcagtgcgctgcacctactgtcctgcacccactgtccaacaagccccagtgagatgaacccagtacctcagctggaaatgcagaaatcacccatcttccgcgtcgctcatgctgggatctgtagactggagctgttcctatttggccatcttggatccacccctaaatatacattttaatttaactttttatcgtttcattaagacagcatcctcgaactggaattagtggttcaatgggcaaaacagctttatagcctgttggttccttgtctgtcttaatagcataacaccttttaaaagctttctaaattccttatctctactccctaacccctttcttactcaaaacccagtccaggcagatttttatccctatccttgtatcagaatcactttgttaaggtcacaatgggtttcatagcctcaaatccaatgatccattaccatgttttatcttactgaatttctcagaataatttgacaatttggttattctctccttgaaacattatctttgcttgagtttggggattccacactttcctggtttgctttcaacctcacaagccactccttttctagctcaccttcctcttgctgacctctagatactgtgttgtctcaggactcagtcctcaaacatatatgccgtctacatgcactctctaagtgatttcatccaggaatatggctttaattaccatccatacattgatgactcccaggtttatacctccatccaacccctctctgttgaaagccaggctcatatatactataatctatataacatctttgccagatgtctgtctggcatctaaaatctaagatatccacaacataccttattccctcccttacgctcatccctcactcttccccatctcaagaaaacagtgatataattcacccactcgctatagccaaaaatactggaatcttctttaattcttctctttcccccataccccacattgtcaacaaactggccacataagatgtgttttctgtcagaaaaaaaagcctgacttcattttttaattcaaataagaatgttacatgatgggttccaatgacaacccagtcatttcataattctaattctaaagtaggtagatgaatatggtaaggaaccttgcattgtggctgtcgccagttgaaatatattcctgttttgcaatatttcttgcttagcttttaagggctctcccgcagattccagaagctaataaattgtctctttatttggcagcttgggaattttttttttagcaccctggaccaatgcaccattccggatggttgagatatatactttttctttaaggggtaggaggtaagggtgatgttggaaagagaaatgggaaagaagcagcagcttaacatttggaccctgaagcatgttctagagcaggctggttttaagaaagtcctcatttgcctcaaggtacgtgaccccagtttaatgactataggcctaaatgggacaggatcacaatcacatttgtcaccagcagactcatatctaggaggcatacaagttattcctgttagaacagtgacttactggaaagtcatttcccaccactgatttgagtcgctgttattatcgtacatgaatttccatatacaattaggccatattacagatttgctattccatttaactaacctgtctgcctacccttaattttcacttaagaattttctttctctttcttttcacttctgtgcaatagaaaatatactcttttcttctacattttcttctgttttttttgttttggcataagaatgacaggaattttttaaatgtttaattgtagccaatcctttgctagtggtctttgtcctcttttaggttttctgatgtacagtcattttatctacttacatgcagatgatgttttatctcttcctttccaattcttatgcttcttattgtttctctgggctgactgcattagcaagtagcttcaacacaatcttagatagcagtagtggtaatgaacatctttttccttcacctactttaataggaaagcctctagcactttcccataagttggtgctggtttgggattacggtgtatgcaagttttatgtgatatgttaaagaattagttattagtttttatttttcaatgttttaacatgaatctgtgttgtattttgtcaaattccttttctgcatcaataaagataatcatatgattttttttcttggctcttgtatcagttattaagctactaactcttacctacaattgcttagctcctatacctcgcttctagagtagtaactgctgatgtcaatcatacactggcccctagagctagttgactttttaggtgtgtttttcttctctctccaactggataattagcatattctattttgtacattttattaaatgtctccacagggttaagtgaatttgttgaggtagtgacactcaacatttattgtttacctgccacaacccctgtccatcattgctcagtaaaatcgttaatcatctatagctagacatatacctgctagtacctacctagaatgttgaaatcacatacctgagataagagagaagaaaaattccaaggagaactctcatgtaaatgctacttcctccaagcatctaaaacagctcctctattctttctaggaaaaaaaatcccttctttgaggacattcctggtaagtatcctcataaatagaaaaaaaattttacaaagagaactaaagttttgctagcatttctgtggtttcagacttaatgtgatgtggggatgctctgattgggaaaaagaaagatcataaggtttctagggaagtgtaccagtttacaaatagccagattctccagtgaccacctcatgtgtctattgtttttttctcaagcagaaatgtgaaaacaggagaaggtagagtccagtcttacccaaaccctgcatgtccaggagaaagctaactctagtctaagctacaaaaaacgaaaaaaaaaaaaattctccttgttttacataatttcatacacaaaaaagaatggaagagtaatatccacaattaacatcaaagatcctcttattcttcatagactcagtgtagaggctcagacacttatgtcatgaccacagaaagaaatgaaggaagaaaagaatgaggatagatttgctagggccagggctttacccaagaaatatagctgagaaaatgtgggagggtaataggtaggcacctatgctccacaggatgagacctggatgcaaagaacagatgagagctttcttccctatcctctcctcatcttgagtccctagtcattgctgcaagtacaggaaaccataaaacagagtttcagaaaactaatatgtaaaacatgagaaattaccagtgtgcacaggtgcccagagctaaatataaagcacttggatatttgcaaaagcactagcatgctcagagttagccagttactagactgctttctcacacctgaaaacatcctaaaagaaaggatactacattttcctcctttgtctttttaacgagaatttggaaaaggtctaactcttttaacttatttaaagctgctgagattgagacatataatacagctctggtagaaaaataatcaattaagggaaataatcagatcttctctcaacctattcctacccccctcagaatgtactacagtgccatagaggcaaaaagcctgcataattctttaaaggtgaggggagtgagggagtttcaggtgtaaaggattttcagacagtcataactggagaaactttccttttaacactgtttgctttctttcttttttgtttgctcctcacctctctgtatgttccgtctacctttcatttcaacataacgagttactttatattaagggggaaatgaaaaaacaatttttttgagttcagaccacctgggggcagtgcttcctttgacagaggcactgccagaaactagaacaaggggaagggaacagcaggaggagggcattcaatgatgtgtgtgatgtaacagtgaggttttgattatccgtaaaaacaatgaagattccccaaaggctacccaaccaacagaaccagaagactctagaacagtgaactaggcccagtgaacacggccaaatctaggtctccaaactgaatccacagaggctccaggaaaaggaaagaatggaaactccactgagcactctgctgctgctcctctgtgtgcagctgacctgtgagtcaggcgagtcatgaggaggggaggaatcaagtaggggcggccagggcattgaaatttagaaagatcccggggacaatcttgggtctagtctcaggaatgtaaaacaaataatgaaactgatgaacaaacacactatatatatgaaaatgtttcattcctcctaagcagggtcaaatggacaactgccagtggaacagaatgctccttccctgaaagtcaaggaaggtgacagcgtcacactgaactgcagttacagagacagcccttcagatttcttcagtggttcaggcaggatcctgaggaaggcctcatttccctgatacaaatgctatcaactgtgagagagaagatcagtggaagattcacagccaggcttaaaaaaggagaccagcacatttccctgcacatacaggattcccagctccatgactcaaccacattcttctgcgcagcaagcacacagtgcccacagtcacctgcacccggtacctaaagcttgctgaggggcctgggcacacctccttttataagggccctggggcactgactataactctgctgcatacaaagggaaatatgagggactgttttataacataatatcaaacatttcatttgaagaccatgtgaggaaggatagtgttttcaaataccatctaaagtactttgtttctcagtgtgaggcccttcctttgtgaaaactagcccaaaaactagaggctaaatatcaaaaaggagagagcactaaagaacaaagaaagaacagggtaaaattcttgtctttgagcttctttgtagacttttacaaagatatagaaaatacaaaatcttgaaagccatgaccatcaaattcagtagtgaaaggaaaaatattttgacatgccaaaaagattggcttagaagatcaagtaccaaaatctgagggaaaattgtacaaagcatttaaaggaaaagagaacacaacatggtagaaaagctgtcttctccttaaaagggataaaatgccaaccagctagctagaaaggaagtcaatgatgtgaggagaggtcataaacagtgagtccagcatcctgctcttttctagggtcagagctctgagcaggtagggtgggaggagggtgagtcacatttagcaatgactctgaactgaaggaacagtgaattttggaaaaaactgttttgatcattgtgtcttatatcaatactcacaagaaaacgcccattacagaggaagcattcaacaaccatgtggacaagacggtcggtccaaagcatgtcagccagccagagaatgtctgtgcttgtcaatttcttgaacaatagacccatgaatagattagctgaggtgacagattgagtttctttataagcccagaagcatgggttttctcccaccaagacagattcagctacttctgctgctgtcacaggacttttccttagttcaaagacagggttcttttcccatgggcacgaaaattcaggctcgcaaacaatttgaatggtgagtaagacacggttttattgggtgaagaggaagaaaagggggaaacagggactcttacaaggccagagtccctgctagagcacttcccaccccgcagttcgaatcccaggttccacacaggaagaggaggagcctggctcctccccactgcaaaggatgccaacttctgcggctccaccccagtgcacaggctgcttggaatttctctagggaccccctcccacctggctgtctcactaccaaatgtccaccctgtcagcagtaaatacaacactgagccttcgatgtggaatcatccttcaaaggaaccagccacacactagttggcaagttgattacattggaccacttccaacctggaggtattaggaattttttttcttcttaatacatattctgggtgtgaatctgtggtctcctccaaagtgccacacatagttgcatgaactgatggctcagagtgtctcattgatcattctgatcatcaaaggatttcacatcccttgcatcaacagacccactttatatcaagggcgtgtgacagtagtcatgtcatatagcatatagcttcatcatacagcattagccatgaaccactagcctgatagaactttggaatgaccacttaagggcccagctaaagcaccagcttagggacagcaccctgaggggctgaaaagctattctttgagatagtgttgtgtccctgttacataaaatacatggacctgggtagcaagggatggaagtaggactatcaccccatcaaccaccactttcagtaacccacttttgtgcttcctgttcttataactataggttctgctggactagggattctgtttccctttgagggggaaaagggaggatgctgcttctacgagggaaataggtttttaccaaacccaagataatatatactacctcataatttggggatcttcatgccagtcctggaggccaagaaaggagttactactgtcatggacaagttgatcctgattatcatgaagctaaaccccatagcggaactggggatatatgtctacaactcagggaattcactgtgatgacttttagcactttcatgtcagtgattatcgtaaataggcaactgtagcaactacagcctgacaagagcagactaaccaggggcttatacccctcggtgatgaaggtctaggttacctccctggaaaagaaatctagagcagtagaaaaaaatgctagccgaaggtggggagaatcaagaataagtagtatagaaggtagatggaggagataataaatatgagttgcagtcatgcaactaactataacaaacgtaacttgtcccagtaaccctcttgttgtcaaaacaacatcaacaacaaaaactagtgatctatatgaatttaacacacagcacaagtggatctgagcaaggcaaggagtgaactgtatagatactgttggttccctacctatatctcctaggcagtcacgccaacatgctggacaccactcgctgaaaatcccagcaaccctgaagatgactttgactttctggccatgaatgtggaggctgtggaggacaagccagaaatgcaaaagagttaatgccccaaaagcagttcttaatcagtgatagacagggagtttaggcatgattactccagtttcttcatgactcatttggcatagctccaaagagtatgctatgctgtctcttagagttattgtgacaggtagttagacaggcatgaatggggcacaagagagctctcccctccacccaccaggagtcatcaggcgattgttcggcagttatcacattacctctctaaaaatgataattggcagcaaattatcactggcaacttccccaacagataaagacacttaagattggtaatcagcttccaataaaatctcaggaattggtgagtgaacccagcatgtacattaagagacaaaacagcagagtatgaccttctgtgggcactccaccagaaaaaggaagaaagcctcagatgtgcatgagtacaacttcctaaacacactgctcatgcccacgtcccaagcaggaaggagggcactgcacatgcgggcagcccatcctaagggaagaatcatgggaaaggggcacaagatgctggaggtaggtcagtgtataaaatcttaggattaaggttaaaggctgcacttgtccttccagttgtccgcttgggtctcttccaagtgtactttcctttctctcctgctctaaagctttttaataaaattccactcctgttctgaaatttgccttggtctttcattctgccttatttccctcagtcaaattctttctgctaaagagacaagaattgaggttgctgcagacccatatggattcaccaccagtaactcagaaccttctacctctaacattatccagctgcagaaagctgcaattgcccatcgtggtaactgccttgatggcacattctgtattggcttccttccttccctgatttacctcttacccatgttttgccaacaaaaaagagttaaactctgtaaaatagttaaagaggttgattctgagccaaatatgagtgaccatggcccatgacacagccctcaggaggttccgagaacatgtgcccaaggtggtcgcagtgcagcttggcttatacattttagggaggcatgggacttcaatcaaatacatttaaaaaatacattggtttgatccaggaaggtgggacaactcaaagcaaggggcaagggggtcagtgggagtgaggagcttccagcttataagtagatttaatatttttctggttgacaattggttgagtttatctaaagacctggaattaataggaaacgtctgtattgcgataagaggttataaagaccagagtttgatcaggcagatgaagcttccaagtagcaggtttcagagagaatggattgtaaatgcttcttatcagacttcaggtctgtgttgatgttaatgccagagaggtatgatgaagcatgtctgacccccacttcccattctggcctgaaccaatctctcaagttgaattttaagagagccctggccaagaaggaagtccactcagatggttgcggggggctggggggccttagaattttatttttgatctacagtttcctagaatcacctataataaactatttacacacaaattattgtgtcgaagctgacttttagggatccaaaaccaagatacaggaattcaaatcatgagacaagggtgaagattatccagaagaaatgttggtgccccttctcttattgctaccaagctgagctttgcagcacaagggattttagcagtctcattcaggatgggccccagtgcttacaaactccttaagcatctctctgagaggggacactcagccacctacctctgtgacagagaactcatgctcctcacacagcacccagtacataacagggcccccattcataatgcccagtttggggaccccaactcaggaattacataaggatccctgatgctccctctggaaatgcaaaattctaaagaatcagagtaaggtatttaaaaagagtttttttcacaatattttttcaaaatggaatgaaaatgataagagcaattcttgatataaatataaattaagctgaggcaatttagtgctgatgagaacttctgcaatagttatttcagagcttcttgatatagcataaacaaggtggttttgtttatttgtttgtttgcgtttgttttttgagatggagtttcactcttgtcgcccaggctggagtgtggtggcacaaactcagctcactgcaacctttgcctctcaggttcaagcgattctctgacctcagcctcctaagtagctgggattacaggcatgtactaccatgcccagctaatttttgtatttttaatagagatggagtttaaccatgttgcccgggatggtctcgaactcctgacctcaagtgatctgcccacctcggcctcccaaagtgctgggattacaggtgtgagccaccatgcctggccaacaagattatttttttaatccatgtaaaatgtgaacacaattacacactacatattctgcttttacttatctctgaatttagtcgatgctcttttcagccacaagcatatatcttttttctcattctttattttgagaaattataaaaatgtaaaaaaattgaatataaataggcatattcttatcactcaaaattaagtgtccttatttcataagatttgctttgtaattttttttaataagaagaaaaataaaatcacagtttgccatttgttgtgaatggagtcagaggcttctgctcaccattctggatcacgctctcctctccaagattaggtcgtattaaaaacaaatttgccagctccattttctctttatttttcttctaggctaactaaaagcactccagaaacattttttattttcatttgaaattataaccagaggcctattttctgagagaccaaaaagtattcagaaatgtttccctccttgaaacctagtcacccacccacctatcatagcatttcctgccctgaaggagaattctcaccaagcacagaggagaacccatcagagcaggagacttttcactctgcaggggagcgctgtcagcatgacacgagttagcttgctgtgggcagtcgtggtctccacctgtcttggtaaggaagatgtggttctttctttataaaggcatctaatggggctgtgaagcaggagggattaacagaacagcaactgcattgcctcttagagcccagctacctggaggcagaaatatgctgcctgaggctagaatcacaaagaaaggtgtgtgggaatggggaatgggaatcagcttgtgagtctgtttctcactcacacgtgatatcccagtgaagtcctttctctcctattttccacagaatccggcatggcccagacagtcactcagtctcaaccagagatgtctgtgcaggaggcagagactgtgaccctgagttgcacatatgacaccagtgagaataattattatttgttctggtacaagcagcctcccagcaggcagatgattctcgttattcgccaagaagcttataagcaacagaatgcaacggagaatcgtttctctgtgaacttccagaaagcagccaaatccttcagtctcaagatctcagactcacagctgggggacactgcgatgtatttctgtgctttcatgaagcacacaatgagatgagcagcagggagaggcttacagaaacctcagacctcagcatctgtgcaaaggtcacagggtgagagggaagtggtagggtaataggtatagaaaatcattgacttctcttggaaatgaaagcttctcctatttcttctcctgtaagaaactcagagagatggctgtctgcaagcttcaatccttaaagttacataaagataatgacgtgtgcagtgcattccagttttacaaggtgccttcactaaggtacttattacaggtcagatttcctaagcattttctctgtccagaaaatttttataatttgcctgggcattcttacctccaggaattttaaaccttttccatttgttaattgttgcttgtccttttatttgtccatctggtccaaaactgcatctcctccgaataaggtacccattttagaacacaacaggtgtgacaacggtggcataaccacgaaggggacttgctgggcccaccagactcaagagatgacctaggtccactgcagtagaacctagaagaatgatgaaaaggctttaaaatgctccgctgaagggccagctcgtgggcaacacctcagtggttggaatgctatgcttcagaaaatgataatattcgttaaaccactggctgattcatggtgtcgtggcaaaagtttagaaaccaagaaatagacatagaatagagtcttctcctatcactccctataagtcattttcagaattcgtgtttccctttcccacaaccctaggttctgctagattagaggtcctagttcccaaagaaggatgctcccttcggggattcagtaacctgcagctatggctgccacttttaggtcactctgaactctctgtgccaatagcccagcaggcaaagagaggagctattagaccagaaggggtcattgaccctgactgtcatggagcaccaggttgttgtgacacaaggagggtgaggaggaatgtggctataatgtaagtatttcacattggtgtctcctgatgtttccgtgcccaatacaaacagcaagcggcagttcttgtagcagcaaggcctgaaaagggcaacgtgaccaagaactgagactcttcagcaatgaagttttcaagaacagaagctcatgtcatgcaaccttcctgtattaagggcgttgaagagattgcagtcagaggcaaccttgaagacacagtgacacagtggaaataatatagggcaagcatgcatctgagtagtgcaaagaaaggactgtaactgatatatgcgccctgttgccccatccgaatgtctgtctgattttagctggagttatagtagacaatcacactcacgtcatgctggtaacatccagcgttaagcacactctgtgttttgttatgttatgttttgttttgttttgttgctttctatcccaaagtcttctctaatgtctcaggagatcccttagtttaagggcaagcacagcctgaaattatagggaaactaccacccctgttggcaaacaccaaccaatggggaaaaagagccagggaataaacgcactagctttgcgtcccttaaatagacaattctgagcggcaacctgtgtgcttcttgggagatcctaccagaaccgagtcccacttgagtcagttattgctcgacccactttcttcttttataacttatttttatagatcaagggagtacaagtgccacttttgatacatggatatattgtgtagtggtgaagtatgggttttcagtgtaaccatcacctgaatagtgtacattgtactcattaggtacttttcattcctcattctcctcccacactcccaccttttcaagtctcaatgtctgttatctttgtccatgtctatgcattatttagctcccatttataagtaagaaatgtagtatttgaatttctgtttctgagttacttcacttaagataatggcctccagttccatccatgttgctataaaagacatgagtttattctttttatggctgagtagtattccatggtgtgtgtgtgtgacattttctttatttaatcatccatccattgatggacacttaggttgattccatatcttttctattgtgaatagtgctgtgataaacataacagtgaagttatatttttgatataataatttctttttgtgggggtagatacccagtagtgagatgctgggttgaagagtagttctatttttagttctttgagaaatccctatactgttttccacacaggttgtactgatttacattcccaccaacagtgtatatgtgttaccaaacatctgttgttttctgacttcttattaatagccattctaactgatgtgagatggtatctcattgtgcttttaatttgcatttatctgatgattagtcgtgttgagcattttctcatgtttgctgaccatttgtacgtcttctttgagaaatgtctgttcatgtcctttgcacacttttcaatgggcttatttgtttcttgcttgttgagttgtgtgagttccttgtagattctggatattagtcctttgttggatgcatggtttgcaaatgttttctctcattctgtaggttgtctctttactctcttgattatatattgtgtggtacagaagctatttagtttaattaagtcccattagtctattttttgtttcgttgcatttgttttaagatctcagtcataaattctttgcctaagccaagatccagaagagtttttcccaggttttcttacagaatttttatagtttcaggttttatatttaagtctttaatccatcttgactttatagtaagagaaatggatccagtttcattcttctgtgtatggctaactaattttcccagcactatttattgaatagggtgtcctttccccagtgtatgtctttgtctactttgtcaaagatcagttagttgtaggtatgtggctttatttctgggttccatattctgttccattgatctgtgtgtctatttttcatacaagtaccatgctatattgatactatagccttgtagtatcatttgaagtcaggtgatatgatgcatcaagatttttctctttgcttaggattgctttggcattcaggctgtttttttgtttcatattgattttagcattttttcctaattctgtgaaaagtaatattggtattttgataggcattgcattgaatctacatattgctttgggcaatatggtcattttaataatattgctttttccagtttataagcatgagaggttttttcatttatttgggttatccacaatttctttcatcagtgttttgtagttttcctagtagagatcgtttacctttttgtttaagtgtatttctaggtattattttgtggctattataaatgggattatttattttgtggctattataaatttagtttgtagcttggttgttactgatgtatagaaatattactgatttcatacattgattttgtatcttgaaactttactgaattcacttatcaaatctgggagtcttttggaggagccttgagggttttccaggtataagacatatcatcagcaaacagatagttggactttttcttttccagtttggatgccttttatttctttctcttaccaattgctctggctaggacttctagcactattttgaataaaagtggtgagagtgggtatcctgctttacccattttctcactcctgcttcctgagatcacttcctaaataaactacctgcacccaaggtagtttcaggctctgtcttggggggaaatcaaactaatacagggaatctttggaaatccaaagattctttgaaaatttaacaaagaaagaacagaggagagttcaaggtgaaccttactgggctaagctaataaaggtaagtgtgtacttgagtgagaaattgtaaaaaaaagatgatgaggcagatcgcatttactaaactccaatctctgcagatatgtgattacgtcttttcagtgttcaaaaactttactttccaagtttaagctctttcaactgtctctcatttccccttcccaaatcttctgaccctttactatttaaacttcattcctagttattcccaaaatacgtctctcttctagtcagtttattccccttactggctcataaggacttaaagctcattgctggctctagcatttctctactggttgctccacccacccaaatttcccttttgtgtatatttcagactgcttaaaccatattaatcttataatgaccaccagaaatctctcttccctctaagatttcttctctaataatcaaacaatcctttaattccttctcttccaaatgtcatacagtaccaactgtggaccaaacaatccgactcttactgacataccttcctaagacatttgctgttgtttcaaggtactcatctttcctccccaaatacattatattctctatgtagatagagtttgccttgtacccttcacaattcctcactgctcttagcacagtactaagcacataataagtgctgataaggcacaaatatgcttaaggtttaaattataatcatgctatatttctgaaagaatatgaaggaaaagaaacaggtttctctgaggaggtaagatgtgatagaaggtagaatttaagaaagcagtgataaaggaaaggacagatacatttcaaacatccaagtcttttgatttagtggaaacataaatctgaaactggtaaaaagattacttttagaatacatttcttactaaaccaagttctttccatacagaaaatcctagaaactgcctctgtaattatctctttgatctgaagagggcactgtttgctcctgttgatagcagttacttacaaaaaaccgatctcattttgaagaatccgctattcctaatacatacaaaataactagaacaaatcctatgttatccgtagagtctaggtcagatttccacattctggaatcaagttttccaccaattaaaaaggtcaaaccatggaggagcttttaggaactgtatttgtgatctggtggctttggcctgggtgagagctgagtgaattcatttcatcagggacacagaggactcagaaggttctgagaactagtctctatattttacagaagggattcaaagaataaataaaacatttaatttaccctttatttaatttacccttaattcatcttttttaagaaaatttgctatcaaatgaaggaagaggaatgctcttctgaccatctgtccagagagacacaaccaatctctgttctccagagagacagagccaataggatgaatatatagatatatgagaggggatttattagaagaattggctcatgcaattatggaggctgaggagtcccatgacagactgtctgcaagctggagaacctgggatgctggtagtagtgtgactagtccaaatccaaaagcctgagaacccagggggccactggcataaatcctacagtccataggccagagatcccagagttcttgtgtctaagggcaagagaaaaagagtgtatcccagctccaggcaagagaaagaccaagttgcttttcctaggtttctgttctatccaggcctctagcagattggatgcccacactgaagatggatcttccccatgtattccactaagactcacaagccaatgtcctctagaaacaccctcataaacacacccaaaaataatgctttaccagttctctaggtattccttaattccgtcaagttgacgcctaaaattaactatcacaccatccatgaaggaaagatgttttgtcatctactataattatttgaacaatgtttcagatccatgggacagaatgaaaaagatctagaataaatctgatgtctttgtttctgttcttgttaactagggttttgtagtgcaggggaagataagcagcctccttcagtgctagtaccagctccctctccctgaaccacaagaccacccagtcgagggacttagccatctatgtctgtgctgcagggaacctacatgcccctgaaagcacctaaatgcaccaccccctccaccctgcattgggacctccactcaggggttagtaaaccatcttcatcacctcctctgaccaaaagaatattgtaaatgaatgtaacaaatcagagaaaatcttttctaaaagacttttagaaagctttttgttcactgtattatcagataaggaattcagagtcatgagaaccctgatcatgagctgtctgaggtgattaggaccagggaccctgagtgttctttcgtcaagacccactcatctaagaggggctgtctcaatgattggagcggcttctcccacttgtgccattaattgctggtatgcctcagtttttgcatctgtaaaaattctcccacgagaacctgagagtaggcgtgtgatactcacatatttttctcctagtttttactttttatagtctaactagctaactccagtaagaaatcccatgatggtagttgccagatagggttgatatcccaagggagcacagtaaaatttctcagactgcccagaaggggttctgcttccacaaaaaagcagccgtctgcccaccccacccgtatttgcccacttgcaagttcttttatatacatcgctttatttggtcttcaatgttcaataatttgattaactgtggaagttggaactgattgaatgataaatacaagatactaaagttctgattgcataggtcccagaggatcacaaaaaagatctaaagtggcaagatctatctatggccacaccaccccaaatgtgcccaatctcatctaaaatggcaagatccattcagcattgcagcactggaatccccagtcagcattgcagttgcaggcccagtgagcccaggcaagaggcggaaaacatttactcttgagaccctaattagtgaactcatagatagctgcagctggcctgagactgggagagaagacagcccaatcgtctggagcttcctatacagactagagagtggtggcacatgcctgtagtcccagctactcggaaagctgtggtgggagcatcacttgagcccaggaggttgaggttgcataattgcgccactgcactccaacctgggtgacagagtgagaccctgtctcaaaagaaaaaaaaagagaggagaagggggtaaattgtaaaataatagcatatttgccaatttcctgtgaatttgtccagaaaatagtaggtagtgcagaaatttaacaccacgcaaacaagaaaagtagaccacctatggaagaaactcaacatgctgtactttaagaagtcctccggagttaagaacggctgtggcaaaatgcccactgttagcaccatttccaagtggaaataataaatgggaagggagagttaagaccaccactccctatacggcaagtcagcttttaatttagtcttttattctccttcttgttttacagggggaaaagtttacataaagctgaactatacagaagccttatctaagattggatgacacaaattaaatagggagagaaaattaatgcaaatgaaactagtagttctctgtattgtgagttttcatttttgctctgttgcctcttctataaaatgcagactaattcctgacctttcctccctcaaagaagaatgtgtgcatgaggaaaaaatcagatgccaatgaaaagctgtcagatgtgcaacacagaatgttcccaaatgaattttatgttgattgttctgagtcttctttcacaaagtcattaacagaagctcacaaaagcccttgccaccagtattgtagagctccttgacacagccaaaatcaggtattctttttttaaaaaagaaagtcttcagcaaattacagtataattagatatcaaaagtctggtttcaattttctctagactatctgaatgttattgttgttgtcattatttttcatcatttctcaaagtattaaaatacaatttggtcaaacaataatataaccaatacctgtattatcataacccagagataattttctgatattggcttcaagacagaggagggaaagaaaaaaaggaaagaaggaaggaagaaaaaaaaaaggaaaaaagaggagtaaggggaagggaaagagaaggaaagacgggaaggaaagagagagaaagagagagagaaaggaaagacaataaaagcttatagagaaaactgaagtcacagcattagcttggcctgtcttttccccacccatctcattctcctatccaaattatgtctttaaaaaacaatgtatcagctccctttcctcttcatgtttattcccaaataaattacagttccaacaacatcttttttcgttaaatattatggtccaagttttattctctgaagcaaaagacaaaaagtatcgaagagctttccctaagggagacatcataaacagcccacctgacatcccatttcctgttctgaagcagctacggcaccagtgcagctgatactcaaggttcagatcagaagaggaggcttctcaccctgcagcagggacctgtgagcatggcatgccctggcttcctgtgggcacttgtgatctccacctgtcttggtaaggaaggcgcatgtattcaccttaactagtattcaatagaacagagaagtgggaagaaagattaatagtgcaagaatctaatctcttcactgggcccagctattaggggcaagaaagctgatggattttgtcagaggtttggatcaagaggaagaaaggcgggtggcaatgggaacaggcttgtgagtctgtttctgtctctcacatggtatcccagtgaagtcctttctctcctctttcccacagaatttagcatggctcagacagtcactcagtctcaaccagagatgtctgtgcaggaggcagagaccgtgaccctgagctgcacatatgacaccagtgagagtgattattatttattctggtacaagcagcctcccagcaggcagatgattctcgttattcgccaagaagcttataagcaacagaatgcaacagagaatcgtttctctgtgaacttccagaaagcagccaaatccttcagtctcaagatctcagactcacagctgggggatgccgcgatgtatttctgtgcttataggagcgcacagtgagacaagcaacagggagaggcttacagaaacctcagacctcagcatctgtgcaaaggtcagggggaagtgttcagggttataggaacataaagaggaaataattgtcttccctaaagaaaaaaaaatgtatctgactataggaaacacagaggggatgtctataagctgtaatttttgaaatagtaataaaataatgaatccacacatgccttatagattttcaaagtaccttcacatgttaatccattaaacctgcataagcctgtgtgttacataggtcagatcagatattctaaggatcactgctatccagagaatcttagagcttgacctaaagctatattcttttagaattatatatttttgctttattattttaattactatctatctgtacatcccatgatcatatcaaagtcaatatatccaaaactgaatttcttaccatctccacaaacctttattttttcttcatttttttctcctcagccttgctcaagattcaggaacacaataaaagtttgctattgctgggtttccagtttggggaatttcttcaccctcgactttccagcctgggctatcagatttttatgcataccttattacattctaattataaaatggtgcaaaaaaaaacactacatcatgtcagtctcactgtttcccctctatccgtcattctttctgactttaacctggcttaatcctgtatttcttaacgttctttaaagcatcatttgtcttgacataagaaagtaaggaaagaaagcaaacgactgtcaagtaggatttcatgtactgctagtactcaccagcaaacgctaaaaaaaaaaaaaaaagaggaagttaacttctggtaatgctataattgcttctggtaaggcaacctagcaggtggtgacaattttgataaacctggtccaacagggagaccaagcagctgccatggtccaagtctccacccctatgtcttctgagaattgggagatgcctggaccgtgagaggattctcccttatgctaagggaaaaattaaaataaatgaaaaaaataatgccaacatttctttttatgcccacaattcccccaatacatctccttcactattaagccccttgtggagcattttattccatctgctcactgtgggtggcgagaggaagtttggaatgacaaacagccgaaataattaagtccaataagcaggctccagagcttaggctgggggtctgtttggaatgagtggtgagagtgactggatgtggaagagggtaaggggaggccaagaccaaactgcagaatcataattcagattgccgagtcatttcccaaacacagcagcttcagtaacgccacaccctagcccagcttagcacccaggcttctgcttgtctgaaaaagtggggtaggcaccaatcaaaatgaaaacctttctctcacacgaggaagacaccttcaggctattcaggttttgtcctcccttttacccctgaggcccatgagtcacccagacttagattcgggctagttaccaagtttcatatcaaagctcacttctttctatccttgcttctagtgctttcacgcagctcctctcatttgaattaataaataatcattaatctactctctctaccttcgattgtgtcctcttttaatatggtttagctgtgtccccactcatatctcaacttgaattgtatctcccagaattcccacatgttgtgggagggaaccagggggaggtaatggaaacatgggggctggtctttcccatgctattctcatgatagtgaattaagtctcacaagatctgataggtttattgtgggtttctgcttttgcttcttcctcatttttctcttgccgccgccatgtaagaaatgcctttcacctcccaccatgattctgaggcctccccagccatgtgtaactctaagtccaattaaacctctttttcttcccagtctcaggtatgtctttattggcagggtgaaaacagactaaaatacacccttcaaacattgcttcacatagctgtcccagtgagcatcctataataaaaatcagatcatgtacacacacctctgcctcaataaagcctcatttcccacagaaaggcccagtgattatttagaatataagtccatcaaagcggaggccaccactgtatctccagcacttaccatgcctaacagggtaaatggtcagggtcatctactgatggattaattagtctgtaccctgcttagcaactcagcctcatttgttgccatattcccatccccccaaactgtacacgcccatccgctcagcaaatgaaattgtttcctgcatctatgcctttgccagcattgtcccctcagcatggaatgcccatccccaattaaccacttgcctattatttgaaaggttcgcaaacctcccctcttctctgaatccttgtcctgacccttttgcactggtagaactgatcactttctcctttatctcctaactgaaaccctaagcatatttctaacgtggcaaatccaacaccttatggtgtttacaggtatttttcactgtctccccactaaaatgcaaactgttagttaccaaggacacagttttacccatttcaatagcaactgtgcctccaacaatctttaattcacagaaatgattcttaagttttttgaatgaaggtaattaattgatgggcattttcctcattaaacattatagagtaaaaatggataaattttctattttgttatctcctccatagttgtgttaactcagaattctgagctaactcataggactgtaaggcatgtcaaaaattaatagtaacaacagtatcatgctgataataaaaatattagtagtagctaacaattattgagtatatatatatatatatatatgcgccccatattctgagaggtgcatgacatgctttatttcatttagtagtcccaacaaatccatgctgtagctactattgatatcccagttttatatgaagaattaatataggttcaaagaggccaaaatgcctagaatcacacaatgtacgactccctgaccactggcctttttcccttcccaaagggtggcaaactgctatagcatctcagtcttattaatgtaatagacacatagaacataagaaagaaattcatgaaaacagtgctgcaccatacatgcacttgtagtcctcactttttctagagtagtaattgcaagatgagacttatttcaagtatccttattaatagaagttaaatgtaaaaataacactattaccattattgtttacataggaaatttttgcctttttaacattagtttataattatttgacctgggactatacaatattttaaacttcttcagtgcatttttcaatagcgtttaagtttaaaatgcagtctttggcaggggcattaataaatgtttcaaatgtcattttgtataactctttaaagaatacaagagtttagaagaaatttctaacctttccaagttatctgaatttccaagttatcataggaagatccttcctttgtaacttttaaaacttttttgtatatggttgggcgtttctatgaatgatgcttttcaattttttttgcttcagtgaaaaattatatattgtgaaagctttcccacataaacaagcagtttttctatagcatgagtttcccatggctacaagatattgtatttttgaaatacacctcattttacccaataacttgaggttttttttgttttttttttttgtttttttttttttcagatggagtctcactctgtcacccaggctggagcacagtggtgcaatctcagctcactgcaacctcccacagccaggttcaggtgattctccttcctcagcctcccaagtagcagggattacaggtgcgcaccaccatgcacagctaatttttgtatttttagtgggggtttcctcatgttggccaggctggtctcagactgctgacctcaagtgatccgcccacctcggcctcctaaagtgctgggtttgcaggcgtgagcctctgtgcccggcctaacttgagttattgatcgagtaaatcaatgaatacagtaagcatgataagtacattgtttccaaattggagctataataagtaaaactgtaattttaaaaagatacttgtacataaaatagtatgcaagtaagagagagcccagatcaaagtaaccgaagcaaaacaaaacaaaacaaaaatctgttggctaataaaactgaaaaatctgggttaactactttaggaaggactgaccaaatgctcaaataatgtcaccacagcgtgtctctatcgtttggctcttgtttatattggctttactctgaagaaagctcaggcccacatgatggcaaagatggccgccaggagcctcagacttgtgtcctactgtgttagtttcctcctgctgctgtaacaaattatcacaaacatggtggcttgaacaatattactttattatcctacagtttgggagctcataagtctcactgcactaacacaaaggtgttggcagggctgtgttccttctataggctctaggggagactgagtgaaatcctgagcatccctggcttctagaggctgctgcgtgccttggctcatggccctcttccatcttcaaaactagaaatcgcagcactgtgacctctaccaccattgtctcatctcctgtcaccctcatggccctcctgagccttgatccttgagattacattgagatcccccacatattccagaataatcttcccatcttaagattcttggtgaatcccattttctaaatcacattttcaaggacatttgccacataaagtaacatattcacaggttctgaggataggtggtggacattcctatagactgaatgtttgcgtcctctcaaaatttgtatgttgaagtcctaatccccaaggtcatggtattaagtggtaggacctctgaaaggtgattaggtcatgagggtggagttctcatgagtgagattagtgcttttataaaagaggccccagagagctgccttgctctttccaccgtgtgagagcacagcaagaaggtaccatctatgaaccaggaaatggccctcaccagacactgagtctgctgctatcttgatcttagatttcccagccttaattgtcagaaataaatgttggttgttaaagccacccagtctatggcatttggagtataactgccccagtggatgagagagacatctttggaaagctacttctctccttaccatacctgccaaattaacaactccagcagaagaaacaggcttcttttgtgatatttccagaaaatatcctggactgactttgcttagactgatttcttcagatttgggaaacaggcagaggtggttcctcaaggcaaagccaagatgctactagaagaggaatgaataaggatacgtaaaaataacagatgaccccaatgctattaatttatttcaaactcctttttgccatcagaaagcagtaataagctcacatatcaattccaataaaataattttttaaatcgcccaaacttacatttcaacatagcaagcaaaaagcaatgaataaaattgcttcaccaaaatatagaagctctgttgaccagaaattcagcatagacagttgttcaagataatttcaatgtgttcagcagataaagggacaaataaggactctttaagggcaaatttagctgagggatgtgttaaattgtatatttggcagactgaaactaaagaataaaaaaagagacagcttgatataactttctatgccaaacccaatgttatactctaaatctaaaactccagaaaaagtttgaaagcaacaaatatgaagtcaggaaaatcattctaaattaccaactatttaggtataatcttgagcattttagctgtagatgaaagtcctatttattcatatagattctcatatgctatgaataatagttcatttggatgtctctttaaatcaaggagggataaagacaggaaggaagaaagctggcaggcaataagagccaaagtaaagatattattttgattaaaatatactcattgttgaggtatccacaaatatttgagaacacattgaagaagtaagacaggtcagaaaatataagtatatgatcagcacttagtgaaaacagttaaagagaaagaaagagcaaaagaaaaattgcttaaagcaacatagatattcaaagataaggaattaaagctgagataaatgtgacagaaatggaaaggaaggaaaatgaagttatgaaacattggcaaaaatagctaaagaatgcagaataaaatgtcctagaaaacatttatcaaagggttatattttattagcattcagtagtcacaaggcaagaaatatgatagctataaataaatacatgagaatgtttaaggttttatgatgatcgtggctttactgttcaatatatattaaataaaccacaagttatctataacacagttctgaataaaatttaggaaacgtagagtcaggtacctcaatatagaaaaatacagaaataattaaccataatgcagacaaagtgacacccagttgtagagagcattacaagcattgaaatattcagaatattatttgattaaaaaaaagctcatgtaaagataccctaagcaataccaaagatacacacacacaaacacacacacacacacacacacacgacacatacatgctatatataggaaggaagaaagcttctttattggggacacagtttacatattacctcttgtttctatgagatgctataagaaaaaatctcttaagatttactacatgggtaatatatttatatagtgtctgtgtgtatgtatagcaaactcttatatatatatatggatatcttacagtcttatagacttatatgagagtgacagtaaaagagagagagagagaggagtgtatacctatttcctctcaaaaaggccatattctggcaactcccttattccccattccctactatgcagtttgatctagccttagatttcccaggaggttctcttccagaaaagtgcctgtagctataaaataatcttcatcttggctgtttcaatgcaggattcctattgagccaataccttaccattttctttccttcgtggaactgtgctttgtcataatgcaataagttttctatgaagtatatcataaacaacagtcctacagaattcatcattggacataatatagcttctttattggggacacagtttacatattacctcatgttctatgagatgctataagaaaaatttctcttaagatttcctacatggataatttgtacctacacttgtagtttgtttttatcatatggatgaggtaattatcacaggactgattgttttccttctttacattgactgctaataagttcagagccaatgttagcttaactccaactatagaggctgattgcatatattttaattccaaatctaattcaaggtttatgttcctgcccttatttttttcttcttgatttttgtatttctttgctgttgtttttgtagatttttctgtgccttatacttttttcaaagataattaaaacagtgtgtgaattcagtggggtggatgaatgaatgaggcagagaaaaaggaaattgacatggtaggataacaaactcacataatatgtagatacatataaaaagacacacaaagaaaaaaatttctctaatatatctaatcttctttatgaatgatcccatctaccaaatagtcaagaaacttaaattttgtaaattgcaattaacaatgtctcattttattcaggtttaaagagttcctttcactttaaatattcagttcatttaagttcaattccatgttagggctgatgtaaattctttcttagatgactcagtctctttaggtgatatgtttggaattcaaccaccttacccttttctttccgtgatgaaatttaggtgataaggtgagacagttgagtgtcacctgaggcaaaaaaaaaaaaaaaaaaaaaaataggcttaaatccatgcattgccttctggatcttttggtctgagcagctgagcagccaatctactctgttccctgtgtaggtacctagttatatatggattttcctacctggacttttgggattatgtgttgacaccactgctgaagccaattgtttcagccgcttgactccatctcaaagaccctcatcatgggcacttctttgtacttagcccaggactttgccaggccactagctctctcaattctctgcatctacttcctggacccctggggacttctgtattccctgcacctgtaaacagaccatggggattctagaaagtagcctctgactcatgtagccaagccttgatttttctccagcgccatcttcccacgacttaagtaagacttcccccagagacatgcagcctgcccctagaacactgtgagaggtgctctactacccagtactcttgtgctgttcccatacttatctaaatgcttctagcctttcctaacccaatcagtgtccgcccatagcagaccaggggaaagaccagagtcctgacacctaagttccttgttctgcctccatttttctttaccctctaggacccaaaaaactgacctccctctctgtcctgcacctttctgtcaaactgatgtaaaactctatgatcaagtccagctggtcttacatataatatggtaaagaatacaataaataattaagaaaaagtgttacacctgaaaaaaaccttacttttaaggcagttctcttgttaagtaatcaaagatccaaatttagatgtcagagctgaatattaatgctttctatttccattcctctcagaataatctaatctctccccactcaagacagatagattcctcagaagaatatagataaggttatgtatctgaaaatataaaggagaaaagaatattaatacatttcaaaaatataatctcaattacaagtagagggaggaaatattttatatcaccaagggcactcattggaaaatcaccatagatattttcaaagaaaataaaagacttccaaaatcaaaagaaattaagaaaatgaagaaaagacaagccacagactgggagaaaatatttgcaaaatgcatatgtattttttaagtggtatccaaaatgtgcaaagtactcttaaaactcaacaataagccaggcatggtggctcacgcctgtaatcctagcactttggtaggccaaggtaggcaaatcacctgagatcaggagtttgagaccagcctggccaacatggcgaaaccctgtctgtactaaaaatagaaaaattatccaggcatggtggcgggagcctgtaatcccagctacttgggaggctgaggcaggagaatcacttgaacctgggaggtggaggttgcagtgagccgagattgagccattgcactccagcctaggcaacagagcaagactccgtctcaaaaaataaataaataaaataaaataaaacaataagaacatttaaaacccaatgaaaaaaatgggcaaatatctgaacagacacctcagatctgaactatctgaactatctgaacagactataaacaaagtatatagatggtaaagaagcacatgaaaagatgcttaacatcaaatattactagggacttgcacattaaaacagtgaaatatcactacctgcctatcagaatgactaaaatccaaaacactgaaaccatcaaattttgtgagaatatggagcaacaggaacccttattcattgctggtaggaatgccactttggaagatagtttggcagttactcataaaactaaacattctcttaccatatgattcagcaatcatgctccttagttttaactcaagtgagttgaaaacttctgtccccataaaaatctgcatgaaaatgtttgaagtacctttatttataattgctaaatcttgaaatcaaccaagatgtccttcaacaggtgaatctatcgacaaagtatggtacatccatacaatgaaatattattcaatgataaaaagacatgaccaggccgggcgcagtggctcatgtctgtaatcccagcacttcaggaggccgaggcaggcagatcacctgcagtcaggagttcgagatcaccctgggcaatacggtgaaactctgtctctaccaaaaatacaaaattagctgggtgtggtggcacatgcctgtaatcctagctactcaggaggctgaggcaggagaatcgcttgaacgaggatgtggtgagccgagatcatgccattgcactccagcctgggcaacaagagtaaatctccatctcaccaaaaaaaaaaaaaaagacatgaccacaaaaagacgtggaggaactgtaactgtatattgctaagtgaaagaaaccaatctgaaaagactatatactgtatcattccaactatataacattctgaacaaaaacaaaactatggggagtgtacactgatcaaagtctaatgtaaattatgggctttagttaataacaatatattaatattggcttatcaattgtaacacaagtatgacattaatgtaagatgtcaataataggggaaatggggaggatgagggttgagggggtgtataagagctctgtatttccactcagtagtaatacatcccatgctagtcttaatcttaaaaagggaaatatattctagttgctgtatttcacaatgctatgatcattccttgtcttacttagttcattaaagctgccatatacaatcatagactaggtagcttacgaattacagaaatttattctcagagtctggaggctgggaagccccaggtgaagacaccaatggatttggtatctggtaaaggcccatttcctggctcataggtgacattttctcatcatgtcctcacatagcggaaggacaaggcagctctctggagcctcatttataaaggcaccaatctcattcatgagggctttgccctcatgacatagtcaccgcccaatggcaccacctcctaatatcatcactttggcaattaggtttcaacatatgaattccaagggggaagacaaacattaagattgcagcagtcctttcttctctatcaaatccttgcttatccatctagatcctcagcaaatacaacttagactatatagcccataatgatctactttgctaatcaactcacatacaacttcttgactctgccatatgggggactttttaaaacattgacttatatttctacttaatcgtgtacaggtttatatgtgtcaatattcagaactatgatttacacacatagaaacatataaattaaaccaccatcatcactcccaatcatacacacacatgttcatatacagcatccaataaagcatcctattcaaatttggtaataaataaatatttacttcttgaaagatcaactggctaaagaaaataatgtattccgattcatccactttcccaaaggagggttctacacaacaatcactagtgtgtgcctttggtcacacttttaagtaacagtaagcaatgaaaaaacaaatagaaaatgccaggctgctctcatttgcactcctgcttcatgtaaatgctttcaattattcatctagcaaaccacacacacattgcaaatgcctaaaatttccttttgccaattagaggtaaacgcagtccccaatttctatccatagaagaattaaagcaattctatttgcatccaatgtaaccaaaagttgcctttctcaaaagatacctatgtggcctcaataatccagacaaaaggctcactctctcagtgtggctgctgtacttcttgcctcttgtctgtataatctactgaaattaggtaccacagcactttctctccaacaaatccatggaaagtaggaaaacatgttgaactactccaggactcccaaattcaggttgaaattttctttcaacatagaagtagaaacttctggtgaaagatggtaatagctcagcaggaagtcagcacaaacctctaaaggcaaagcaggaggccggagtcctcccctctctccctccctcataaggagccctgctctggagacttccatggggacaagagagaagaaatcgttttgctgctcagatcctaggattgagtgacataggaatggagggcccaaaaatttgagtaaaattcctagacttggtttctgaaactatcctgactctaagattaagcaacttctcttcttaaatttcttcttataaatctctccttggggaacgttcctgggtggataaaacctatggaagaggggaaacagagttgtggagattaaagttaaaataaaaaaaagtctttttgttttgttttgtttaatcctattttctcattatttatctgaggtaatcaagatccagagaagtccctcccttgccctacatgggatagcagggggttccgcaaggattctgtcctcgcactgactcccactcccagtctgtgtctgcttttcataccaaacactaaatatgttattaaacaggagaataaaagttgtgaatatcaccctggcctagacagaaacacacaatatatacaataccatactataacagatattctactagatatgagagagccaatacaggctaatgaagaaacaagaggaaaagatgaaaaaaatgacatctagaggtattcgtaaaataaaaatctaataggtaagtaggcatgagttaatctgatctttcctctaccccaaattatttttctgccccaccgtctaggctagaatgtctacttcctgcttctgtgcctatagtcatcttagtctttgtctaagaacttggtcaaaccagaacctttaggtattgtgactccatcagttaatccctatggatattttgcttcttagtaacattctgggataacatttgtagactgctttggttattaacaaaaccaacaacatggagctttaatgcactctctaacttgagttctttgtcttgtctcttttacagctgcgttttctctgtgacaccaggaatcagcatttccattcaaatacagcaaactttaaaccgctttttgacaggaggaaacactttctgcctaatgaaggggatgaagcaggtaacccagagagtatctgccacacaggcctcctctacagtagctcagaattgcactgtttgattatttcttacacgtggcatctgcaaattcagaaaggtgagtgatgtcagatctaaaggtcccttcttccatcttggttcattcaaattcaggtctaagaggaaacattgaagaagctatctgaatttcaacaggactgattactttccaccaaaggctgtaggagacacagatttaaagagtgactagggggttaaacataaacatatattgacagtaattcctgcattgtcatcaaagtgtgctcatgtttgtaggccaactcttagtggtattcagacattggaaaactgtaaaaccttcatgcatttttaagatgacttctaaaatattttattattagtttaaatgtttaaatagctacaaaggttgtaaattccactgtaatataaacattgacattttcaaataaaactcagaatagcttttaaacatatccagtgaaaccttaataccaaagtgatttgatacccatcaacacccagttaaaattcacaacaagctcttcattgacaattgaagaccttatattgctcttttctttccttggaatcatatttccattcaacttctcctgcagaacttaattttagtatatttttgtttaaaggcttttgttgatcacccaaaatgcctgcaacaaaatcacgtaaaaaattgaaattgcttttaaattttctctgaccatactgctctaattgctaaaaattatctttctagattgagttataaatataattattgttgatgtaccttttattaaaacaacaaaaatatatttcaattttagttttaaacttacaggcgaaaattttttggaaatgcatttcttaagaaaatcactggggtcggcccggcgcagtggctcatgcctgtaatcccagcactttgggaggccaaggcgggtggatcacgaggtcgggcgattgagaccatcctggctaacacggtgaaaccccgtctctactaaaaatacaaaaaattagtcgagcgtggttgcacgcgcctgtattcccagctactcgggaagctgaggcaggagaacggcgtgaacctgggaggcggagcttgcagtgagccatgatcgcgccactgcactctggcctgggcgacagagcgagacactgtctcaaaaaaaaaaaaaaaaaaaaaaaaaagaaagtgactggggtcatatttatggttaattaaaggaggcttccttgacaccaataaattgtccctttgtttaatgttccaggggtgtttaaactgcagggcaatgctgcaaaaggagattccgtcttgaataaggttggggaagagcaattatgaaatttgagacgggaaacaagaaccacagtcaagctcttgaacagatcacttttaggaaaggttacatacagaagttgaagatctggaaattgattcccttaaaatacataactgttgcctagtttgaaaaatcactgcattagattgctctccacattactgatttcattctcagccagacttcatgaagtggtgaggtttgaggaaaatcagcaagagattttaatgacagagccttgagtttcagtaaacctgataaatttcctaaaacttatttgacatttctggcttgaaagaatagctcctgatgaattagaaaattatgggagattgagttcttgcatgacacaaagtcatttaaacatatatctttatcttgggaaagacagtttaaatgtcatggccatttattaataatattgtgaaaaaaagttatcccaatcctggaaaaaagaaaaatgatggttgctagtctttttttttctctatctgcaagagcattttcaagtaagcaattatctggcattcttggggatcgtaactttgttgtcagagcatatttacctagcaatccataactgagaaaaggctcacatagtttacattcctgtgggttggaggttaacccacagaaatggaagagttttgcgttcatagcctggaaaaaaaaattaaccccagattatcgtgtcaaccctaatagcattttattttgctatctatatagttgtatctttttcctgtaaacatttgtggaattagctttttttagttaatgattaagaatagtaacaaaatgtgaacccaggctcactccctatttgtattagtattttgttttttagcacatttaaggccatcctggcactaaatcagaaaactacttcctgatacctaaactataaaatcctggtttcatatacatctgaattaggcaaaaacatagctggctattatttatttaatttgatgtcttaacatgtaaagattttcttttcagaagaaatctaatggaccagatgtcctgaaacactcttaattatttttcagtagtacgaacatagccatgaaggcaaaggaaggtagatgatcaattcatgttaagagtttcaaattccatggactaatttatatctttctccacagccacctggcacattctgcctttgaacagatgctttacaaaaacataatctgtggacatggagatcttgcataaagcaaattctctctgatccacagcttcactgaggggtttcagttttctaggccagagtgactgctggagatgaagagattctatcaaacgtcagtgtaaaattgtctcttacttaaaatgccctcattgatcttatcctgatacccttactacagaagtttatcatgactcatctaggagataccagagagttcactagccaattcaagagcatgacttctcaaaattctccatgttttcctctttccttcctagctaatcccactttctcctgcctttgaaggctatagcttctctgccaatttcttgaattatggggttcctaagccctcttctatgttatccacagattctaggcaatcttactggctcctgagcctcgaataccatttaactgctctagactgacaaacctgtatctctagccaagactctccttggcacagacacactattgggctccctatctcatcaccccataggtccaccttctctgtgtccccatcctagtaaacgaagccatcagtgcctccaacatgttctcttcagtctagccagagttattatttaaaaatacaagtgcaatctgtttgctctcttgcttaaaactaatcagtgacttccagtttcccaaaggatggaatcccaaatcattactaaggctcacaaagcctttctttctctagcttattcctctggtttcatctttcatctttattcttcacccatcttgcactctgtgcttaatatctcctgtttgcttccaggtcctctctccatccttccacaccctgctttgtgccccaggtgactgacctatagggattataccaataagctatcttgtcttttggtttccagtaggtttttgcccaagggcagtacccacagagaacagaaaaaacgaggaaagtaaggtcaggctatatattcccccaacttcctcccttcccacatactgacattaacccacaatcagctccttacggtggcctctccaaatagcctgtctttctccaggttttggtaatcactccctcctttccattcaaggcctggagtgatgctagtcccaggttgtagcactatctcttatatgttccctgctcactgcttgtatttttataactagtgtcatgtttctcaaattacacaatttcagtatgccataagtttcctaccagaacccagattgatactgtctgctttcaaatcctaaaaggtgtcaactatggcttaaatgttccttatttcgggaggccttttctagccgtcttgacttggatgtaaccgcctgctaaacctcctacagcaccctgtccatctcctgacagaacatccttcacacttagcagcaatcattgaatgagtattagtgtcgccttctctaaacaacaaacaaactgtgtcagaaaaatataaagcaaaatttgtaggaaatataaaaataacttgataacatattcattatgggacaccttaatatctttttctcagagagagaaagagagagaggatgatggaaaaaactttatattaaacatatagctacagaatatttacaaaaaaatgagcatataatatgactcaaaaaatgggaatcatataagccacattgtctgaacctaatgcaataaagctagaaactaataattaaaagatagcaaataaatgagtagaaagagaaccacttataatattctaaaacattttcaggtcaaagaactaagagttaaaattacacgtcactaaaaatgaaccctaataatggtactacataaaaaaactatatatttgttcaaagcaatattcacaagaaaatgcatccatctattaataaaaagtaaaacaaaggaggcaaatctggcaattcaagaaataaaaaagaaatgagcaaaataagccaaaacagagaaggggaaagtttaatgataaaagcaggaattaatttaaatgcaaagcaataattagaatgtacaaataaaggcaatatttctaggaaaactgataataaaaaagaaaacacaaatgtgcaatgttaagaacgcgaaaggtgctataaccccacaaaaaaaagcaatttttcaaatcactggttaatgccttgtatacatagatcttgatgaaattggtggtgtttagaaatatataactttttaatttaaacttctctactttctaaaaatttatactattttacaattccaaagtcaatatcaaattgtaaagaaaaaaatcctgaattctgcctcttcttccttcttcacatacgcagcaaataaatgctacacatataccaactactatgtctcgactctcctatgttttcatcattaaagaaaaaaacattgcattcctactatatgccaatcattgcactacacactgggaaatcaaaaatgactatgagaaattccctgctttcaaggagttcatagtctagtgcgagaaacagacagatgtgcacactgattataatactatgtggtacctgtgataatgcataataatgatagatgtctttactgagtttctgctaagtgtcaaacaccttccattcagctgagatcttgtcctttcctccaactcttacccgggcattttcacataatagctcgttatcatctcaatttcaaaacactttttgtactcagatgcttctccaatttcccagtttctgtaaatggcaccacaacatttccttattcaggcttgaaccttttgagtttatagtcaggtaccaatgcttgtcagtttttcctttgaagtgctattgaatgtatattttgtttagaattcccatgactaccaccttattcaagtccttagattgttcccaccaagttgaaaggggtgtcctccttcctcttcattattgaagtctctttcttgctcttctcccctatcctaccagctcccaaccaccctctgaccctctgcaccactgccacacctttctttttaagatatcttttcatcatatccctccactattcacaatcttacaacagtttctattttctcatgaatataagccctttgaagtagctttcagtgacttccattatctcctcctcatttcaccaatttatcctcattcccagacactattacccagactctgttttctctgttagctggaccattcttcacactttctcaaagacatgtcatcctcactcctacctctctatatttcctgaaatagcctttagtgcgtgctctctctctctctatctaaacattatgtgttttttaggccttagctcctccaaagagattgtactaaattcctatagcctttcataatttccctctcttttgacctcacgtacagcatacacaaaaaaaatgcacccaatgctatgctactgtacaaagcagtgtactgctttgcactgttaactttaactctatgtgcattattttaatctttctaactatcttacaactccattaaaaccaagactagatactgtggaattatttaatacccccacccacctcatcatttatcacattacttgatacttggtgagtacttgctgggtacatttgaatgtaatgtcttttatttcttaatgtctttcattttctcaagtgttgttaaaggcaaaaagcaatgttggatggttttatcagttatgcagagttcatgcaggaaaagagatttcagtgggaccttgcttaagacaatagagaatttagtttaggatttaacaggtctagaaattaatgtagaaagctgtcccacaaagatctattatccagaatatgtaaggaacctaaacaattgaacaagcaaaaaacaaataactccatttaaaaatgggcaaaagacctgaacagacatttctcaaaagaatacacgcaagcggccaaccaacatatgaaaaaatgctccacatcactaatcaacagagaactgcaaatcaaaaccacgatgagatatcatctcacaccagtcagaatggctattattaaaaagtcaaaaaacaacagatgctttcaaggctgtggaaagaagggaaaacttacacactgttgatgggaaggtaaattagttcagccactgtgaaaagtagtttggagatctcgcaaagaacttaaaacacaactactattcaacccagcaatcccattatggggtagatatccaaaagaaatcaaatagttctacccccaaaagacacatatactcccatgtttattgcagcactatctacaatagcaaagaaatggaatcaacttaggtgcccagcgatggtgaattggattttaaaaatgtggtacatgtacaccatgtcatactatgtagtcataaaaaagaacaaaaccatgtcctttgcagcagagtgaatgcagctggaggccattatcctaagcaaattaatgcagggacagaaaaacaaataccctgtgttctcacttagaagtgggagctaaatattgggtaaacatggtcataaacatggcaacaatagaaactgggactactagaggaagaaggaagggagtggagcaagggctgagaaactaactttcaggcgctatggtcgctgtattagtcccttttcatgctgctgataaaaacatgccaagactgggtaatttataaagaaaaagaggtttagtagactaacagttccaagtggctgggaaggcttcacaatcatggcagaaggcaaaagacacatcttaaatggtggcaggcaagagagaaatgagagccaagggaaagtggaagcctcttataaaaccatcaaatctcataagacttattcactaccaggagaacagtatgggggaagctgcccctatgattcaattatctcttactgggtctctcccacaacacatgggaattataggagctacaattcaagatatttgggtggggacacagccaaaccatatcactcactatctgggtgatgggatcatttgtgccccaactgtcagcatcatgcaatatacccagataacaaacctgcacttttttaccccctgaatctaaaataaaagttgaagggaaaaaaagaaagctgttccacattgattgcagtgagtataatgggcaaaaattactgcccccaacccgcagcccccaaatcctaacagaaatctgttacatacacacagacaagcatggattgagcattagctcagtagacaggtcggttgaatcccactttccagctgcatgatcataaacttattgtttaacctctgtaagcctgtttattcttctgtaaaatatagatcttgtgagaattaaatgagattatgcattcacttagcatagtgcctggcatacagtacagctcaatacatgttagttattattatcatcttttgtcctttcttccacaactttgtataagaagtgttggaggaactgaagaaaatgtgatgtgttcaacatggtacagaaaaggtacaccatgggcagatggtcaaggtgagtcatagactaacccagttcacaggagtagctactcatgttagaggagtcctaaagaaataaaagccttccttccctcccactctccctccatcaatggtccacagagttgagagaacacaactgtggtaggcatctaccattttgttcacttagaatggcaactcattcctggtaaaatataaattctaaccatgtgttatgaatggagactgctatcttacttatgaatgggctgatgaatccacccagaggtggatgcctgacccagctgaaccaatcatgttatgtatacaccactctagtcacaaattgcccccctggatgggaacctggctcagactgaagcaatcaaagacttacctcaatatttttaaatctgggatcagaaaggatcctcagtacttctttggtggctacactgtgagatgaatcccaaccaaaaaatgtttacaatcatgcctcctgctttgtggtggaatctggtctgaggaatgaaactaagacacgaatgaaaggaaaagtcttaaaggattaagttccctggcaccctggatgcctgaagtccagatacacttctgctcttgccaaggttattggagtcagtgcatttctcttcttgcctaagcacatttgagttacatttctgtcacttgtaacatcaatgagacgttaaagagttaattcactaggaaatttttaggaacaccttgctggcttacaagaagcatcaattctacgaattactttctcaggaatttctctaaatatcctgaagagggcactgtttccattcataacttctgtccaaacccacccccattcttttgtttttttttaatttttctttttatttcttttttttctttttttttttatgaaagggagggactgagtaaattgcaggatgtgattctaattggttggaacatcttttgaaatcgtgtttctgtagagaaagaaaaactaccatatttggatagccctggccaactttcaaggctcctaaatctgagttttcagtgaactggacagaaaaaaaaaatgaagaagctactagcaatgattctgtggcttcaactagaccgtgagctgggggttcattgaaaagggagccatgggaggaaaggaattgtccatacaatgtttgggggtagagacaaggttcaatgcgactcatttgggttccctcgggaggaacaggattattggggtaaccagtgaatgcctccttctgaaatgttctctttggacagggttaagtggagagctgaaagtggaacaaaaccctctgttcctgagcatgcaggagggaaaaaactataccatctactgcaattattcaaccacttcagacagactgtattggtacaggcaggatcctgggaaaagtctggaatctctgtttgtgttgctatcaaatggagcagtgaagcaggagggacgattaatggcctcacttgataccaaagcccgtctcagcaccctccacatcacagctgccgtgcatgacctctctgccacctacttctgtgccgtggacacacagtgctcccctgacgccaccagtctgtacccaaacctgcagctggtgggcccactcctcctgcaggaactatgactgtgaggcttcgttcactgtctgtacatttctttctgcaaggaaaattctgagatgggtgaaaaaagatgctgttttaccttcttaactgtggaatattttttaaaaggaaaatgtgttcaggctgagggaagattcctaaccatgtatttcctgagaatatgaggtctcattctttactgcctcacagtcagaatttgttagtcttccattatggaataattttacatgtagtgcaactgtcacaaataattcctatgaaatatggaatcattatttgttttatatgtgaatgtaacatatggcatttaccaatgaaagaaagaataaatgctttataaaagaatggtctatgtgaggttccttacctagtgtttcctgctaaaatattgactacagtagtcagataatatccgtgtgatctaagtacctgtttatctcaatgtgtggagagtctctgggaaatgtatcctttggctggatttactccaaaactatctgagggtccttgccaaccagaagaatattatattttttcttgtattatttgccagtttcctcttctcctccctccattttttttttgtaattgttttgctacatggtagaatttatattaaactttatttgcccattgcagactagataaaatgaatttcactttcaggaaaattgtcttataagaaatccccaatttgaatgttatacaaaaataattgaaaataagttttcctgtcccactaatgagataatcagtaccttcagatatcaattgcatcatattttcatcccagacttctaggaaaataataaacttgattcagtcaggcttttaagtgacaatatttcagaaattaccattacaatgtaaaagctgaccttaacatttcaacatttgtaccttcctaagcaacagcacctttaaaaacatttaaaaactaaaaacacttatttctctaaattgcccctagagtctttacaagcgaatcagcttctgcagcaatttgttggcagattatgaaaagtcagccacagcagtgtacagaccaaaagctcctgctaccactcagagcctccagcagggactataataacttccgtatttagataaaataaaatttgacatgaaaaaccgactagttccatcatcctttgagtcaagcagaggtttcactctgacagagtaggctgaaaaaactttgaccttgtatttataaatactcacaacgtatcttaaatttcaagtttcttgatctgttaccaaagcaagtttccttgtcaatgactgattgtcgggaaatttttattttgcattgatgatcttatttgttgtgttgttacataatcagaaaacaggatgttacatcagattttctataacctttctggagcatttaacagcatgtcttcacacactcatttccatgctgaaaacattttcaccaggaaactattcatgacggggaaaaaaatattgttcaatccaatctaattaactgaaggaacaatattgacttaagtccccaaatctcttccttcttagagagaactcttggattctgaagatgaacttttatatcttcttcagatcaagaatataaacaaaccctaaaacaaatgaatagaactgaggatttcattaatttgatctttagaacataaaaaactaagttctttccacttctccttcccaattttcctgactccttcccaacttatgagtatatagattttttgctttcttttcctagaatcacttactgtcactgaaaatatatcattaaaccttattctcgaagaaacaatacagacattcaaaattgaaccagttgactttaagggtgtgatggtgtagtaagaaaatactatcgaaggtgacaatctccaatacattagagcatgctaagccaaatatgttttcccccagtaggacctttaggaatgtctcaggtgactccaagcttccggcacttgctgtccatgaccagagcttctactaacaagaagttccataaaatacttggatccatcctaatcagatacaccagttgccaagtccacttaccacagagattaggaaaggagacatttttctcagttgtgctattcatgtcccagaaatggcatttaagacaaataattctttgagtatttcttccaccctgtctcatctgttttggtgtgaactagtctcttttttcattgcttttaacacagctggttattttttcttttaatagtgtgtctgcttcaaggtttatctagaagttgtttcttaatatcaaaaaagttaacattttttatttttactgaattatgatcagagaatgcacctgtatgagctgtactttttaaaaactttcattaagatttacttgaaggccaagtacataatcataataattttattggaaagctatgaatttatatatatgtgtgtatctatgtattcaacttttttgatcatatcattaaatcttcctatgtccttgtttccattttctaaaatctgtcacattctgaaaaagactatcgaaatctttcacttattttgtcaagttcttgcaaattgcttttgctttatctagctgcaatgttttcggtgtatatggtttatgacttacgtctcttcagagagtctttttagcattaataatgtccaagaaattatccatctcttctagattttcatcattatataaagtccttcatcctgtgtggtgcagcctgatattttttcctcaatatccattctactgtcttccccttttttactctgccccagaataaaatctgtgttgcccagacctccttacagctaagtattggcatgaactaaattctggtcaatgaaatctaagtgtaaatatgaggtgcaccttctaggaatttatctaagactcagtatgcatgttcttccatctctcccagctacctggcctcccatcccctttcctgctggatttgttgatcctcggagactcaagtacatccttcacttagtctatgcactatataccttcttcaatgaggtccctgtgtcagggacatggttctcagtttccagctactttccatgagctccctcaagcaagcaaatatttttagaaggtatttttagaagacaacattttaaaagaccatagtgtcctttctactctactgtgtctgcaatatgttgcagtagaacatttcacaaagctagatcttctcagagctccagatgggaaccaggcaaaaagctctctttgcagcggacagtcaacctatcttgtggtttccattgtccgcattcctagctcagggttttagataggatttgtgattttttaaaactgccctgaaacctcaggctctgctcttgacatataaattatcaaaaagaaaaattaccaagtacctgtctcttgcaactcaaaaaaatgccttatttcaggatattttttcctcctaagactttttaagtccattttgaatacaaaatcaataatttgaccctttgatctcactggatcctttcacaatctccctttactggagcaataagattcatcctcaaaatttgtggcaagagatttacaggggaaaaaatgaattttaaagaaggaaattatcatatttgaaactgttagtccactccatttagactcagagattctaataacacaacagtgtgaacaccagatttggttatcagaaagaattcctgagtattcaaactcttctactgtgagctctatgcccttaggcaagtttcataatgtatttaagcctcacttttctcatcaaaaaaatatggaaaaaataataaccactttctaaagtttttatgacatttaaaatgagatggtgtatatgtaaagtaaacagcacacacaccagatcttctagaacagtgtttactagagaaaattcataaagacaagagaaagagcaggtgtgtggtttccccagaggcagcactcaccctacattctgaaacagcacacagcaacctagcatggccaatgtgagaccctaagaaagagaacccagtcttgagccatggaactttaaggctgcactggggaagcaccaggccttactgtagcatgggggctgggctccaaattatgtgattatagcaaaatcaaggaaatctgcaacctccagtcctgatctgccacctcagctctcttacaaaatttattgcctcaagtgctaggctggggctctattagaaccagttccttctctggaaggccaccctgcagggaatccattacccttacctctcagtatgtgaaattcactagcacagagcctggcatgtagttggtataaatgtggaatgaatgtgtgcagccatggaggacaatgtcttcagtccctttgtaatgcagaaagtgtgcttgttctcagatcaaataattaacttattgaacaagtgtttataggtatctactaggtaccaggctgtcttctagacacttgaactatcttcttttaaaaaatgcacgaagatatcagattttatagaaaatacattctagtaagcattaaccataagtaaattactatatggtttatgacttcagagagtctctttagcgttaatatattttgcattacaatatatgagaagataagtcggacgggcgcggtagttcacgcctgtcatcccagcactttgggaggccaaggcgggtggatcacaaggtcaggagatcgagaccatcatggctaacacggtgaaaccctgtctctactaaaaatatatatatatatatataaaattagccgggcgcggtggtgggcgcctatagtcccagctactcgggaggctaaggcaggagaatggtgtgaacccgggaggcggaggttgcagtgagccaagatcgtgccaccacactccagcttgggtgacagagagagactccgtctcaaaaaaaaaaaaaagaagataagtctatggagacaagaatcagagcaagttaggggatagggaattctggagggggccacagaagggtggttcccttgtaattttaggtaaagtgtcagagtagcctcactggaaggataacatttgagcaaaattgaagaagatgagagagtgaatcttgcatatacttggagcaagttttccaagtagaggagagtccggtcctaaattaggaaatgcctacatgttctagaactaggtggaatgagaagccataggaaggctttgagaaaggagtgataaaatctgacttccatgtaaaagtcttactctggctgccgtgctgagaatagactgcagatcatcaagatgaaagtggggaaaattgttgtattaacattaaaaccaaagatatctggtgttactctgagctcagaggcttcttccaccagaaaagctcattcaagagcagctgttgttactgctcctgctgatggaagaggggctaaagacatatttgatagcctttctgtagatctcttgactgcagatgacctgtgagtttaggggaaaatgacaggaaggagtcttaatttcagacacaagaaggtctgttgtgaaggcatcttccagaaggcaatatttgtgctttcttctgttgtgtaagactccctactcaaatttaggcagtttaaggaccttagaaaattgtgctgtggtgataaaggtaatggaagtcagagcagagggataataaaaatccatatgcctctttgaaagcctgtgtaataaagatatctgctgcctcaccgatctgaacagggttgaataagcaacaaatggacaagaatgctcagtccctgagctaccaggagacataggcctttagtgggactgcctatataatttacgggacccagtacaaaatgaaaatgcataacttcctaagaatttgaagactgcaacagcagagcattaaagcatgagttctatgagactgtacaggtttcatacccaggaagctggccctgatcactactagtttggaatgccatcattattcagatatcgatgttacaggcaggagcatgggaaagaccttaaattaatttgataacaattcaacctagtggcatacagaatgagggcaaactaactgagtagtttggtgtagaaaagaagcacctcacctcctcaaattacctctgagatggtgagatgccctgtccttttgacatctacatatttaatataaactcttcacctaggaccacagcagtggcagagatccagatgctcggagagatctatttgcacaagaaaaaatatgcataaagaggttaatagtcaaaccaaataaggggctgagttgtaccgtgagcttttttacaacttcaaagtgggaaacatttattgcccttactcatggtgctgtctaaagaataactttttactctcctgaacatttcagggttctactcttattagagaaattgtactattatcattttatttttaaaatatttttagaaatgggggtctcactgtgttggtcaaactcttgagctccagccatcctcctgcctcagcctccaggggagctgggactccaggtacgcaccaccccacccggccactgagtcactattaaaaatcatttagcatagccaggcctggtgtggtggctcacgcctgtaatcccagcactttgggaggctgaggtgggtggatcacctgaggtcaggagttcaagaccagcctgaccaatatggtgaaaccccgtctctacttaaaaaaaaaaaaattagcctggcatggtggcacccgcctgaaatcccagctactcaggaggctagggcaggagaatcacttgaacccaggaggcggaggttgcagtgagccaagatcacaccactgcactctagcctgggtgacagagtgagactccatctcagaaaaaaaaaaaaaaatcatttagcatacccagtctggggctttctactgagagcctttgttgacttctcttctaaggcaaagagcagggatataaagaagtaacacttcgaaagatggatgttctagttacatttctaggctctgaaatcaaatacttaatccacatattgactgattaatttatccaacaaatattaaacttgaccgacccttatagtgtctggagcctagtaaataactattgaataagctgtgaacagacagccaagtcctgcggactcagagaataatgagacaaatcagatattgaatcctggcttcaccacttttgagcagtgtgacctggagcaatttgtttatcctctctgatcatcaatttcctcatctataaaatgggaacaataatattaacacctattttcacaatcatgtggattaatgtatgcagagcctctggttcatcactaagcactcagtaaatattagctatcatcatcatcattactaatttctattgatttaactagacacagaaagggcagcatgtgtcttacaagccagcgcttccctcttctaaccactaattcaaaaaggattgtaagtaatgtttagaggtcactccctagcccaaaataggatgccactgtgttgtgctttgttttctttcttcctccagtgctgaagcacttgtgtgttttggttaatctaagatttaaaagattcctacatgtagtcatgcaaagtacttgtatatacctctaaggacctagcaggtctagtgatcctggagtctcatatccgaaagaggaaccagtactaaaagacaaacttcccaaaatctaaagaagggaagtgcaatcaatggtatgagttagaagcctcaatcctgggagagacagcctgtgcaagccaggagaaatcatgggttctccagtccccagcactggagcagccatgatcagtgcctccacttcaatgcttgtgaggctgttactctctggtgagcaaaatgacagtttaaaattttggctcttttataatttctcttatttctcattttgttacttagattcaatgtcgtttccattcattctaataagaactttggctttccaggaagaaccactagagactcagtgaattagacacagggctatgtgaccctttcttcaggggcacacctgacgttgaactgtacctacagaatgggtaggtaccttcctcttgtggtatgtccaatatcccaaagagatatcaaaatgccttgtctctgaggcatcatgataaatgaaaaggaagatttcaggcccattaagttaagattaaaacctctttccacttgcagaaaacctctatccaagcactaggcacaattgtgtacttttatgttcctaatgacacagtaggggagactaacagaggagttgagtgcaaattgcaaggggtatgagaggggctgggtgtgagcagtttctttttcctatccagacagggccctggagtgcaggagtgtatgtgggaagttggacaggcttcgtgatttgctatcccaggttaagtagcacatgagactgcatcttagaaatggggaaaggaaagatttgtcaaaacattgcccatatctgtcctctaattatagctcactgatcaaaactacaagcctagtaatgtaacgaaggaaagttctttgacatcagttatttaaaatatgtacaatgtgattttctgaaatacctttgtatttaaaatgtaatttaaattacccttaaaattaaaataaatcaataactgttttagtccattttgtgctgctataatagaatacctgagaatgtgtaatttatgaagaacagagacttatttcttacagttttggaagatgggaaatccaaggtccaggggcctgcatctggggagggccttcttgctgcaccatactatggccaaaggcagagggcaaaagagtgcatgcaagagggagaaacggataaagtgccaaactcattcttttatcaggaacccactcccaagatatctaacccactcccatgataatgtcattaatctattcatgaggacagagccctcatgaccttttaaaggtcccacctctcaacactgttgcattggggattaaatttccaacatatgaactttggggggcacattcaaaccataacaataataaaacattaatattcctggggaaaatgagcaattcacaaaaagtagtacaaatggccactttataaagaggtatataaattctttagtcatcaaagaaacatttaaaaaagtgattcattttttccagctatcaaaatagtgaaggttactgacacacacacacacacacacacacacacacacacacacacatatcatggaatttttttctgttactccaagaacctcctatggcaccatgagtcttgagccatttactatgtaaccagaaataaagactgcaaatactcaactgtaagccaagccacttctagtctaagtgcaagattgcatatttgaagagaaatatttccatttctgagaaaccagataaaattatgccaggactgaggaagaaaaaaagagaaaaaaaaaaagagcagtcaggaaaaaaaaagcagtcaaaaaaaaaaaaaagaacaaagttaagtagactttgcaaaatgacttcaattgaattacaccatcattatcaaataaatcttcaagtccagataaaaaaggaataagtgtaccctcagcactacccttttctagaagagagaaccaaaaatatcttgattcactaccgttttcagtgaagaatattgcaaatgtgaaagatggtaataacaggagcaatcaaacaatagacagtcctgagaggttactgctcttttactgtaaagctaaactttgaaatgtgaatgctaagtctttgttaacacaattataataataattacattttagatagaatttcatatttattcttgcattgttgaagttaattctattttttgatattcagattcagctttagcttcccccagatattgactttaacatctcaccattcggcatttggtcacaatgtgtgttcagtggaccatgttttaaggaaataattagacgtatgaagagggtttatgtaagcatagatttatcacaatgttgtttgtaaaaactgaaaatattgaaacaactgtctaaaatactgacatgttgtgatgtctaagttctagtggaaattattctcccttagaataagtgttgtagcgataacagacttaggagtgtggtgagtcccctttgcacaaaaagaccacctcacacccaacatgactcttaagaatgaggacagtagtgaggacacactgcagaacactgagaggcagatgacgtcttataacctgttcattaacttgccacttgggggtgctattcaccagtgaaatcataatttatgcatgaattctgagtacaactgtgaatcctcacttcaacagtgatgccctctgctaggccagagacactaacaatgaactcctctctggactttctaattctgatcttaatgtttggtaagtacattttattaaaattttttgtattatttcaaaataataaatacttctccaaaagatacaacaactctggccaaacccataaaatcagtacttttttccccctacaggaggaaccagcagcaattcagtcaagcagacgggccaaataaccgtctcggagggagcatctgtgactatgaactgcacatacacatccacggggtaccctacccttttctggtatgtggaataccccagcaaacctctgcagcttcttcagagagagacaatggaaaacagcaaaaacttcggaggcggaaatattaaagacaaaaactcccccattgtgaaatattcagtccaggtatcagactcagccgtgtactactgtcttctgggagacactgtgttaaaagcacagtgggagctatacaaaaacctcaaaggctcagaggaagtatgtagtgaggctggaaaacccaggttgtagagccctgttctctctttcacagacagtcctgttaagacattattagaagataaggaaaatcaaaatcagatataactgcctctaattccagggggcacaggggtttctttgacagaaaatggggtcagggaagagggtctcagatgatatccctgctctcaattaggtcagttctctcttgtccttcaggctttcttgcatgatgtgtaggaattagaatatgatgacttggatgtcagtcctggctctactacttattagctatgcaaatttggccaagttaattgatgtctcagagctttagtttttttcacttgtgaagtagaaataaaaataatcacacaaatttagcatggagataaagtggaaaaaaggtaggttaggaaggggcagattagtactcaaagcatttctggaacttgcaagtcccaccgtagcagttctgctctctcacagcaatctctctgcctagtgctgaccatcctaacagggcttggcatgcccactgctttgtcacaccacaccacaccccacgccacgcccagccccaggccattatgatcaacatatcatcttttctctcacaggctcctactgacactacacacaaaaattaactcaaagtggatcatagacctaaatgtaaaaactaaaattgtaaaacccttagaagaaaacatagcagtaaattttcatgatcttgggttaagcactgatttcttagatgtgacaccaaaagcacaagcaataaaatagaacattgataagttggacttcaacaaaattaaacttgtttatgcttcaaaggacaccatcaagaaaatgaaatgataacccacagaatgggagaaaacatttgcaaatcatatgtactatgtacccgatgataagggacttgtatttagaatatataaggaacttttacaactcaataataaaaagaaatataactcaagcagtgagcaaaatatttaaatagacatttcttcaacaaagatacaagaatgtctaatatgcatatgaaaagttactcatgattagtcatgagacaaatgcaaatcaaaatcacaagatatcacttcgcaaaagtaaaaggctatgactttttaaaaaggacaataatgagtcttatcaaggatgtgagaaattagaaccctcatacattgttggtggggatgtaaaatgatgctatcactttggcaaacagtttggcagcacctcaaaatgtgaaacatagaattagcatatgacccagcaattccagcccgatgtatctacccacaatgcatatgtccccacaaaaacctgtgcatgaatgttcataacagcattgtttatggtagtcaaaagtgtaagtaatccaaatggacaaaccagatgtggtatctctatacaatggaatattattcagccataaaaaggaataaagtactgacacctactacaacatgaagaatcttgaaaacattatgctaagtggaaaaatccagacacaaaatggccatattgtgtatttcatttatatgaaataccaagaataggcaaatccaaagtcagaaagcagtgtggctgccagaagctgaaagaagtggggagtggggagggactacttaatagatgtgtggggtttcttttggggaaaatattctgaactagatagtggtgatggttgcgcaacattgtgaatacactaaaagctaccatattatatactctaaagtgattaaaagtatgaattttatgttgtgtgacttttacctcaataaaaaagaagacaaccaaaaaatctaaatgtgattcttaatgggacaagaagctctaaaaaaattaaattcttactattccattgcaaacaattccaataagtatgtgaaatatggagccatctgataaaacctatagcagtacgggaaggtatactaactcagcttttaactaaaaattatacaaatgttgactgacacaaaggcaaaggagaatagcaaagatggcatgagcctttaaggaaatcgttaaaaagtggaaaccttttaatgaatgcagttaaggcttaaagaaaatgtgaagtggaacataaaaagcgttttagaacagtttggagaaatgaagagggtggggtggggaggaaggttaatttacatatcgaggaaaacagaataattttggtagagaataaagaagaggtagggcacttcgacccctggtttcatcctctattcttcatcaaatacaataattttgggccgggcgcagtggctcatccctgtaatcctagcactttgagaggctgaggcaggcatatcacccgaggtcaggagttcgagaccagcctggccaacatggcaaaaaccccatctctactaaaaatacacaaattagctgggggtggcagtgggcacctgtaatcccagctactctggaggctgaggcaggagaattgcttgaacctgggaggcggaggttgcagtgagccaagatcatgccattgtactccagcctgggcaacaagagcaaaactccatctcaaaaaaaaaaaaaaaagaaaagaataattttcaaactggaaatgaagaaatgaaaaattatgacagataaaaagatactaagagagaacttagatgctttgaaaatgatcaattcttctgggtcttttaaactaatccccaacatacaaaaagaatttgcaggcatggttggcaaggcattgggagaattttttgaaaacctatcaggaatgaaggaaatccccaactcaggaacacagaaatagtggatcgatacccagcaaaattctagagcagattattaacagataatgtgtgggctcttagaaaataatgcagtgatcagtaccaagccagaatgagctcactaaagacatttttaaaacaagtcctaaattcaaaggacttccgtggacttcaaacgtgtcaaatatttgcaagatatttaataatttgtttttcactatatcaatgggaaaaatatatatatattatcatttgttgagtgttgtgtttatcacaggccctgttgtactacatatgtaataagaactaacatttatttatcaagggcttaatgtgcatgaagtgttgttctaaatgctttgcatacattaattcacttaatcttcactacaacctcatgaagtaggtgcaatccttattatagataaggaaactatctttaatacagaagaattaactaacttgcccaagaacacagagttagtaagggaagacctggcatacaaatacagtttgacaagcccaaagcctgcattcttaaattctatactttgttacctcccaatgttatctgtaatccccaccacaaaactataattttggtattgttacacccattttatgaataaggagactgaggattggagtattgaatagaaaaatccagtagaatctagtaagtagtaagactaaggctcaaacctaagttcatttggatctagactgtatcctctattcactttgtcattctgcgtaatgctagacttggtgaattctcagctgaaagaacggccatgtataaatatacaatttagaaaaatgtccctattgttacacctcatgattttatccttcactttgacctgttcacattgatcttatgtaaattcacacaaggtatgcccattaaatgtacaaatagcaaattttgagatcggtatatgatgatcatgtcctaatgatctccagctaatatgtttatttacagcataaattaaagattgaaaatcatctgaacaaactggaaagatagactgaaactgtcaaaatagaatttaatggagataactatatatttatacagtagttttataaaaatgagttgtaatgtctggaagaagggatcctgaatttttagtatttgttgtgtaacgcgctcatagtaattaaggaaaagattttctgaaaggatattagaaattctcataaaatcaatttgtgcaaaatacagctaggactcacagaaagaagaaaatcaccaattggctatgctttccgaatctacttttctctggatgtatgatctgttctcctcctgggaaaccagattccactgtaagcctgtcatattctactccacaataacttcagtttgaacatacccagctctgtttgctaagagatgagtctggtttgaatagcacagggctttaaagctctagttacactgtctaactgcggtttctgtacctctagttcaaattaatgagcgtagtatcttcccagatccaataagctattgccagaaaaaggaggttatttggtacaagcatgacctctatgtcatctctttagaaaggaatcccaaaagtggaaaaggactacatgctcaaaataattcaccaatgtgataaaacaactgaaactatcatagataacaataaaacaagtggaaaccagatgagtacagtaatactctgacagggcaacaatatttgaatcacatttgaagagacgtgaacaaactgtagcaagtctaaaaataagaaagataaaactaataaagtagtctgaaataataccatgtgcagaaagaaacaaggatgtcacataaagaaaccagagatatttataaggacacctttacaaaaaagaacagatctggccttgagttttcaaaagatataatgtgaaatgcagctactctacttgatctatcatagctggctgaagtctaacaatcaacaagcttctgttctcccacactaccctcacctttcttctaggactcctagtaggaggatgctaagtttggttctctatctgtattgtgggtgagaggggctgtttgtttgttttagagacagggtcttgctctgttgcccaggctagagtggagtaacatgatcatatctcactgtatcctcaaactcctgggctcaagtatttgacctgcataataaatgtctacgcctcatgccactaggtggcaatgtgggtgttatactgaaaagatcacagatggttcactttgcaagtaaaactgtaaatgttcttaagtgtgcatttctgctgcttctgatgggctgaaaatcccctttgatttctaaagtaaatgtagagacgttttaaaaataaaggactcctttgtccaagatatattccgaaatcctccaacagagacctgtgtgagcttctgctgcagtaataatggtgaagatccggcaatttttgttggctattttgtggcttcagctaagctgtaagttggggagtttcaggacatgagatatttttcaaaattctggggaggggagagaagggactccaagtggctaatctggaggccctcctgaaaatgtgtaaagaaatgtgtataaatattgcaataattgtaatattctgtatctgatgatgtctttgagaacaggtgtaagtgccgccaaaaatgaagtggagcagagtcctcagaacctgactgcccaggaaggagaatttatcacaatcaactgcagttactcggtaggaataagtgccttacactggctgcaacagcatccaggaggaggcattgtttccttgtttatgctgagctcagggaagaagaagcatggaagattaattgccacaataaacatacaggaaaagcacagctccctgcacatcacagcctcccatcccagagactctgccgtctacatctgtgctgtcagacacagtgctccccaggcacctggagcccgtacctaaactctaaagttgaggcatcatttcttactcctgtctttcagacttgtctgtctctatccttggtcagatgatgtaaaatgtttaagtttttaaaatataatattctccccttctagaccatctctcttctctacaacatcatcaccaattatgttaaccagacagtatgtgatttttatcttgaaagtaaaatatacagggtataaaaatcccgattctgctacttattaactggatgatcttgacaaagttacttaacttctctgtgcttcagttttccctcagctataaaaaggaaacagtgttagccatggtacgtaaccccaattgtggggattacatgaggtaatatacacaaagggcttgacacatttcctggcacgtagtgttacataaggggtatcaattattagtattagttttagatgtaccatgagtttgctaatattcactatggattaataccacagatcattggagaagtatgtggaatataaataataagcaccttataataattttagtttttagattctttcctaatgatgtccagcacttggcctttttaatagtgttaagaaaaacagggagtagctgtagaaaacgtaatagaaggatgactctatggtttggtttgtggtgtggaaatgaaagactggtaagagatgtttctgaggaagctcagctgcttctttggaaaaaaggacaggttctaagttttcatgtggagatctctaatggaaacttgcatttgtggaaattcatgaagcaaaatatcaaacccagtgtatctaaatcaacggttctgtatatcccccaaggattctttacattactattcccaatcccagtggaattcttatatcaaaacaagttttatgattataattgttcttattactcaacaacatcaatcacatatattaaattacagctacattcttttttaaaatcaaaggctttttaaatcaaaatactacctgcacatatctaaaaagccaatagtattataaaggtctgttccttccttagcccatcaagaaaacagaaataccatgctctacccccaccttccaattcaaatccattctagcaatttctaattaatatgtatatactcttgatttatcattattaagcattatctattgacttccttctatggcagcatgcaaatactctcactttctcaacatagttatatatatatcataagctggggttaaatagacagtcagtgcatatatgattatgaccacatgaatattgccactgtccaaccaaaatgacaactatgagtatatatcctttctggtacaacgtattttcttagttaataattacatttttttcatttattctatgtcaatgtgctattttttctaagttcttcaacacagtcttaaaaatatttattaataatttctctcaaatgcttcaagcaccttaatttcttttttttcccctcaagattccctttcctttgacctccattgtttctctgtgtgaactgattgctctataagcataaatgtgattctagacattttagtaccactctcccaagttggcattcttgcattttggatctcatatcttcatttcccaaagacaaatactagagagaaaaaagggagaggaagaagaaggagaaagagaaaggagaaagaaacactcttgggctcacttttgaacaatgagagaaacaaatgaataaatggttcctgccctcccccatgccctgcaggaggaaaagtctgcggcatattccaaaagactcttcagaaggtcatgccaggatcaggcaccagtcatgcacatggtggccagctccattatgcaccattgcattggctctctccactacccaaatttgctctcttgatccctcactcctgctccatgagatcagttcccaaaaatgccctgcatgcaaacctttatctcagtctcagcttttaagggaatgtaagctaagacatgccttttctccctgtgaatagagaggacacggagccagaagacacaaccctgcccgtctgctctcagtagtgcctcatccccttcaaaagccctagatactggcctatgcagctgtcccagggactactgaccacagcttctctatcggtgatacatgttcctggcttcctgtttttaagaagtactggacacacctgtgtcactttcctgaaagaaagagtgctgagattggagggtccaagtggaattacaggctgagacagagagaagatacaggagatgctggccctaacagagagggaaaacaaaacaaaacaaaacaagaaactattcttatgaaataaaataaaaagtctccccatctgagagtccactggtctttcctgaaagccaagtcatttttccatcgaataaatgcacgagtaaaaatcaagaaaacataaacatggataaaagtttcctcatagagttgacaagattattcacagagacagacttcttggtctcaattttctcagcatcctcagagtttactgtgtggacactatgatcacagaaagaatctcaggtgccaaagctagcaattcaagttgtttctggtggaagtcagtgccctcctgtagtcaaatgaatgaactagtagaaaccactgctttggtcagtttcccctctcctgtatctggccttcagcacctcagtagatgcttagagagcacttaccaggcaccagctcccagttgatatgggaaccattagaactctctccagagaaactcagtctggcccagtgtttctgacttcaagcctcatttccatgaatcaggtagctggtgaaattgatagactgcaaactccatgagggcaggaaccatgccttggtcattacagtgtccccagtacttagcatagtgcctggagccaggagcgttctcaatgatctacgctgctttgtcatctgctctgataatgagagtttcttgatgtcaagggctgtgttttgttcatttttgtatccacaaagggattagcactgtatttaacaatagtagaaactgaagaaaaaaaaattgtgtggaattacatttcctctttttcatcagaagtgacttagtcttgctgactttctttctatgcccttgtgtgttgcctctttgtttgcttacttgatttttttgcctcactgagaatgtaaggtctgtgaggacatcggcttgtgtttcttcatccctgatatttcttttgcaaccagcccaattctgatatctagaaggaggtcaagaagtggtttttggaagaataagtgaatgtaatagttatttcggacttgtgttaaaaggcctctttgcacgatttagtagaaaaagcactggagtcttagtcccggttttgcagctaacagggtaatgtaattctgaagtcacatccccactttcggcttcagtttataacctggaaaattaggataataatacacactctacctttatcaaaaaaaatcacgatctaatctgaattagatcatgaaaatgaataccttttaaaaagtgaaaaattttaaacaaacaaaaattaatattattaaggaattttatatatatatatggaattaaatggacaagaaatattatcctaatatactccaagacaatagttttcactcccatacttatccgcactgctatacaattcagtcagtgccaaatcactacccacacacctggttgtccttattactgtggctttgcaaccttcccatcactcagcttatctaaatattctcctgtatctaaaaccagtttttagaatctccaaagagcttgttttccaacatcccccagaaacatgcatttctcaccttactgagccaaactattccccagtgttcatcctctctccaagaaaagtttttattcatttggtcattggtcaacatttttctcagctgtctatttctcaaaatgtatgttctattctactattttcttaaactaatgctattttcaccactggccaaactttgtatttgaatttgaatcttatttgaattttacattctactttggccatatctttgtaatcagaaataccagtgatagtactcaccattcggtgtacaaagtatataaaatagacatgctccatatctattaagtgatgaaaattttctaggtgattttattataaaattaaacatttttagaagaaaatgcttctttagtagattgagaagaaaatattccaggcaatgaccaacccagtgatgtcatcttactgtatatataaatattcatacttgattactactataatcaactacaatgtaaacatttcttttgaagtgctaatcggtatgaaatattctcttcaacctcagattaaatattcaccctcagtccccctcatttcccctgaaatacaatgacattaaattgcctgatctttgcattttctgatttattttatttttatttattttcctttgaggtgggctgggtacttgcaatggctaatagtgcagagctgcaattctaggcactatcagcaggtgttttaactaacacattatgtggattatttaaaaacttaatttaaggtatatgataatatagtactgctttgtatttttacaaactcatatttttttttttttttttttttgagacggagtctcgctctgtcgcccaggctggagtgcagtggcgggatctcggctcactgcaagctccgcctcccgggttcacgccattctcctgcctcagcctcccaagtagttgggactacaggcgcccgccactacgcccggctaattttttgtatttttagtagagacggggtttcaccgttttagccgggatggtctcgatctcctgacctcgtgatctgcccgcctcggcctcccaaagtgctgggattacaggcgtgagccaccgcgcccggcctacaagctcatattttaaagctccattcttagctcagagctgagccattaaagttcaataatgtaagacagcaagaatgctaaagcttgatgctaaacctattcagtaatatggaacagcatttgagatcaggaaggaggtggtcccacaactgggaattaaaatcaaaatggatttgagcagataaagctgcatgtccaaaggaagttggtgggaaaacttgaatctgccaggaattttctgctagatttactgcagatcctgccagattcaagccaagcatagaaaaataagcagaaaacctccttcatcactgcctgtgaaagaatgttgagtccaagagacgagtagagaaagacctctatagattaggacccattaatatacactgacttggcaaaccgagacctagaggcaagtacagaccacaggaccaccagatgatttactaccttggatcctactggtggcaaaagctgctcccagggtccacttccctgtacagaaaactacctcatagaaactgaaaattatatggcaatatacatcaaagagtccttgcactctgaccctgtaatttcacttctagaaatttcttctttcttaaaaaaacaatcaagtatgtacaaagattcattttttaaatgttggtgagagctttatttaaatgagtggagaaggaaaagaaaccccaatgtctcacaaaggagttgatttaaaaactgggggcacattggatataaccaataaaaatcattttatctaaacttctgcttccagccacgccgaaataacagggaccagatttaccattccacttgaaacaacagcaactgagaaggctgcagacaaatgacataaatcaacaatttccaaaacacggtatactaagcaataaatgaccatgatcctgagagatgggaaacaaatgaggcgagccctaacattgcaatagcttattgccttgagagagtttctaggccacagcacaaagaggggaaactgaggcagaacctggtaggctccctgaattgaggcaacagatctgagacagagaagactaaggcagctgaagttcataagacagaatacacgagaggagagaggggcacagagaggacctagagatctgccgagggtgccctcaagtattcagcagaatgctcatctgcgcacgcatgtggaatctacccgagggtgggtggcggcagcagggaataaccattcaaaaagattaaaggaaagaggacctcttcaagtatgtctagaatttagaaaagagtttattgcttagccatatatttcttaattctttaattaatatttcatacatttcattttctctggctctagtcacttatcactgtggtccattttcaaacaaagaatcatttcacatattgaggaaacaatatatgaatagcctgtctggcttagataaagagtaaaggcaagagaccaggtgcggtggctcacgtctgtaattctggtcctttaggaggcagaggtgggcagattacctgaggtcagaagtttgagaccagcttgaccaacatgatgaaaccctgtctctactaaaactacaaagaagtagttgggtgtggtggcacatgcctgtaattgcagctattccagaggctgaggcaggagaatcacttgatcatgggaggcggaagttgcagtgagtggagatcacgtcactgcactccagcctgagcaacagagcaagacttcatctcaaaaaaaaaagtaaagacaagaataagtatcacccatatggcatgaccaaagtttttggtaaacctagggttttttttctgttgtcagtaataaaattgcccttaaaaactagtttttatttctcattcctgaactcatttacatataatgtcgaagtatgataaattcaaactatgctgacacctgtacgaatgtggcttagtatgatataaagtctttatactttcaccaacttcaaacctcagtttctactgttataaagttcatttcactctctcttgtgaccatttaaatactttcacatatttcatcgcatttttcatcttctagggctgaggactcctaattcttaagaatatttctgttatccctataattactgtcgtgtctctccaggcattcttttttagtgaacagttgtcattaatcacttccagaaaggattcaaacaccatctctacatttatccttccaagtgctgtgactattgccttgcgaactacattttccaggctcccttgcagctaaggtgcagatctgtattcagccaagtatttgattgggagatgagccatatgaggaacaggttaggcaggggcatcccttttcttggtttaggggcagtggaggccatgtggtctgggttaggcagcaacagcatcttcttgattgggccaggagcagtaacttcctgtttgggcccatttggctgcatattctgttgctggcagcactggaggcagctggcatagggataggactgcagccttcttatgaggctgatggatgggtggttctgggcatcactcctggaagtcgagcctagaatctttttctccagtctgcccaatgattctatgagccttctgcctccccaaatcctgatctgcttacactaggtaaagcgatttcctttctttcttgtcccttagcacacagatatctcacagtgtttagtctgagacccaccacagctttcattccagcatcctttaagctgagtatcagacctggttcactttttcactgcagtacacttggctcattccaatgaggatgacttcatgtttatagtgatttctggttcctttgcttggaaatcctaaaagatagaaaagagtctccagttgctgcagacgcaggcatgagatataccgaaaactctccaaaattgtctcttggaatgtttcttcattacttcactaggtttctttctaaccttcagagctagtaaggaccttggattaaaagggccattgaatttctagtttagttaagaaatattttcctcatttcatgggaggggggaagcagtgcagactaaactcagagcccacatcatgttgttcttaccagttcaaatcaaatcacggtttccagtcacttggctaatatttatccttctttaaatcttgatgaaatgtctcttcctcaatgaacacttctctgcccctcaacctaaatttgttcccctcgtgttactgttttaaagaaccctgtaatttctatgtatttctgtgtgattatttgtataatatctgtccttcctattaacctctaagttccactaaatgctctgtgttcagaatagtgcctggcacaaaggagtatgacaaatagtgatgagtgaatgaatctgagccatcagacatgtatcttactttgtgctgggctgtccctcaagtgtagatgttcctagtgacaatcccattaattcaaacactgactggagaggattgaaaacatatgaagcagtgcttttggaactgaggctgtagtccaatatgactggagataaaaaatgaagactttaaaaacagaattcacataaaagcaggtatcaacatggaaaactgcagaggatgcctgtatacacagtgggcacagcagcagcattagaccaatcacctccaaacttgaggttccaggctgaggtgacagatcagagtgaaccaggcaccgtagaacaatgggaacacttagattcctgacactggaatttgctgattcttctactaacgtgtagcaagaaatttagccttacccaaagtcaggtctggtctttgtcccagttcctgggagataacctctgaaggctcggaatttcctgaattgttggcatgtctttataattgatggtggggtccttggaccacacttaatagtttctgctatcaagatgactcattgtgaggctggccacaatcaatggtctcaggatgggggctggccatgccagaaagaccaaccatataacatagggtggagggtttgtgtcacaacctagagagtgagttcaaccacacaggctatcagtcatctgatataatgaagccccaataaaaactctggacaccaaagctcagctgagttttccagactggcaatattccatgggtattgtcacgccttgatgctgggagggtaactcatccctgaggacagtggaagtttcacgtttggaaccctaccagactctgccctatgcatctcatcccttggctgcttttaatgtatcctttctctgtaataaacgaatcacaagtatactaggtttcaatgagttctatgagtctttctagtgaattatggaacctgatttaggaaatacccaaccttgccattggtgccagtagtgagagtggtcttgcatgaacttatctcccctttgtagttgagtcctagcgacttacagttgggggcagaagtcttatgtagatttagtctggaggtctatgaccttaaccttgcagtttggctaactctgggtagctacattttgtattgagcaactctatatgaataaaagaagttttgttcatataatgccttaacagtgaatcaagtatatcaagaaagttttttaaaagttaaaagtaggcaagtctactggtaataaagtaggcaagtcacaaggtaattaaatgcctacgtttcaatgattacacatgttgcttagaacatacacatatatgagatcatcacgttaaaatatttctaacacacaggctggcaacacctaacaataataataattagtaattgtctagttcttactactaactggtttctgttctgagtgttctacatatattaactaatttaattctcataagaactctggttattagccaggtttgtagaagctgaggcacaaggaggttaaatacttcgccctatggcacactcccaaaatttgaatccaaaccatccaactccatagctcatgctcttaaccaatgccccatacagcttctcagaaggcaatcacttgaaatttctctctgatcttatagaaaggtgttagtagactggttatcttaacgtccaatcccaatcatctttgtagcaaagtaatatttttatatgaacatgtcagaggcatttgaaccagagcaactccatcttgaataggggctgggtaaaatgaggctgaggcctactgggctgcattcccaggaggctaatgcattcttggtcacaggatgagataggaggttgacacaagatacaggtaataaagaccttgctgataaaacaggttgcagtaaagaagcctgctaaaatccaccaaaaccaagatggcgacaagagtgacctctggtcatccttattgctacactcccaccagtgccacgacagtttacaaataccatggcaatgtcaggaagttaccctatctaaaaaggggaggcatgaataatctaccccttgtttagcatataatcaagaaataaccataaaaatgggcaatcagcagccctcaaggatgctctgtctatggagtagccatacttttattcctctagtttcttaataaactttctttcactttactatatggactcaccctgaattctttcttgcgtgagatccaagaaccctctcttagggtctggattgggacccctttccagcaacaaagagatgtgtattttatttctgaaaatacttttttgctttgttatcattctcatgttaggccagcagctcaggaagtcctggtctccttcctatattggaaaagggagttcacaatgaacacaaaagaagaaaggataaatttgaaaattcctctggagacaatagaatggaaaaaaggggttttgagtttgggttacgacttttgagtttaaaaataaatctatgcctcaaaaagttctcttagaatatatctgaatacaaaaaccaattatgcaaccctagatttaatgcaaatttcttagtttctgggaatttctggggtgatggagacaaaagcaagaaagtaagacatcagtgaagatctctgcccatctccacataccctcccagcagtggggtgggaggaggcaatttttagcccccaaataggatgttaggaatctgaaactagaggagattgacaactaattcctctcagaaagactgagtgacagtatcctgcaaatttccaccagggcagagacagctgtgcagtagtgccaataggcccagagagcccaagacagccccattctgccagactggaattagagtagttgaatttttgcatgcacacaaaaagcatagaaattaacagagagagacttagtggacctggatgggtgtcaatattataataaaaaggatgcagagcatatagattaacagccagagacctacagggactcagacatcaggacattagaaacaataatgtcccagactggaccctaagcactgcaccccaacagatgccagtatgggccaggtgtccccaaccaatgccagaccaccagttaaggcctctacattccaccccaaggatggcgaggaggaaatctgaactgatggaagacatcctgaattgacttagaaagtcatgattttactgagaaaaccctgtatttacttaaagcaagctttctgacaccacgcaaagtggttaccagagttagaaattaggctgttatagaaaataaagctatcctggattgaacatctgagtaaattacaaaacatttacccgctacatctctattcaccagatagcgaactcaagcattcctctgcccctacataaatgacaaatgacattcacgtgtattacatatcccctcaggcctaactagggctgtgtgctgtttccaagaccaaaatgtcacaactgtaaaccactcacctggatacttgctataagaaatagcttggattagtatggaacttggtgtaaccctcaaatatgggagtttgtcactagaggtaccagaggaccacattctctgttaggggacctcgatgacagtatattacaatgaaggcagtgactggcaaacagcagcttcaaataggcatgcaaacaaacattgagaaacagtaagcacataagataactcatttagacacttttatatgcagcatgtataggatttaaaataacattcccaagttaaactgaaaccattactatgtaaatgccacagccaagtcaaatgaaatagtaaataccagccttgcaaattggtctccctcaagggcactcaaaagagttagactgcgtgctgctgccttaggaaatgtcctcctctctatcaatcatttctgctttgacatcaaacccattgaccagcatatgttttggaatttctgaacaactgactttcaaggattcacattcattctgcactttcttagaaacctcacaggagccactgttgccaataaaataaaataaaaaaacacaaacattataaatctaaccccaaaatgggattgcttcaaaagagaatggacaccccactccctacattgcttgtacacatctgtgttgattctcttggtgaactggcccatgcaagcaggagctcatcaatcagcagttgtcaccaagtgcaagtcagaattgctcaacagaaaaattgagtctttttttattccctattgtcacctactaaaatgtaagttgcttgttgatctcatcacactgagctatgtttcagggaagtgttgaaaaggcccagcctgcgcatattcttgaaattttgaaataatggctcagtgaacagatgtatactttctcccaatggctctttgtggaaatgaattttttatgagcccaaagtatctttgattcatccctgattaaaagtcaggttaaaactaaataccatatactttttgaaagacattttaggaagttattgacacaaggacttttgagactgaaaatcatgggttaacaataaacctttgtttggtgaaacaaaagaacagtacaggacagaggtgaaaagcacaggctccagggccagagtccctgggctcagattcttcacatttcagctctgtaaccttgaacaaactactccagttaatcataacttcagtcttttttaaaaaatgggatattaaataatgggtattaaataatagggttgccatagaggaaaatataaggtaatatttatatgcacataaaacagtgcctggcacagagccagtgttcaattagtactagctattttttggatacatgtagataaaagaagcatttaatgaatagttacatgcccattaacataaaatgtaagccacttccatattctgtagcttatggtgacaaagttttctgctcacgtattaactaaaaggagcgaagagcttccctataatattgaaaattttatcctaatggttccaaaggactgttttctaggaatgtttgctacagaaacctcactggttagatgtttgttggagcacactgtgattattcattgtcactgcaaactgtgtttaccacgggaggctgttctgactcaccactttgtgactcaccgattagtaaacagctaaatgtcgcattgctgatttaggtgtaatttactgcgtcaatataaaaggactctgcagattctactaaaatcaagaacatagctaaaggcattcttcatcgtaaaaacgaattttagaaaacaagatgactctaacagagttactttaaaatacaatgcaatatgtctattttaaatgacaacaatatctcctgtctgacagcattcaacttactttcagatttattcggtgttttctcaacttcacgagaaattgaaaatccataaaggagggaaatatgtcttgtttcattttcaatagttatatcaagaatacttttcaaaagtatttcatatttaccatgttttcagcaagtaactcttaacaatactctgagagtatgatcgtgatgataggtaaaaatcaggatcactcccttttcatctttacctgtgtagagcaatgtaatgtgcccttttcccaaaccctctgactccatgagggatgagacacagagggtgtggctgagggctcctaggaccgggactccttggctgatgtcctgtggcctgcagtccagggcttgcaggtgatcaaacaggaaaggagaaatgagggaggcacagtgctacgagcaggcctgtgttttcactgggaatggtggttagcagatgctcagatgtgtctcttctccctcacactcacctttggcttggctcttaactcctgcccacccctccctaaactctctgtggaggtccggaactaagcgagtcacagacacccagcaagcagtctccagagaggcctctgtgcatgaagacttccccagaaggatgcccactcttcctacctggcctgggaactcaaaatggacacaaaaactgaagactgtgagagagggtcagcttacaggccagaaactgacaataagattgatgttcaaatagctgaattattgattcttatcctgagatccactcctcattttcagtcttgcgataaaccttagtgaggggtgttttgtcttgtgttctatctattggtggatggattccaacttttctgaatatggggacgtaatttttaaagccaaaaattttgcagatagtaatggatttttaacatccattgattaacaaagtactatgaaaacagtaacacttttaaataaatttgctttcagtttttttaactaaacataatacatgcatgtatatatttaaacttatcacactgcctggcacagtgaaagcactcaaaaaatattagctataattactcctattgctgttgtttactcaatcataggtaatgcctggtatacatgtggattcttagagtccttatagaacacagcagcacataaactatactaggctctaaatcttctctcccaagaacttcatctgatgcatatttcaccagcaacagcagcatttagcactgtcttgctgtagaaaaattcttgataaattaattgaattaaatttatgtcacataaaatgtcatgaagagatggaagtgtcttggtcctgtatcttagcattttcaaacctctccattgtttttttttaatgtatagatttcacctgtgtaaaaattaaaaataagaaaactgatcctaatgctcttcatgaaaggcaagaaaagccttcttggaaagcaatagttatgggagagttctgccagaatttgttctcagaatgacatgagaacaattttattctaggaaatagaggtgctgaggactcagcttctgacctaccctagatcataaacatcactgcactaacagccaattaagaataatctaagctcttgtccttttataacagacctggttatgtcctaaaaaataagagcatttataaataaagaagaaagtttaacagttcaatagatcaacgtgactttccagctcctctctgaacaggtgacatctatttccccatcccttgaatctcagttggccttgtaacttatgtggatcaatagaatgtggccgaagtgacagctgtgcaagttctgagccctcacctcaagagcctttgcactctgtcacctgctctctcagacctcggcttttttccacgtgaataaaccgaggctaaccttctggaagaaaagagaccatatgaaacagaaccacatcagcctgaggccctggacatgtgcgaaaactgaagatcagcaaagctgacctgaaactgagtcacagttgacctcagatgcatgagaatctaaccaaggctgaaaacatttggttgaatcccacctcaatttctgacccagagatagcaactaatgtacaatatcatgattgttatgcagtcattagaaagaatatattagataaatgtgtattggcctggaaaaggtatcatctaagtatgcttaatgattatccatcttaaaaaaaaaaatacagaaatagggttgtagaacaagggtcctggtcatactgagcttacacttctgttgatgaaataaaacacatatgagatgatgaggaaataattcaaccaacaagaaaatactttacaaccaagagacttattaaataaaatgggtgcaccttttataataccaataagtataatagtaccctaacacagtagacacatttctgttgtctgtagttatctttcagaaagccgtcttgggagaacctttaaatgacctcagagagcgaaggtttatgtaaataaagaattaagtcagtgtgggtagaggttcagcaccagggtgcaggaagttatgtgaagattgtggtatggggctcatgtctagaaacagagagtggccccatgtcagcctatgagggaggagccaggccccacctcaagggtctccttcaggaagatctctgtgggaaaggagcaggggttccaggttttcagcaaagcctgtgcttgggcaatccatcaacacggttagtccagggcccacatataacctctgacccttctcacatttattttctctgtctggtacttcctctaaggagcatcctgccactcaccagcccctaccaaacacacacacacacacacacacacacacacacactcatactctatttgctcataatctcataatcatccatcaggttttaactgagatagtacttcttctgggaactttctctggtgagagatcctcttatgtggctcttgacctaccaaaccagaagcagttgtgcaattagtgatcattattctcttatttattatagtatctccagcacttagcacaatatctgcagacagtgggcacgcactgaaaaaaaaatactttttgaatcaatgaattaaatagctagttttcattcaccctaagaaaataccaaacattggtcttaagaatgtcacaggcctgaaggtataaaggaggaagcaaggaaacaaaatcaacagacagagccttggcaaaatctgctgttcaccagtcctcccagcaaatccatttcccattctggggaagcaatgccaaacagctccaggaactctgtacatggtctgtcaagtatccaagacagaagggagacttttcaagagtggaagcccagcctgcttgctccagtctggactgtgctggtctgtattttcctagtcagggatggccccaacctgggactgtgtctcctctcaggctctgaggccttgggaatggaggaatgtcgtatctgccagtggtttaggtctgtattgtgaagaattaactttcccaaacagagatctggccttcaccctcagctgctgggtggtgattcctaggctcctggattgtcctgccagataggagaatctttgtttgcctgagggctttggccaccagtcagtctaataacgtgatatatgatggggctttggaacatgccatgtgaattctgacctctggaggaaccagagatcattagctagaacctccaggaggggctggaggttaaaggtcagccacgtgggcagcgtgtgataaagctccaggaaaaactctggacaccaaaggctcagttgagctcctatcttctgcaacactccatgagttctgtcacacaacatggctgggaggaggtaacacacccaggtctccctgggagaggacaaccagaagcttcatgtttagaaccctcccagatttcacccaatgcttctctccctttggttggttctgatttgtacccttttgctctaataaactatgatcatgatcactttcctgagttttgtgtgttgtttcatggaactatcaagcctgagggagcatgggaactcccagatttgtagccagctagccaggagtaaaggcagcctggggacccggaacttgtggctgatgtttgcattgagggcagtcctgtggaggactgtgcccttaacctgtgaagcatggccacctcccggcagttgctgtgagaactcattgcagggccactcagggaagtgtgggaaattgaaccaatgatgcctgacaccacggcttcctgactatcctctaggaagtctatcaggagatgcccctgttcacttccctgtaggttccagcgaggctcagagggtcatcagttctaccaacaatatctgcgcagaagagagtagctgtgattttattttagtctgaaagaacactgtttgttgttgattaacacctaaatattacaaacagtctctcagtgtgagaagatttatcttattctcctgtgtaattagaatgattattcaacaaatggatgttatctagcgaacttccagaaagaagccaaatttatcaacctcaccaactcacacatacagccagggatctatattcttgtgctctcagagaaggcatggagcttggactgacagcaaaagaccaacaaaacacccagaagccagtcaaaaatggcccaggctgcaggatccttgaaagacctgaaaacacacgaggaaaaggctgggaaatagtaatggtgagtggacctctgcggtctggagaggaaactactggttattttaggaaaaacattcccataatggggctcagggaaaaaagaaagtaatggtatccaggccttattctcagaagcattctcctccctgaatccagtatctgaggtaactgagcagcagataaaaatagcattttctcgaaacaaagcaaaacattaaaaaaaaaatagcctactgtctaagcttgtctcccagtggaactcaggaaccaagccagcttctccagctgtgcaccttggctgtgtgtctcagatggaacatttctgacttcattccctcctcctcccacgtcactcggtaaggagggtgggccaggacaagcagctcagacagctgttcctacagctggccttaccacaatcccccaggcctcacatacatgcacctctgggccctgcctgcctgcactaaaccatccggcccagtgcaacagaccattctttcaagctgtctctctcctactcacaaccatcccaggagtcctcttaaaactattttttcggagaacacattgtgctttgccacactgttccatttatctcttggtggccattccatttgcctcagcaactctctatcccattttttagtactacccctgaacgagaaggcaatcttgttcatcttgccaactctaaatccttatcgcaatcgtgttgctttagattgcattcatgtgtgaataggtgtggataggtgtttggcactgtgttagatgccaaagatacagtgctaaggaaaaaacatacctgacaacagattttattatattccaacgggaaagataggataaacagatacataaacaatgtatatgcagattaggatgagtatcatgaaagcaataaataagaggctgacgggttcaatttaagtggggtggccagaaaatgcttttccttcttctgagagaagtgagcgaggggcacagagaagtccgaattgttacactaatgaatatttctgagcttgaaaacacaaaacaaggggagatgaggttccactcaacagaggtatatacacatcaattacatgacccagaaaacctgattcagacacaccttgctgacactactccatagggaaggtcattttcacttgtccacatctaccacacctccattttcactctccctgagataaaaggatgtgcatttacactgtgtctgcctagcgaaattgtaccccccgctgaataaagcacagttagttgagattcacgaacaccaagcctctctttataatgactttagagagctgtgctaactgaccagcactctggatacttatgagcagatgtctggtagcaatggaacctctcatgaccacccaggctctaaatgactgttcagctcagcagctcattatcaccttcctggagttagagctccaacataagaataaatatctccatctagtattatcactttttaaatcaaaatctatattcagcttgagagtataaatatcaaaatttcagggcattttttctaacttttcttgggagattttagtaaaattccagggcagattgctgaaagtacaatctgggaacagaaactaatatagtgtcacatcatatgaagttaacctctttttcttatgcaattctatcaaacttcaaggaaattctttggaaatctgagccccactacatttaaaacaaaataggtctatcatgaaatgcctaataaaggttgatcttacagtgtgatcgaggtgctatgcagatctgagacaggtggattattccagaatgagaaagaaacacaggatgaataagtcgcactaatggcaatagcaacttctgggaaacaccaatttctggcagctgttgctttcgtcaacactttctcagcaaaattgccacagccatttctgagagcttagaagcactgctaggaatctctaataggagtctgtttaatgggaattcctattgactacagccgcttttgcatataggagataatgttgagctaagggaatctttcaatgattcattcaaaacatgtttatccaccatgtgataaacattatagtcagtgccatagtataaacttgaataatgcataatccctgcccccagggaactcacatccttctcgacatgcctagcacaaacacacagaattataataaaagttgtcaagaagaagatatgggtggcgcattatgcaagcagagaaaaagggactgccttattcatttagaagctactggccctctctagagattgttggtcttccagtacatctaaatattcttcaatcgtaaaatgccatgaagctagaagtacaaaatgctgtattatcagttaagccccctatttttttctttttttttttttttttgagacagagtctcattctgtcacccaggctggagtgcagtggcacgatctcacctcactgcaacctccacctcccaggttcaagcagttctcctgtcttagcctcccgagtagctaggtttacaggtgcatgccaccatacccagctaatttttgtatgattagtagagactgggtttcaccatgttggccaggctggtcttgaggtcttgaactcctgacctcaggtgatccgcccaccttggcctcccaaagtgctgggattatgggattacaggtgtgagccaccatgcccagccagttaagcctcttaaagaatgtcttgaattataacaaacacatgatgcctatcttcccccatatctttatactgacaaaattaggttcaaaatcaaggcatggtcaccagaaatcaggtcagagggatcaagaaaacatggacagtgaagtgatttcacttccatacaggtgataaatatttcctaaaatacaggtagatgtgtggcacaaaacctccagactctgagcatcaaagtccctcctaataccagaaaggaaggacccagcatttgtcatctcagtctcagacaaatacatactcagagggcctcaggaacatatgtaaactaaaaaaaaaaacatgagaaattgagcaggagcctgagtttgggcttccttgggtgggtactgtattaatttcccataacaaaatactatggaatagtacacagatgtttctttcctcacatttttggaggcaggaagtccatgattgaggtgtcagcaggcttggattctcctgaggcttctctccttggcttgtgaatggtcatcttctctctctctctcttcacttggtcttttctctgtgcacaggcatcctttgtatttctccctcttcttataaggacataaatcctactggattaggaccttacccttatgacctcatttaacctcagttaccactttaaaagccatatcttcaaatacagtcacattgggggctagggcttcagcatatgaattttaggaggacagaattcaatccataatagatggggacagggcaattctcttcctaggtaagccttcccttagggccatttacggggagataaacaaaccccaatttctactgagcaaaagctcagagaccctgaagtaactgcagttagtaaatgagaaagacagaatattttcaatatcttcaagtctaatacctagaagtgatagaggtttattcacattttctcccagtcattttcttattctgtgtttatacagcatttctgttaatgacaccattattttcagaaatcaaaatgaaatcttaatgttatcattgactctccccccttccttgccttcacttcaatcataattttccatgtctatgtaagtattcttttggctatttacatattcatcagaaacctatttcagctcttattaattttcatgaagatcactaatggaagccacctattgttcatgcttctagttcaggtgctcctaatatgggaactgtatagtttcagttgatctataacctttcaccccccaggttttgtggttgtttttatatacactttcacacatataagtggtaatgtgttcattgctattatcagttgttcaaagtgggtccctcacccacgaacaggttaaaagccagagctctcctctctcctactacacttgctccttgtaaaaaaaatttaatctttgtgattaacacaattgtttatattcttccccctactcaaatactcccagttacaaacattttaacttgtagtttaaaatcgttcctggtcagcaatcccttctgtagactcttccaaaaattaccatggttcttataatcaatctcacacccaaaagaggagattttagaaaggcatagacaccagaaggcagggatatatctgtctaccacagtccaccgtctggccaccaatgactcacattaccctcacttgcaaaaatacattcacatacatccccaaaggtctcaagaatcttatctcacagagcttcagctcaaagtcaaacttttatgctttaaatcatggctaagttcaaacacagctcctgggcataatatatgaagtacagctcctggggtataacttctctccttctgtcaacctgtaaaactaaagaggcaagtgatctgcccccagtacacccgtcatacaattttgaaacaggcataactggtaggcatgggataacagctatagacatattggttcaaagggaggaggggaaaaagataacaaagagtcgttggtccatagcagttctaaaatctagctgggcaaatgttgggagttcaatgattaggttttagagcctaagattaatctcggctattggggaaaccagcccccagtatttcaacgtaggttcttttctattttccctaagtgtcggccagtctgagaaataaagagaaagagaacaaaaaaaagaaattttacagctgggtctccggggttgacatcacatgtcggcaggttccatgatgccccctgagcctcaaaaccagcacgtttttattatggatttcaaaaggaggggggggtgtatgaatagggtgtgtgtcacagagatcacatatgatcacatgcttcaagggcaataaaatagcacaaggcaaatgggcaggacaaggtcacaaggccagggcaaaattagaattacagatgaggttccctgtcccactgtgcacgtattgtcattgataaacatcttaacaggaaacggggttcaagagcagagaacaggtctgactagaatttcatcaggctggaatttcccaatcctaacaagcctaggggcgctgcaggagaccagggcttatttcataccttatctacaactgcataagacagacactcccagagcagccattttagaggcctccccctgggagtgcattcttttcccagggctgttccttgctgagaaaaagaattcagtgatatttctcttatttgcttttgcaagaagagaaatatgactctgttccacctggccccgcaggcagtcagactttatggttatcttccttgtttcctgaaaatcactgttatcctgttccttttctaggtgcccagatttcatatttttcaaacacacatgctctacaaacaagctgggcagataacacaatcattacaggatcctgaggcgacatacatcctcagtttatgaagatgatgggattaagagattaaagtaaagacaggcataggaaattgtaagagtattgattggggaagtgaaaaatgtccttgaaattgtcaccatttatgttcttctgccatggcttcagccggtccctccgtctggggtccctgacttcccacaacacttggctctaccctcttgcctcttagcaccaccctctatcatccttcttctttaatgtttgcagttgagtagttttatcagcctgcttcctgccagtagaaatgttggggtctgacagcctcctttcatttcattttgtagtctttctatccctttcagtccaagccagtagtgtttctgctgaaataattttctcaagatctttgtgcatctaccatagatttcaatgatgttctgaccatcagaaaaaaacacacccacagatcttttccagacagcatatatttttggctcctgctcggatggctgaggggctacagtttgattgagtggatctaaaaggcacattcttaatctccttaaggagtcctttgtgccattgaatattctcaccttttagtctttgaggtttttttaacttttattttgagttcaggagtacatgtgtaggtttgttataaaggtaaacttgtgtcatggggtttgttgttcagattttttcatcacccaggtattaagcctgggtgtacacattagttatttttcacgatcctctccctcctctcaccctccaccctcaagtaggctccagtgtctgttgttcccctctatgtccatgtgttctgtgttatcatttcgctcccacatataagtgagaaaatgctgtatttggttttctctttctgtgttaatttgctaaggataatgacctccagcttcatcaatgtccctgcaaagggcatgatctcattattttttatggctgtatagtatttcatggtttatatctatcacattttctttatccaatctgccattcctggccatttaggttgattccatgtctttgctattgtgaatagtgctgcaatgaacatatgcatacatgtgtctttatgatagaacgattattattcctttgggtatatacccagtaatgggattgctaagtcaaatggtagttctgtttttaggtctttgaggaacagccatgctgttgctcctaatggttgaactaacttacactcccaccaacagtgtaagtgttcctttttctccacaacctcaccagcacattattttttgactttttaacaatagccattctgactggtgtgagatggtagctcattgtggtttttatttgcatttctctaataatcaggaatgttgagctttttttcatatgcttggtggctgtatgtgtgtcttcttttgaaaagtgtctgttcgtgtcctttgcccactttttaatggatttttttcttgtaaatttgtttaagttccttatagatgctgcatattagacctttgtcagatgcatagtttgcaaatattttctcccattctgtaagttgtctttttagtctgctgatagtttcttttgctgtgcagaagttctttagtttaattagatcccatttgtcaaattttgcttttgttgcaattgcttttgatgtctttgccataaaatctttgcctattcctatgtacagagtggtattgcctaggttgtcttccagggttttttttataattttgggtctttaatccagcttgagttgattttttttgtacatgatgtaaggaaggagtccagtttcaatcatctgtatatggctagccagttatcccagcaccatttattgaatagagagtcttccccattgcttgtttttgccagctttgttgaagatcaggtagttgtagccttatttctgggctctctattctgtttcattggtctatgtgtctgtttctgtaccagtaccacgctgtttttgttagtgtagccctgcagtatactttgaagtcaggtagcatgatgcctccagctttgttctttttgcttaggattgccttggctatttgggctctttttttttccatatcagttttaaaatagtttttctctaattctgtgaagagtgtcattggtagtttgataggaatagcattgaatctataaattgctttgggccgtatggccattttaacaatattgattcttcctgtccctgagcacgggatatttttccatttgtctgtgtcatctctcgtttctttgagcagtgttttgcagttctgcttggagagatctttcacctccctggttagttgcattcctaggtattttattctttttgtggccattgtgaatgggattgggttcctgatttggctctcagcttgactgttattgctgtatagaaatggcagtgatttttttatgttgattttgtatcctgagattttgctgaagttgtttatcagttgaaggagctttggggccaagtctatgggtttttctagatatagaatcatgtcgtctgcaaagaaggataatttgactttctctcttcctatttggatgcaatttaatactttctcttgcttgattgctctagcaatctctttggcctgaaagccccctgaggacaaatacatcagtcaactgtttctttgtttgttgtttgttgtttcttttaaattattctcattacttagcacagatcatgtacaccatgagtgtttaataatatcaatagaatatttgggagcaggaggttattttgcttagttttatgctttcactgttgttatagaacagctgggctagaagacattattaaacataaatacaactggtaaaatatcccagcagaagaaatgctttaaaaatatctccaatcactgcaggagtgcagagaggcaacaactcctccagcttttgcacatcgaataattggtttagttcactccttccacatcacttggagcagcggggagggtggggaaagcttaatgaccaggaaagcctttcataaagtcatcatcaatgttctttataacctaatgtcacttcaatagtccatggttttcaaataaatgtcctacctgcccacagactgaaattttagccaaataaatccataaatttaaacatattgacaatcaaaatggtaaaaagaacttttatttttaacttgtaaaaatggttttagaggtcatcaggaagaataaatgagatacatagccaaaaaaaatttaaatacttgccacatcagatattagaatgtgttctaaagctacgctaattaaaataatgaggtaccaatacaggaataggtaggtagagcaatagaagcattaagtataaacttataagagactcaagttataagttacaagaatttgacatatgttaaagttagcatctcaagccagaacagcatgtcaataaattgttgaaagacacctggataaccatcaggaaaacaattaaattagatccctacctcaacaactaaattccaaaggaaaaagactcataacatttttaattaaaaagcactggaagaatatatagatgaccttttacataactttgaaaaaggagaattatgttataaaaatcacaacaaaggcagaaattataaaagataaaattgacagatttgactaaatacatctttaaacatgtgaatattaaaacgctgtaaaaaattaaaagacaaataaagtagaaattatctaaaatatatatcaaagcaaaaactgcatttctatatgccactggtatataaaaatacttccaaatcagtaaatacaaattgcacacaaatagaaaatgatagaagaagctaacaggcatttcacaaaagaagattataaatgactgataaacacattaaaatgtctattactacataattaaagtaattctgaaaccaataaagtacttttttctgcataattctagggatttatgcttaggaaagaatttgtaataaagatccacacacaaggatatctatcagaatgtagtatataacaccacaaatcataaatgagtcaggtatggtggctcatgcctgtaatcctagaactttgggaggccgaggtgggaggaccacttgcagacaggagcgcaagacctgcctgggcaacataatgagatgctgtctcaaaaattttttaaaaagaaacaatttaggggggcggttccaagatggccaaataggaacagctccagtctgcagctcccagcatgagcgatgcagaagacaggtgatttctgcatttccaactgaggtatcgggttcatctcactggggcttgtaggacactgggtgcaggacagtgggtgcagcctatcgagcatgagccaaagaagggcgaggcattgcctcacccaggaagtgcaaggggtcagggaattcccgttcctagccaagggaagatgtgacagatggcacctggaaaattgggtcactcccaccctaatactgcacttctccaatggtctcagcaaatggcaccccaggagattacatcccgcacctggctcagagggtcccacgcccacggagccttgctcattgctagcacagcagtctgagatcaaactgcaaggctgcagtgaggctgggggaggggtgcctgccattgctgaggcttgagtaggtaaacaaagcagccaggaagcttgatctgggtggagcccaccccagctcaaggaggcctgcctgcctctgtagactccaccttggggggcagggcatagcaaaacaaaaggcagcagaaacctctgcagacttaaatgtccctgtctgacagctttgaagaggatagtggttctcccagcaaggagtttcagatccgagaatggacagactgcctcctcaagtgggtccctgacccccgagtagcctaactgggaggcatccaccagtaggggcagactgacacctcacatggccgggtacccctctgagatgaagcttccagaggaacaagcagcagcaacatttgctgttcagcaatattcactgttctgcagcctccgctgcagatacccaggaaaacagagtatggaatggacctccagcaaagtccaacagacctgcagctgaggatcctcacgttagaaggaaaactaacaaacagaaaggacgtccacaccaaaaccccatctgtacatcaccatcatcaaagaccaaaggtagataaaaccacaaagatggggaaaaaacagagtagaaaagctgaaaattctaaaaatcggagggcctctccccctccaaaggaatgcagctccttgccagcaacagagcaaagctggatggagaatgactttgacgagttgagagaagaaggtttcagatgatcaaacttctctgagctaaaggaggaagtgtgaacccattgtaaagaagctaaaaaccttgaaaaaagattagatgaatggctaactagaataaccagtgtagagaagtccttaaatgacctgatggaactgaaaaccatagcacgagaactacgtgacaaatgcactagcttcagtagccaatttgatcaagtggaagaaagggtatcagtgattgaagatcatgaagtgaagcaagaagagaagtttagagaaaaaagagtaaaaagaaatgaacaaagcctccaagaaatatgggactatgtgaaaagacaaaatctacgtctgattggtgtacgtgaaagtgacagggagaatggaaccaagttggaaaacactctgcaggatactatccaggagaacttccccaacctagcaaggcaggccaacattcaaattcaggaaatacagagaatgccacagagatactcctcaagaagagcaactccaagacacataattgtcagattcaccaaattgaaatgaaggaaaaaatattaagggcagccagagagaaacgtcaggttacccacaaagggaagcccatcagactaacagcagatctctcagcagcaactctacaagccagaagagagtgggggccaatattcaacattcttaaagaaaggaattttcaacccagaatttcatatccagacaaaccaagcttcacaagtgaaggagaaataaaatcctttacagacaagcaaatgctgagagattttgtcaccactagtcctgccctacaagagctcctgaaggaagcactaaacatggaaaggaacaaccagtaccagccactacaaaaacatgccaaatcgtaaagaccatagatgctaggaagaaactgcatcaactaatgagcaaaataaccagctaagaacataatgacaggatcaaattcacacaatattaaccttaaatgtaaatggactaaatgctcaaattaaaagacacagactgtattcaggagacccatgtcacgtgcagagacacacataggctcaaaataaaggaatggaggaagatctaccaagcaaatggaaaacaaaaaaaggcaggggttgcaatcctagtctctgataaaacagactttaaaccaacaaagatcaaaagagacaaagaaggccattacataatggtaaagggatcaattcaacaagaagagctaactatcctaaatatatatgcacccaatacaggagcagccagattcataaagcaagtccttagagacctacaaagagacttggattcccacccaataataatgggagactttaacaccccactgtcaacattagactgatcaatgagacagaaagttaacaaggatatccaggaattgaactcagctctgcaccaagtggacctaatagacatctacagaactctccaccccaaatcaacagaatatacattcttctcagcaacacattgcacttattccaaaattgaccacatagttggaagtaaagcactcctcagcaaatgtaaaagaacagaaattatagcaaactgtctcttagaccacagtgcaatcaaactagaactcaggattaagaaactcactcaaaaccgctcaactacatggaaactgaacaacctgctcctgaatgactactgggtacataacgaaatgaaggcagaaataaagatgttctttgaaaccaacgagaacaaagacacaacatgccagaatctttgggacacacttaaagcagtgtaaagcagtgtgtagagggaaatttatagcaataaatgtccacaagaaaaagcagaaagatctaaaattgacaccctaacatcacaattaaaagaactagaaaagcaagagcaaacacattcaaaagctagcagaaggcaagaaataactaagatcagagcaaaactgaaggagatagagacacaaaaaacccttcaaaaaatcaatgaatccaggagctggttttttgaaaagatcaacaaaattgatagactgctagcaagactaataaagaaaaaaagagagaagaatcaaatagatgcaataaaaaatgataaagaggataccaccaccaatcccacagaaatacaaactaccgtcagagaatactataaacacctctacgcaaataaactagaaaatctagaagaaattgataaattccttgacacatacaccctcccaagactaaaccaggaagaagttgaatccctgaatagaccaataacaggctctgaaattgaggcaataattaatagcctaccaaccaaaaaaagtccaggaccagatggattcacagccaaattctaccagaggcacaaggaggaactggtaccattccttctgaaactattccaataaatagaaaaagaaggaatcctccctaactcattttatgaggccagcgtcatcctgataccaaagcctgacagagacacaacaaaaaaagagaattttagaccaatatccctgatgaacatcgatgcaaaaatcctcaataaaatactggcaaaccgaatccagcagcacatcaaaagcttatccaccatgatcaagtgggcttcatccctgggatgcaaggctggttcaacatacacaaatcaataaatgtaatccagcatataaacagaaccaaagacaaaaaccacatgatttttgtctcaatagatgcagaaaaggcccttgacaaaattcaacagcgcttcatgctaaaaactctcagtaaattaggtattgatgggacatatctcaaaataataagagctatttatgacaaacccacagccagtatcatactgaatgggcaaaaactggaagcattccctttgaaaactggcacaagacagggatgccctctctcaccactcctattcaacacagtgttggaagttctggccagggcaatcaggcaggagaaagaaataaagcatattcaattagaacaagaggaagtcaaattgtccctgtttgcagacgacatgattgtatatctagaaaaccccattgtctcagcccaaaatctccttaagctgataagcaacttcagcaaagtctcaggatacaaaatcaatgtgcaaaaatcacaaacattcttatacaccaataacagacaaacagagagccaaatcatgagtggactcccattcacaattgcttcaaagagaataaaatacctaggaatccaacttacaagggatgtgaaggacctctgcaaggacaactacaaaccactgctcaatgaaataaaagaggacacaaacaaatggaagaacattccgtgctcatggataggaagaatcaatattgtgaaaatggccatactgcccaaggtaatttatagatataatgccattcacatcaagctaccaatgactttcttcacagaattggaaaaaactactttaaagttcatatggaaccaaaaaagagcccacattgccaagacaatcctaagccaaaagaacaaagctggaggcatcacgctacctgacttgaaactatactacaaggctacagtaaccaaaacagcatggtactggtactaaaacagagatatagaccaataacagaacagagccctcagaaataataccacatatctacaaccatctgatctttgacaaacctgacaaaaacaagaaatggggaaaggattccctatttaataaatggtgctgggaaaactggctagccatatgtagaaagctgaaactggatcccttccttacaccttatacaaaaattaattcaagatggattaaagacttaaatattagatctaaaaccataaaaaccctagaagaaaacctaggcaataccattcagggcataggcatgggcaaggacttcatgtctaaaatgccaaaagcaatggcaacaaaaggcaaaattgacaaatgggatctaattaaactaaagagcttctgcacagcaaaagaaactaccatcagagtgaacaggcaacctacagaatgggagaaaatttttgcaatctactcatctgacaaggtctaatatccagaatctacaatgaactcaaacaaatttacaagaaaaaagaacaaacaaccccatcaaaaagtgggcaaaggatatgaacagacatttctcaaaagaagacatttatgcagccaatagacacatgaaagaatgctcatcatcactggccatctgagaaatgcaaatcaaaaccacaatgagataccatctcacaccaattagaatggcgatcattaaaaagtcaggaaaaaacaggtgctggagaggatgtgcactgttggcgggactgtaaactgattcaaccattggggaagacagtgtggcgattcctcaaggatctagaactagaaataccatttgactcagtcatcccattactgggtatatacccaaagcattataaatcatgatgctataaagacacatgcacatgtatgtttattgtggcactattcacaatagcaaaggtttggaaccaacccaaatgtccatcaatgatagactggattaagaaaatgtggcacatatacaccatggaatactatgcagccataaaaaacgatgagttcgtgtgctttttagggacatggatgaagctggaaaccatcattctcagcaaactatcgcagggacaaaaaaccaaagaccgcatgtcctcactcataggtgggaattgaacaatgagaacacttggacacaggaaggggaaggggaacatcacacactgtggcctgttgtggggtggggggaggggagagggatagcattaggagatatacctaatgtaaatgatgagttaatgggtgcagcacaccaacatggcacatgtattcatatgtaacaaacctgcacattgtgcacatgtaccctagaacttaaagtataaaaaaaaatgaaggaaggaaaacaaaaaacgcaaataaataaataaataaataaacagtttaggccgggcacagttgctcacacctgtaatcccagcactctgggaggccgaggtggccagatctcctgaggtcaagagttggagaccagcctggacaacatggcgaaacgctgtctctactaaaaaatacaaaaattagctgggcatggtgtcatgtgcctgtaatcccagctattcaggaggctgaggctggagaatcacttgaactctggaggtagaggttgcagtgagctgagatcatgccactgcactccagcttgggtgacagagcaggaatccatctcaaaaaattaaaatagaaaaataaaaataaaattaaaattaaaaataaacagtttaaacgtccaacactagtgacttggtaaaataaaatttagtacatccacataatgtaatgctattgtcaaatgaagttatttatggatatttgttgacatgaagaaatgtttgtgaatcataatatattagtcagttgaaagaaagttgctgacattataaactgatgtttggctaaattataagtacagatgcacgcatatagtactatgggtatataacagggttagtatatatatatggatatatgtgtatgtgtgtgtgtatatatatatatagtgtgtgtgtatatgtatatatatagtgtatatatatacacacatatatgtgtgtatatatagtgtatatatatagtgtatatatgtgtatatatagtgtatatatatacacacatatgtgtatatatatgtgtatatatatacacatatatgagtgtgtgtgtgtgtgtgtgtgtgtatatatatatatatgctttcttgctctgccagctgaaaagcaataacaccccagtagcaacaagcatggctaggtaccagaactagctttgtaatcccattttccaagaaaataaatcagagctctctggagaaatgtctgattctagggctgggacaaggaatatacaagataggtctggagaaagttacagtgccagaaagtaagcaagtgctcaaaaacaaaggaaaaaactcacaatgatgggagtatgtaaaaaggaggtaagagccaattggaaacgttccgtttggctaaagccaggacaattggagcaataaaataaagtagtactgagtaataatccaaggtgtaaaacaaatatcgtgtgtcaatactgatataaataaatgattgaataaataaatggggagaatagacaaatctcccatgcagaagaattccaaataatttacttggagcataaagtgatagaatgtaactccctcctcaagtgtgggccatacacagtgatgtccttccaaagagcacagtatggaaaggggtaagaaagagcaactttacagtggtaaaatctgacaaacatggcctcagtcaagtgatcaaggttgacgtcaacagtagtaagtcacgttgacagtatgaaccttgatatggtgtgaggagaaatggcatgctacctatggcgtcttcttcccaaaaatgtataacctcagtgtaatcatgaggacatcatcagacaaatcccaattgagggaaattctacaaaatactgaaagggagctctttaaactgttaaggtcatcaaaaacaaggaaactctgagaaattgttacaaccaaaaggagtctaaaaagacaggattaaatgtaatgtggtatcctggctagaattctggaacaaaaaaaaaattaggtaaaattgaagtaaatctaataaagtatgaactttagttaataacaatgtatcgatattggtccattaactatggcatgtgctgctgtaagaagttaataagaagccacactggatagggatttatgagaactctgtgtactctcttcacaacctgcccacaaatccaaactattccaaaattaaatttcttcttttaaaactaagtttcatatgacttgatttttgttaagggaggattacaattttatgtatagctgtgtcattatagatatagctatagacatggatatagatatatagatatatagaaatatagaaaagcatttagctgtgctgtctaatacacagccattacctagatatagctattgaacacttggattgtggctaatccaaattgagaagtgctgtaagtgtgaaatgtacaacagatttcaaagacgtaatatgaagaaaagaatataaacaatatcattaatgttgtgttttgagacagggtctcattcttttgtccaggctgaagtgaagtagtgcgatcacagatcactacagcctcgacctcccaggctcaagcaatcctcccacctcagtctcccaagtagatggaactaaaagtgtgcactgccacacctaatttttccatttttatttattttttatttctaggtttactcaaaaacattattactcaattcataaaatagtaattcagttagctggtgcctaaagactgaaaaaattgtaattttccaggcatttacagtttggggaacaaaaaacatgagacctacttgaaaaaatagaggctaataaataattaaggataaggctctaaaaaataacagtattgcaagctatttttaaagagaaaaatttgatagcaaaatgtttctctgactttgtaaatgcacaagaaagatcaacagttttatcacttgcagaaaaggcaattaatgtaatagaaaatgtgatgataaacttctaagaaactaagtgcttatgtctatttaacaatagaagttttacctattaccatttactattcatgtgtcgacagcaatccccttctctcccaactaggcctttcacaattatggaatatagacataaaatattattcctagatacattttacaaaataaaaatgagtaaatggaaaaaaggcaagttaaagtagttatatatatatattgaaaagtgggtgaataaactgaattactttcactaaaatgactatacaatagttaatgaatttcttatttatacaaggggaaaactggatataatatatctttaacattacacagtcatagaaaaatgttaactttaacctgataaaatcctttccccacatgttttacactttggattttctttcaatgtttattttggatccagagggtacatgttcatgtttgttacatggatgtattgcatggtgctgaggattggggtatggataatcccatcacccaggtagtgagcatagtacccaatgagtaaattgttaccccatgacccaccccaccctctaggagtccccaatgtctattattcccatctttttatccatatgtactcagtgtgtagctctcacttgtaggtgagaacatgtggtatttggttttccattcctgcatatattcacttaggatgataacctccagctgcatccatgttactgattttgttctttttaatggatgtgtagtattccatggtgtatatgtaccacttttttctatccagtgtaccattgatgggcccctaggttgattccatgtcttagctattgtgaacagtgctgcaataagcatatgagtacatgtctctttttggtataatggtttcttttccttggggcatgtacctaggaatgggactgctgggtggaatggtagttctgttacaaattatccaagcagagatctccagactgctttccacagtggctgaactaacttgcattcccaccaacagtgtataaacataccattttctatgtagccttaccagcagttgttatttcttgactttttaataatagccattctgactggtgtgagatggtatctcattgtggttttgatttgtgtttctcttatgattagcaatgatgagcattttttcacatgtttgttgactgcttgtatgtcttcttctaagaggtgtctgttcatgtcttttgcccatttcttaattggattgtttgggttttccttgctgatttgtttaagttatttttcctattcagatgccttttaatttctttctctagcctgattgctctggctaagacattcagtactgaatgttgaataggagtggcaagagtaggcacccttatcttgttccagttctcaaggggaatggttccagcttttaaacattgagtatattgctggctataagtttgtcatagatggctcttgttattttgaagtatgtaccttcaacgcttagttttttgaggatttttatcatgaagcaatgttggattttatcaaaagcttcttctgcatcaactgagatgacatatggttcttgtttttaattatgtttatgtggtgaatcacatttattatttatatatgttgaatgttgaaccaaccttgcagcccatcaataaagcctacttgatcatagcgaattaacttttttatgtcacgctggcttcggtttgctattaacagtattttttttttagatggagtctcactctgttggccaggctggagtgcagtgttgcaatctcagctcactacaacctcagcctcctgggttcaagagattctcctgcctcatggagtacagtggtgcaatctcagctcactacaacctctgcctcctgggttcaagcaattctcccacctcagcctcctgggtagctgggattacaggtgcacaccaccctgcatggctaacttttgtatttttaatagagacagggtttcaccatgttggccaggctagtctcgaacatctgacctcatatgatccacccatctcagcctcccaaagtgctgagattacaggtgtgagccacctcacccagccagcagtttgctagtattttgttcaggatttttgtgtctattttcatcagggatattggcccgaagttttctttttttgttatgtctctgccagattttgttatcaaattaatgctaccttcatagaatgagttaaggagaagcccttcctccttggttttttggaataacttcagtgggattggtaccagttctttatatatctggtagaattcaggggtgaatccatctaatcaagggctttttttgttggtggtggtggttttttttttattactaattcaattttggtacttgttattggtctattcaggctttcactttcttcctggttcaatcttgggagtttgtgtgtttccaggaatttatcgatttcctctaaattttctaatttgtgggcatagaggtgtttgtaatagtctctaaagatcttttgtatttctgtgggatgagctgtaatgtcatctttgtcatttctgattgcacttatttggatcttcacccttttacaaatttcttaatctacctagaagtttatcaatctttgtttattctttcagaaaatcaactctcagtttcattgttcttttgtatagattgtatgtctcaatttccttatgttcttctcagattttagttatttctattcttctgctagctttactgttggtttgttcttatttttccagttcctctaggtgcaatgttagattgtaaatttgggatatttctagcttcttgatgaagacgtttagcactagaaactttcctcttaacactgctttagccgcatcccaaagattttggtaagttgtatctcttattttcactaatttcaaagattttttaaatttctgtcttaatttcatttttcacccaagagttattcaggaaaaagttgtttgattttcatgtttatgtgtagttttaagagatcttcttggtattgatttctatttttattgcattgcaatctaagagtgtgctcggtatgattttgatttttttaaatttattgagactcgctttgcaaccaagcatgtggttgatcttagaatatgtacctgtgtggatgagaagaatgtctattctgtggttgttaggtggagcattctatagatgtctactaggtccaattggtttagtgtcacgtttaaatccagaatttctttatcagttttctgccttgatgatctgtctagtggtgtcagtaaggtgttaaaataccccactattagggtgtagctgtctacaccttgatcttttcatagatcaagaagaacttgttttatgaatttgggtgctccaatgatgagtgcttatatatatttaagatagctaagtattcttgtttaattgaaccttttatcattatgtaatgcccttctttatctttcctgaatgtttttggtttaaactctgttttatctgatataagaatagtgactcctgctcttttctgttctccatttgtgtggtacattttttcccatccctttactttgagcatgtgagtgtagttacacgtgagcttggtctcttgaagacatcagaaaattgggtcttgagtttttatctagcttgtcactctgtgtctattaagtggggcacttagaccattttacatactgaattagtattgatatgtgggattttaatcctgtcattgggttgataattggttgttttataaacttgattgtgtaattcctttatattgtctgtgagctatgtgcttagtatgtttttgtcataacaggtattaatctctcatttccatgtttagcattcccttaaggacttctcataaggttggtctggtggtaacaaattcccttagagtttccttctgtgttaaggattttacttcttcttcacttatgaagcttagtttggtgagatatgaaattcttggttggaatttatttgctttgaggatgctgaaaataggtctccaatttcttttggcttgtaaactttctgctgaaaagtctgctgatagtgttgtgggattccagttataagtgacctgacctttctctctagttgtctataatatttttccttttgcattgaccttggtgaatctgatgactatgtgccttggggatgatcatcttgtatagtattttgctgggttctctgtgtttcttgaatttgtatgtcaatctctctaacaagattggggaaattttcatagattatgtcctcaaatatgttttccaagttgcttactctctctctttctctctcaagaatgccaataaattgtagacttgatctctttacacaatcccatatctctcagaggttttgttctttttttaacattcttttttctttatttttttctgactgagttgatttaaagaacaagtcttcaaactctgagattctctactcagtttggtctattctgctgttaatgcttctgattgtatgtggaaactcttgtagtaaatttttcaattccaggagttcagtttagttctttcttaaaatggctattttgtctttcagctcttagatcattttaccggattctttggatttcttggattgcatttcaactttttcctggatctcagtgagcttctcaccatccaggttctaaattctatacctatcacttcagtcatttcagtctggttaagaaccattgctgggggctactgtgctcatttggaggtaaggagacatcctggctttttgaattgccagagttcttatgctgattctttctcatctgagagggctagtgtttctttaagttgagtatagtcagttggcttcatttctgggtgctttcagagggccaaggctctgtacaggatctttatttgtagctgaattcttgtcttaggtttcacaggcactgtacattggcaaaatattttggcagttgtaatttggactgtgatgcagtagatggtgtttaagagtgatgaccaacagataggctcttattcagccatgcagctcttttgtatttcaccatgttctcaatagtgctctgtggtggggtaaggcagagagataactccctcaccaggttcactcctgggccttggaggagccccctccaatcactggggtcatgcccaagtttcctttgttaggtgttctgggctgtggggctccctcagatagaggtcatggctggcagacaggccacttccttcccagaccagccctgtggagagaggcaccccactttcatgctggtccatgaaccagggcatctcaaccctctcagtgttttgagagtgagaacatttcccccactcaggcaccaccaagccagtgagtcttgcctatctaagtacagaaggaccatggaggtcgcatggtcagccatcagggtctccattttttgtggggacagaatcttactatggtgctcaggctgactgtatgttgaaatgacaatattttaggtatattgggttaagtgaaaataattttatatatttatttatgatttcctttaatgtagtcactaaacattgttaaattatatatgtggttcatattgtatttctactgatagcagttgtttaaaaggatagacatgagaatgttaacaatagctattcctagtagtaaagtgtaatttttagcttttcttttttctaatttttcttgaataaatatgtgttccttgtgtaattttaaaagtaataaaggtaaaaatacacaatgaactactgctgtgaaatataccactaacagaagtactaagcagaaatgtcaagtcttagagtcctaattatttattcatttaaatacatatatattaagtgtctcatgtgcaaggcatttggacagttgctaggaaaataaacacaaaaaaagatgagctataattattttcttcaaggggttcacagtccattttggaagttaggctcatgaatagaatattagagtacaatgcggtcagtgatactatggtgatttgtattaactctcctccccttctgctttaaatgttgctgtttttctggctctaaccttagtctacttctctgcccacaacacaattgcaactaacacctatatactaatggctatggctttaactttgactttgcttcagatctctacatccaactgtcttttggtcagatggccattgggcaacctaaactgtatgcctaaaacccatcatctcttcacctcccctgctccagactcttctacctccgtaattcttgtctttgttaatgatgccaccatttaaccagttgcctcatgactctgtaaaaaggaaatttagttactttacttcacttctcaaaattcttcaggcttggcagtgcacaagcctacatatgcccttagctaccaatccaacttcatctcctggaacacttctcatcagcattgacactctagaaataccaaactaccaaactcaggaaacatcacaagttatcacctctcttcctttcattgttgcgtgtgtccttccctctgcttgaagtgtccaacctcatcaccacctcttcttcatggttcctagacattcctctctgttacctcccttgatcttccaggcaaattaggctctcttctctctggctccccttgaactttgtacatacctccaacatagtgattttcccattatattataataccagctttctgtatgatactctattccctaaggacagagattgtatctcattaaccttggtatcctcagcgtcacacggaatgtgacagacagaaaactttcaagtttactgaatatttcctatctttctttaccttttccactctattgtggtcactcttaccctagaataatgtagatgttccttgaataccaaccaggcttcacttctgggtctttgttcttgaatggccttaccccagatggttccctctgataaaccaattagtcactgctcagaagtcacctcatcagagaggtttttccttcaatcctgtataatatagtgcctggcaagaaaaggatgccctctctcaccactcctattcaacatagtattggaagttctcaatcaggcaagagaaagaataaagggtattcaaacaggaaaagagtaagtcaaattgtctctgtttgcagatgacatgattgtatatttagaaaaccccatcgtctcagcccaaaatctccttaagctgataagcaacttcagcaaagactcaggatagaaaatcaatgtgcaaaaatcacaagaattcctatacaccaattatagacaaacagagagccaaatcatgagtgaactcccattcacaattgctacaaagagaataaaatacctaggaatacaacttacaagggatgtgaaggacctcttcaaggagaactacaaaccactgctcaaagaaataagagaggacacaaacaaatggaaaaacattccatgctcatggataggaagaatcaatatcataaaaatgaccatactgcccaaagtaatttatagattcaatgctattcccatcaagctaccattgactttcttcacagaattagaaaaaactactttaaatttcatatagaaccaaaacagagcccatatagccaagacaatcctaagcaaaaaaaaaaaaaaaaaaaaagaaacaaagctggaggcatcacactacctgacttcaaactacactacaagcccacagttaccaaaacagcatggtactggtacaaaaacagatatagagaccaatggaacagaacggaggcctcagaaataacaccacacatctgcaaacatctttgacaaacctgacaagaacaagcaatggggaaaggattccctatttaataaatggtgttgggaaaactggctagccatatgtagaaagctgaaactggaccccttccttacaacttatacaaaaattaactcaagatggattaaagacttaaatgtaagacctaaaaccataaaaccctagaagaaaacctaggcaataccattcaggacataggcatgggcaaagacttcatgactaaaacaccaaaagcaagggcaacagaagccaaaattgacaaatgggatctaactaagctaaagagcttctgcacagcaaaagaaactatcatcagagtgaacaggcaacctacagaatgggagaaagtttttgcaatctatccatctgacaaagggctaatatccagaatctacaaagaacttaaacaaatttacaagaaaaaaacaaccccatcaaaaagtggacgaaggatataaacagacacttttcaaaataagacatctatgcagccaacaaacatgaaaaaaagctcatcatcactggtcattagagaaatgcaaatcagccagagtgagataccatctcccacaagttagaatggtgatcattaaaaagtcaggaaacaacagatgctggagaggatgtggagaaacaggaatgcttttacactgttggtaggagtgtaaattagttcaaccattgtggaagacagtgtggcaactcctcaaggatctagaactagaagtaccatttgacccagcaatcccattactgggtatacacccaaaggattataaatcattctactataaagacacatgaacacatatgtgtattgtggcactattcacaatagcaaagatttggaaccaacccaaatgtccatccatgatagactggataaagaaaatttgcacatatacacgatggaatactgcgcagctataaaaaaggatgagctcatgtcctttgcagggacatgaatgaagctggaaaccatcattctcagcaaattatcacaagaacagaaaaccaaatactacatgttctcactcataagtgggagttgaacaaggagaacacatggacacagggagcggaacatcacacaccggggcctgtctgggggtcagtggactaggggagggatggcattaggagaaatacctaatgtaggtgacgggttgatgggtgcagcaaacaatcatggcacgtgtatacctatgtaacaaaactgcacgttctgcacacgtaccccagaacttaaagtatatatatatatatatatatatatatatatatatatatatatatatatatatatatatagtgtgtgtgtgtgtgtgtgtgtgtgtgtatttaaaaaaagatactttcctaattaaagatagtttcctaccttgaaaaatctctaatgccagctactaaagtaacaatttctcacttatccacaggggttatttctggccagtgagatgatgaatgactgttttatgttaatttttaattttatagtattctcatgggattaaaataattccgctaacctcaaaaaaaaaaaatcaggaaacaacagatgctggagagaatgtggagaaacaggaacagttttacactgttggtgggagtgtaaattagttcaaccattgtggaagacggtgtggcaattcttcaaggatctagaaccagaaataccatttgacccagtaatcccattattgggtagatatccaaaggattataaatcattgtactataaagacacatgcacgcgtaagtttattacagcactattcacaatagcaaagacttggaaccaactcaaatgcccatcagtgatagactggataaagataatgtgccatatatacatcatggaatactatgcagccataaaaaggaatgagttaatgtcctttgcagggacatggatgaagctggaaaccatcattctcagcaaactaacacaagaacagaaaaccaaacaccacatgttctcactcataagtgagagttgaacaatgagaatatattggcacacggagggaatatcacacaccagggcctgtcggggggttgggggctggggagggatagcattaggagaaatacctaatgtagacaaggggttgatgggtgcagcaaaccaccgtggcacacctatacctatgtaacaaacctgcatgttctgcacatgtatccaataacaaagtataatataaaaataaattaaaatgtatattttatatatattgaaattatttatatattttgaaatatattatatatatttatatataaatatatattatatatatttatatataaatatatattatatatatttatatataaaatatatattttatatattccaccagaatataagcatcaactgggatctaattaaactaaaaacttctgcacagccaaagaaataatcagcagagtaaacagacaacccacagagtgggagaaaatatttacaaactatgcatctgacaaaggactaacatccaaaatctacagggaactcaaacaaatcagcaagaaaaaacaaataattccaaccaaaagtgggttaaggacatgaatagacaattctcaaaagaagatatacaaatggccaacaaacatatgaaaaaaaatgctcaatataactaattatcagggaaatgcaaatcaaaaccataatgtgataccaccttactcctcctacaatatggctataatttttttaaaaatccaaaaatcaaagatgttggcatggatgtggtgaaagagaacaattttacactgttggtgggaatggaaacctatggaaaacagtgtggagattcctcaaagaactaaaagtagatctaccatttgatccagcaagcctgctcctcagtatctacccagaggaaaacaggtcattatacaaaaaatacacttgtgcatgcatgtttatagcagcacaattcacaactgcaaaaatatgggaccagcctaaatgcccatcaaccaacgagtggataaagaaaatgtatacacacatataccatggaatactactcagccataaaaaagaatgaaataatggcattcacagcaacctggatgaagctggagaccatcattctaagtgaattaactcaggaatggaaaaccaaatattgtatattctcacctataaaagtgggatttaagctatgaggatacaaaggcataaaaatgatataatggactctggagactcaggggagaacgggtgcaccaaaatctcagaaatcaccctaaagaatggacccatgtaacaaaaacctcttgttccccaaaaaattattgaactaaaataaaataaaagtcattttttataaaagaatctaagtatcaaaaagcccaggactttgtctgaattattcaacaaatgaataaagatctgatacatgtataaataagtaaatgatgttatttatcacctaaatatgacactgtctctctgactttaattttcctttcatctgcttatttttcttcccaagccatgaatatgggacaaaaaaaagggattaagacacaaacaccaagaattggcaagtataatgaggctgaacttgaaaaataacaatagttcaggtaaccatatattaaatttgtctcaagaatttattttattttctcattcatttattcaacaaatatttacatcacgcctattatgagttctttttgaaaatgcaataactgtctcttacatttgtaccattgtttatagtttacaaggtcctttctgatacttattttaacgtatcctcataaacaattctttgaggtaagcaggtcttatgaggaatgagtcttatgaggaatgagttaccagattaaggatcattgggttgtaaaaatcttgagctagaaagcattccatcgttttattgttgatacaactatatacagaagcccattatcaatctatttatttcaccacagagagctataatacacccattgaccatcagtaccagtatattaattttcacttctgggatttccagcctactcttagcttcaatgttagtgtgaatatttcatggtagaatgcacaaactttgaggaaggtgcaatgctttccctgtttcttccacttatgttcaggttctgcacatactgtatgttctccataaatatttattggtgaagagaacagttattaatgtaagaatctctctattcagaaaatatccaaggaaactgtgatagctgctggtttccaaagatggtcttccaatgaactatgtctctcagtattcggaattttgcataattccttccccttgatctggactggctctgtgacttggttataaccaacagaacatggtggtgggttaagcaatactcatttcatagggggcatttctggtcacatgatacttaatggtccatggtcaaatactaggatccagcaaagagccaagagctgtttctcaaaaaaaaaaaaaaaaaaaaagaaaaagaaaaagaaaaaaaaagaaaaaagaaaaaaaaagttatctgcagagtatggcatggctttgctcccagattctaaaagtctgttctggaatttacctaagaggcctgccaaaagctcagtaggcactttaagcaccactgaatcagatgtgtcatatgaccaaagtggcagggaagcttgccaccctctcacaagggcttgtctttcgccaggccttattcaaaactggaagcctttcagattactcattcagcaaataggtttagactataacaacacacccaaataagatatgttgcctccaaaatccaatgaggcacaccagaaattgggactctttctttatggtaggagagaccagatgtagcattgaacttcaccttgaaagagatatctcaactttccccagaccatgaaaccccaagaaagttcctgaaggagcaaacttctaaatttttctgggatttatttcacaacctcttgcctctatgggtcttaccaaggtgtctaaagtagttgcgatttcctggtccaccagtgtagaggatccatgtggtgtgttgtgaaatgaagaggcaatcaatttcctgtggaatagaataggccagggttggagagttgatataaccctgaggtgaaacaaggagggtaccttgtttcacccttccagatgaaagaaaaatgcttctgatagtctctactaacatgtatatagaggaaaaaatgacttcccatatcagtattcatatattagatgtacatatattgatttactatagcaatgaaaccacatctggaacagcagctgtgattgtactcaccacctgattaagtttacaataatcctttgtcattcttcaagatccatctgtcttctgcacaggccagatagttgagttgaatggaggtgtggtgaaaatcaccagccctgcatcttttaaatcttttatagaggcactaatctctacaagtctctacagaatgcagtgctgctgtggatttactagtttggaatacaaaggcagttctaatgccttctacttgtcctcactcctcagatcagataatcaatgtagttattctgcctttcctgagtgtgcctccttcagttaagcattctagaacttgggaaataaccatggggtaagttcagagctaactggatgcaatatgagatggacctgagccaaaataccattaatcattcagcttcaataaacccctactctggtaaataggcaatagtagcatattgtgtctccaaggactggtatcatttcagagccaatgtccagaaatcccccaaaggtctggttatttacccttcccaaatgcactatgaccttggcaaatggctttaggtcttttcagggaaggaaagaaagagaaattacagtctaaacttttggaatgtaaatataaattagaaaaaatcctgcagtccttttggcaggcagggtacctcatcattttgttcctgccctgatatgggttgccaggagttgagtctagctataggcatacaaacagtgaaagatgttgggggtgagtcttgaggggtctcagcaattttccacagagtaagtccttacagccttttcaatcaagggaggactaaactcctcagagggaaaggctgcttctgctgggaaaggagacagggctttcaaggttctcagcttccaaagaatctgcctacatgttgccatctcaattttcaggggaggaaagaaggagaaattacagtctaaacttttggaatgtaaatataaattagaaaaatcctgcagcccttttggcaggcatggtacctcatcattttgttcctgccctgatacagcctgccagctctgtcccaatcaaagccctaattttaactgtaagaccttcaattgaattgatgttctaatctagctagctgcaggatcagtctttgggcttggttttttgaaatatcagatcttgcagctatgagagataagagtttctttcagagtagtcacaaagacttttcagtcccttgcctgcatcttgaactgaacattcaacactctgagtttatttctttttctccatattctctgtgacactttgaagcaacccacaaactccagtcctcatactccttacttccactacattggtctatggcagcatctacctggtaatctaacaccttgccttctataagcacttgatatcaaggactactgtgtcccatttaccattggcagtatagtcactaatgcttcatcgaatcagagaatcaacaccaaattcccatccttaaaattctatctctggattcacttccaacaccaatagttgtatcagttaagagtcagtcagggaagcagaaccactgtgaatgatacagaatataggaatagtggattcgttgtggaatcagaccttacaaatgtgagagaagctagagaaggaaaggtctggaagaaggagtcagaagatcagaaaaagggtcattaacctgtctatcttatgcagtagcacagatggaccagacaggctggggcttgggggaaatctaggaagctaaacactttcaaccaccaaagtgggactgtgaaggggagctcatgaagaactgtatggagagtggttacctgtctgtagcaaccacttctgtgggtccacagccaagtagttggtgatgggtctcgagtcactgttgttcagcagagccaagagtcagaaagattcgctggatgcagagtgaaggaaagcaaggactatatgggacctaccaagcatctctccctctgtccatcactgtatgtgaccacagtgacttcctaagagtaatagttaccacttctgtgttctaactcttttcccatttcatctcttagccaatgctaatacagagcgatacatgaaaggggattctgagaaatgcagttgtctgcttaagcaagttgaccagcataatccagcacaacttctaaatctcagaagatagcaaatgtgggcagaaagaaaagtacagatgctccacgggttcactggtgatctttatggctgcaactgacctaggatttgggagatgcttggagagggacagaggggcacacaggaactttcctctcaaatatgaggatatcaatctagatctacgaggagtccttttggagataaaaagaaatttataggagatgatgaacaaaaggcccaatttctatattagactgtctccctgaatgagggtgaataccaagaggagactgagccaaggcctcagccctctgaattctaaaatgtagagaatttcattctgatctattttatacaaatggtgctggtctctcagacagtaccttttccgatgaaagaaagagagaaacgaagtagaagattcgtaacccagctcagtaaagaggcttacctttgctctttgctcaccatcattcccccgctcaaagtctcagctacctgcctctgtgcaatagctacacagtgctcctcaagtatctgcctcctgaacacagaattataactaacaagtatttaaaatttatgtatttggtgcacatctttcagtatgagctttttggcaccaactcttactgaatgccaatataaaagtaaacaatttgaaattattttaagtgattatcaaaaataacagcataaattctatgatgtggacttcagccacagtcccttccagggactcttccaggcagaccaaaagagaaaagctgtctgcaaaagaaactcaaagttcccaggaccaatagcatacttgagtcagatacagctccttaaaagacaagtaattttcagaggccctagggtaaactaaattagttttaacataatactatttaaacatgtagaaacataatatgatttataaactctatatgcttattgctcttatgccaacaatttaaaaatataaattaaacattcacaaagcttcaaaaccactacaacttcaataaataattttaatttaatgtaatgataatacttggctaaaactaaatcaccaggtttttttctttccaccttttatattaggtttaggtggtacaggtgcaggtttgtggaatgggtaaatatatgtcatgggggtttgacaagatacagattatttcgtcacccaagtaataagcatagtacccaataggtaatttttcaatcttcactctcctcctaccttccaccctcaactgggccctggtgtctattgttcccttctttgtgtccatgtgtactcaatgtttaactcccacttataagtaagaacatgcagcctttggttttctgttcctgcattaattcacttaggataagaacttccagctccatccatgttgctgcaaaggatgtgacttttttcttttttatggctgagtagtatttcatggtgtatatgtaccacatttcctttatccagttcatcatttaagtcaccagttttgagtttaatagatgaaagatatatacgtggtgctgggttttgcttattaacttgattcttctcattttgtacataattttcatgcttgttttcctttgtttgaaacaaattcatattgaattgttaattaattcacttgatgggccaatcaatttactgtgcaccaatagtacaatactgaaagaaatatttttaacttttaatgaagcattctttactattgctaatcaactgtagtacagtgatttatacaaaagatgagctctacacagtacagccatgtgaatggggaatttagcaccaatcattcattgagttccccatgcttacagcatctaacttgttatgattctattttccaatgactgttttatattcaaattacttgacattattaggccttcacttagtattaaagtaactattagtattagcaaagcagggcatcaaaatattgtgacagtgtttgcttatagttgttcagccccaacgtgagttagttgtgttttatgaggggtatgtactccttataattttgcataatttaaggcttatgtttccgtggggaactggttcacagagcccaaatacctacaactttgtagcacatttctgttttaatgccgctctttattttcttagcattatctaccatatttagcaactgctcttttctaaattagtggtaaaacacatcaagggagttgtttggctttttctgtgggagtgaattatagctaacatctgtgaaaagttatgtatctgaatgcacattttccagcatgagctttagtaccaactcctaatgaatgctactataaaaagaagtaaaacaatttgaaattatttaagtgattattaaacataatagcataaaataaccaagatctcttatagaaattctcataaagcaacaggtggaacataccatactaacaatggctggttctttccattaaagctgaagtagctccaccatgtggcaggagtaaaaacaatctacgattcctttagcttgttcaccaactgaaattacacaaatctcatttaagtttgatgagaaccacaaaattacccattcttctcagaatatatgggctattaatttttatatcacattacttaaatttcacataatttatgctgcccaactacatgttttagactaccattccattgaaaacacatttttaactccataaaattatgaagacccatgaaaattctagagatgcatatattccaagtataataaatatcacaaataacttttaaattcaatttttaaataattcttgttactattataatttccatacaggtctcagaagcatcttaaaagtaatgataactttttgtctctgtaaaaagaatactattcaaaaaaggacaaaaagttcataaatgtggaatactaactttgtaactaatatataaaatacatgagttttttgattcctaaattcttccaacagaaattcaaataatgtaaaatattggtatctttaagccgtaacttattaccttgttaatttcaaaacagcatactagtaacctgatctttaacattagttgttaccaaattatagtttttaaaaaatttcctaggaaagtacgccattttttgggtatcgaacatctcacctcataggaatacggggattgttttccttccactcttttgtattttccaaattttcaatgtaataagcacatattaattttatgatgaaatgaaatttgtaaaagaataaatgttaacattagaagataattaacaagttatctatctcgagtcaatatacaatacaaggaaattaatataccactttacctggtggcaaggaaaataggtgagatatctttcccatcacaacataaaaatatatgttagtaaatattcatattggaaggaatgtattctatgacctagcaattacctgcgtcccagtcttggcattactcttattgtaaaagaaagcatgaacaagcagcaattttggggccataacaagttggaaataacataatcatatagtaaaaagtgatatcacaggttataataagtctatgttccatatattaaaaataatgacacgaatctacatataatgaaaagagaagattgccaaaatgcattattgattgagaatgcaagttgcagaataatatatacagtattatgctatttatgttgataaaaatattgtacagtataaaccctaaatattgcacagcaaaaggactgtaagtacattgatgaattccctgttattagtacctgtggaagagggaattatattgtgggatgggagaacagtcagtggagagtttggttttaattgcaatgcttttatttttataataaggatgtattagcatattacttgcataattaaactttgttttttaggttttcttcttcaccatcgtatatttgcatgcatatacctatgcaaataacaaagtccacctttattggggatttgtgactggcatttttctaagcactttgtcatgtgtcatatattgtatcatgtaaacttattattaaccttatgatgctaataatatttttcccatttcacagatgacgaaaccaagcctcagaggaactgagtacattgcccaaattcaccaagcccgtaagggttacaatcaaactttgaatccagatatctgtctcagagtccacaatcttaaccaaaattttttttacaaattcccatgtagaagtgtgtacatccacatacagacgtgcacacacacacatccctgctgtccagccttttctccccctgacacttgagtgcacaggtcattggcatcttctctccataactttccaccattgacagaaatgtgtttgctcaagggatgaattgaggtgaaaaccttacaacattagctcttttgtaaaaaatctgagcagattttttattttgtattttgttttcctggttacgcctctccttttaaagttttgaaaggtggcattaatatctatttctttcctgactgctccatttattagtttcattaggattagtgaattctacttggtctttccccaatccattaatattttttcccttcacttaaaaacaaacaaacaaaaaaaaaaaacacttgttttccaaatggctttggggtggtagtaggatttcctgatggctagaggaaactcctcatggcagtatcttggttgagtaattggtcctcgtctgtatgttcaagaaggtgaatgttcttagtaaacccagaggggatcagcccatcagaggtaagcttctgctatgtaaattgagacgagattcaggcttaacctcaaataccaatgcatttgctcttctggtctctcccttctcctccttattatcatgatactttaaaagccaaattactgataagaaatttgcttgctgagaacatagaaaggtaaacggctcgagagagggggttgtacatttttctttaaatctaaaaaaccactatgaagaatcccaacctcccaacaaaaattgcctctctgttaactggattttacctgcatccagttttaacacctctctcctctggacagtgctgacactgtcctcctgggaattatgacttccttagacacataatgctagagtcaagttggaacttagattctttttcttgcggaagtgggaggcattgtgtcttctcccttcatgcattaatttaattagaaaaacattcactgtctctcactatcagcctacagattctctatcttctcagcccggtaagagccttatcacactgagataaatggttctctttgttgtaccaaggtggttcctgaagcatggtaatggggaggagacacctagagatcaaagcaactaatacaatcaactccaatccagccccaaaccaagtctttccaccagctattcctttcatatctaaatgttgtcctcttcctctgcagcaggatagaaaatcaatttctaagtgtaaaggcagtaaacaaaatttcagagatatatagtatatgtaagtttgagtgcataaagttaaaagattcccaaatatctaaaaatgtttgaattaaaaaatcagtatcaaattagtaaaaaaaaaaaaaattaaaaaggtacgtgagctgtataacagtcaaatgttaatatgcttaatatattaaaagtgtatataaaaggataaggacaacactagcctgatggatatataggcaaaattcggatacaaaaattgtgtataaattactaatgaatatttgaaaaaaaacactgaaaattttaaaatgcaatgaagacagctataattcatatcaagttaacaactatttttaaacaatcacaatctaatgctgatgaaattcggcatattaagagcaattacatttttactgctatgattgcaaattgatacagtataacagtagattatttggcattaggtatcaacagcttttaaaatagtcatcctcttgacccaaatattggaaatctatcattaaaagggtcttctgagcagattttatataaggaaaatgttcattaaatatttttcatactttcacgtaatttgaaataacataactatccaacactagagaaacagttaagcaaattgagcaacatctacccagtagaatactatgccaccattaaaaattagattttcaagagttttaaattacatgggggaaaataaagttaacagaaaattgaatgtacaaaacggcctcaacaatgtcagaaaatatacttaagaccaaagactaaaaggaaatatgccaaaatgatgtagttattgtctctgggtagtgagataatagattatttccttcttcctcttctttttataattgtatgtaaaccacaatttcttcttcaatgaaaacatatttttataatgagaaaaaatgatctaataacagtatcttttaaatacaaggttatgtgccctgaaaacattcctagtttcccttaaagtcatttgtctaacataagtgaatttgtctgaatctctctagaatacacattcatatgctctaccccaggagcaaggagttcctaaaatctactccctactatgtaaaataaaactgcctttaattttttcctgaatttgtttcagacttcaagtagagttctttattatttctgttcaacagcacaaactacaaacataatctgtttggcaaaccatttttattcaaaagtataataatgccttgtttttcatccttccagaggacctagtggaagaaaatgcctaacatcagggaacagtaggagcagcctaaattgaccacagaattgtatttggccactgtcctcaaaaaattcaagtggattcagtaatcctgaatacttatgtacaacaagcattcctactataatagatcatgaggattaaaatgaggtgagttcattggtgagcatgacatgtagccatagcaattaatcttaggttccttctcccttaaaaatggctaataaaacagaagaaatgctgtatgaataatttcagaataacatggaataattgtagatatttctataagatttgtaccagatccactagaacaaatctaccagtagctaaacactgtagagtctctaaaaatggacaaggaggagatgtgacaaagatactctttaggggaataaagtcatcctaaaaactgaagatattttctgctctgccaatcaaggaatcactgttctttccccagcaagaaggagagtgaaaagaggaccaaattggaggccccaaatttgcattttaatcataacctttcatagctaattatgagatttgagcattctctggatctcagtttgccacccataaaatgatgggtggactgaaagatttctaagttttccagttctgacattgcatgggtctataaggagctccatcttggttggcccctgaaggcacctggagactttggttttagggaaccaaggagtctcagtgctgaatgaggatatagttccccggtgtagaattttagaaactatgcaagcacttggatctttaaaaaaaaaatagttggtccctgggctgtctcttacaactttaatatttacactatgacaaagtgaaagtgctcattcgtgttcgagccaaagtaataccattctctttattcattccaatgagctaattttacatgagcaagaaagcactggagaggtacagacccatgggatatttgcctagcctaagtgagtctcagatggaaataaatatgaaaagcgttagcatgggacctgtgagaaattgattcttacatctggcctccaaagggtcaagccacaaataagtgacctttgacatgccccttctctagttcagcctggagctgcccacatttcccagtggtgcccagtcaactcattctcctgatgcaggatcatcagagagaatctggagtaatggcagctgcgggtaaggggctgccaaataatagtggaacaaagatctcttccaagtttctatttcctccgaatagctcaaatacttcaacagtccaggtccccctaaagactgcattttcttagctgcattctctctagttgtgatgagtgtctcaaaaaggaacacctctcctcctgagtttatgatagtttatgacctgccacttcatttccagcagtgtgtcccagttcctcttgcaatccacaaaggacactttttctttcagtagcctggtgtgagctcttgcctctcaggattagctgtgatcttactgctggggtgggagcacacttagccacagggcccaaaagaaatactgtcactgaaaagagcactttcctgtatttgagggctcttcctctcttctggtacacccggggaaaaacctggcagagtccacccacagtctttgaggattaattctgtaagaacttcttacactgaagggaatcctcctccaggggatgattctgctctgtgcttctgagctctgatggcaatcacatcaacatcgctggggactgtggcagaagaggaacatcacccactggaaaccggggcaagttgctcctctgtagttccaggaaatggccagaggcacagctctgctgttccaatttgcagttttctctaacatcaaaaataaaatgtgatttgcatttgaaattttacagaattcctcattttaggtcaagactggccttacccataggttagtgacttatgtggtaggatttaacacacacacacacatacacacacaaatattatccataaaaagaattatattcccaccaacctgctgtggcattcatcagtgaccctttgaagttcagccattgaaggggcaggttaaaatgcaaatttgtttcttggagaggtagcacatagagctattatcaactgttaatgctccggtattgctggaatgtcagactaagaagtttgggttaaaaattaacatatcagtaagtgaagactggctttatatattacatatttaatttataaaaatggtgacattaaaaggtggcaccaaaatgtaaatagaatcaagatcactttggataaattaacgcatgacacaagcctttgacatgttattaatggaaatgagtttgggggatctaatttagcctttgagattagtgtcaacaaagaaaggtatctcctctggtgcccatggcagaagcagaacattagtacaattcaccatagatcagtttcactttgtaattcagtgtaagtggtttatatgatagagagggcaggaagatctggttttgactctgtctctactacttacaagatgcatgaagctgctcaagtcacttaagcaaggtgagcctcaggttcttcatctacaaaagtgggatgtagaaaagaagagtaaatgtaaaattcctgttcagtagttgtctattaaagaatctctccttccttcctctattcacatccatcagggagaggagtaggctgatggtgccagctaaggacctcggcactcctagacctattcctgaaccattaatggctctgaatttgggacaggaatgttactctcatggttaattccttgctcacttgtctgctggtgcttgttcacaatgtcaaagatatggcaacttcatgggaaggcaggtttaactttttggtgtttttgcactagcctgtatatctgtctacctttcatttgagaaccaccttgctgattcagactggaagcttcaagagagaagtttctttccatttaatgcactggggatggtgctcaacagagaaccacactcaaatcggggctaaataatatggcaatatcatggttgcaaaagaaacacctccctttctcaccaaatcactgaatcccttattctataaaaatgaaattgaactgcaaacatcaccaccatgacaagaggatttaggcacactgatcaactgattaaattctatttgtcatccagagtgatcctggaggccttcagagcctggaggaaacctctctgtgactctactcacatctttacacacggaaaatccaattaggctgagtatctacagcagcttccagaagtaaactgattgcagaagggcagcctgctgcctgaggactgcaggggacgaggaaggggtgggccacctggaagggacctctgccttctcagcacctagagttggtttccagatgatcacatagtttaacccttttcttttatagacaaggaaattgaggcccagaaaggttaacagtcttgcccaagacctaagattagaaggcagagtcggggttgagaattgcttatgtgagactcagacccaaagcagacgaccatattttcaaattcagtgaaaactggaaaactcgtatgggcctacccagcccggaaaatccccatgtattaccaatacatagtaaacgaatcaaagattgaaaagtttacttgaaaaccaatcagaagtcctctcccacatgcaaaaatcccaccctaatagaacactcatcacccgtcagactgtcttaacacttcttcctttttctttctttgcaaacccctttgagcctgtgccagaagtgacggtgcctgccaccctctctgcagtcagtcctgaccagttctctggggtttacacctgtcctctggccactcgtcagctgcacttcctgcatctgcttgtttcaccttggccccagctttacctgaggggtgcttggcctgtgccttgagttccagggcctatgtttacttcaaaaatattaatgtcaattccttcaacttgttccaaagacaacagagcctctcacaagcaggcaagccctgccacttgttacgtagttgaggctgaggagcctgcaggtcccagccaactttatcacctccctcttctgaggggtggaagtccccaacatctcagggtcccctgagagtatggggattcccacatcggcaagtacctgcttcagagaagcccatgagaaactggcccagagcaagcgggtccaccctcccattgtgggaaagtgaagggcagaaggagtctggctggaggtcactcctgccactgatcttcctcactcgggtccagcctgtcagaggataaagcacagtggtgggtgggggtatctggctctcccccaccctccttctcaggggttcagtagtccctgggaacaagattcagctcaggaatttctgggatgctggtcagttctggccctaaggacactgggagtgacagcgggctgctaaggatgtgacagtgactgggctgttcccttcacatgactaccagggcaagccctggccaaatcccagcacctgctgaaagttgaagctgaccactggagtgattagattcatgacatgtggtggaggcctggggagtggagctactgggaaaggacacagctaaggaatctcctccctcccagcattgcttgaccctttcacaaagacagtggtaggtagaggaagaaggagaattggcctactccttccttttcgctgtatatggtcatagaaattgtcagaactttatatctagattcaagttctatctctagcacaattagctctaaaactttgcgaacgttacttaacctcctaggtcctctttgttcataaaacgagaacgtaatacataccttggttggctgtgaaagttatatgagtcagtgttgtggggaagttgaaggcatgcagtagatgcacaaggaaaattaaattccgttccccagttcctggcttgcaagttgggggttaaactcagttaagctcagagaagacatgacatgacgggggatcaagggagatgtgggaagctcacgggctgtggttcccactgatccacattagactccaaatgacaacaccctcacaatcccatgaaattgagcagaatttctcttctttcttgtgatgtttccagaaatgaagagagagggaaggaagacacagactctgatctttggcttcactttggttccaagacctggagctgatagtgtatggagggttgcctgtttgtccaggcactatgaataagaccaaggtaatccagcccaactctacgacacagctaagccaacaagcagctggatcttgtgtctcagcactcacagaaatgtataaatcatctgataccaactgctccccggaagcctctgtctccagaatataaatgtccaactacaggactggcaaagaaaccaagccctgggcaatgcctactatggacccttatttcttgtggtttgctaagaaaaaagtaggcccaagggagaggagggggaaaaccaggagggtctaaagttcttctgactgaaagaaaagaccacatcagagagaaagaaaggaatcagttaagtaataaaaggttgtgagttgatttatcattcaactaaacaaattatcttcctacacaaacattctgaggattaagtgaacaatataatacttttctgagctctttttgatcaaatgctttgctgttaaaggttatattcctagggagttgatactgaagcttcttgttccttgtcagtaaacacaaggagaggccaaccctctgtaaatttaaattacataaaacctttccccaaactgtctggtctcctaacagccccttttcactgaactctgtggttatggaatgtaagtatctttatcacagcagcacagacttttgaaaatttgacataatagaatttcttcctcacaaggcatatcaaacaccattgcaaactagtgggatttttaatcaagactaaagcagaggtcttttatttgtttgtttgtgcttagattatttccacatgaccaataaaatgttctctctgaccatcatccctgctgactagaagtaccaggaaccttgtctcaccctcacctccagaggtaagggtatgaacggactgtgaaaaaacacagcagaacactggggtcagcagagagaaagcgaaagaaccccatgggcagataatctaaaagcagcagagaatcaacgggaaactaacacaagtgcctgaagatggagacagcaatttttagtgattttggcttgtctctgttctatgaagctccaactcagtggcaacctagtgtgaaaatttatgaaatacttttggatttatctctgtaattccaggtctggcacaatataggtttcttgaatgaataaatggatgaacatgtcaatcaatgaatgaacagtaatattaaggaggggaagaaaaccattacaggtcaatgaatgggttcctagaagattcccctgtctcccattgtcttccgactcagggagacaacagctggagcagagtgcctagacttcgggggcttaggaggccacacatcttagagagcatttcaccatcaactgcaattcctttggcagtttgaattataatatttacttccatgatacagtcttcagctgttgtaactgctagtgacccttctctgaatccctacttcgtatgttagacattttttatatggagaattaatacagccttgactgctatgcttcttttttacttccatctctaataataagatcctcaagggtcgagactgtcatactcttgttttttgtgtttacttcactgcatatcctagagctgagtacatatggaagaatgaatcaattgatgaaatttatgaacacatgctgaggtttaaagagaatatcaactgcttggtttgatgacaaaaagcaacatcactctgtgtctagcacgtagcccagaggtgcgggccccatcctctcgtgtgaggagcccacggtgatgcataggcacctgcaccccgtgcctaaaccctgcagctggcacgggccctgtctgctcttcattcaccgttctcacgagttgcaataagttcagccctccatgtcacactgtgttttccatcctggggagtgtttcacagctatcccaagccccacgctgacgaatcacggccgaaaacacactctgatgccagcacagaccacggagcaaatgtcagacaagatcagcctcggaaaagtgagtcctgaattgcgatggaagtgggcttcctctcacaaggactttgtgtggagatgcgcaggtgggctgttggaaaagacccatggaattcccttcctctgggtgccttttctgtcccaacctctggggattcctcaagaatcggggggatttcagcacggagtgtgggactctgtctgccccaagatcagaggattcaccttggcttttggaaagaactgcccagtgtatcaggtttttatgagtcagttttagagttgggaatgcggacagatttgtaagaaagtccacagagcatatctctccacagcggagaaggctctcgagccccagaaggcaatatcacggtggcctaggtggatgtcacggggtgagaatcaaccctcagttgccacgaggaatctgaggagatccaggattacggtttttatgtaactgtcttacctctgtttcacaagggccaaaacttcagccccgttataaaatcaacagatgcagaaaagagacaagtggccactagatggcagcagatggtaagaaacgtgagttgcaggcgggctgggcaagagttaggctggaagcccctccattttgctttacatctttaatgagatatgtgaagaaaattagtcccttacatgccagacgcagatgccacagcatatggagagatgccgcacagcaatatttctctggttattaaacaggaggcacctaaccagtcattcactgcatcatcatgcagagttatcctttaggtctccggatactgttgttgacaaggtaataacagaagaaagcagttgagaagactgatgtcgggacgtgggcctctgggctcgtgggacttcaccatgccaggggatggggcacattgccagaaaatgaggagcagcccactggggccacttttccgtggccagggggacactgtggcttctgctgccaggcttagtcccagcaggcgtctgctgctctctggtccccctggcagccctcgggggctcatttattcagaagccccattaccgcgagacaattctgcggtctgacctttcaccacaaatcccaaatgggaaagggagctctgggaattttaaagagcaaaccacacttgcttctccagcaaaattgaaaagatacagcataactagagtgcattcaggtgcacatagatagggaaacacggtttccatgctgccccaaacaaaaggagggagtccagtcctgccgactgcaggaaacagcctcactcggaagacacactttttcttgggagagtgttcccaggtccagagcaggcagggattgcgcccacttccccacttctcacacttttctccaaccccaccactcagtctgactattcctttatttaattcttccacactcccaaacccaggggcttcataaggccttcagggtagctgaggaacagagaacagattattcagtccaggcaactagtccctgtctcaggcccaacaagaaactgttatcttattaacctgaaagcccagaactctcaggacttctcagagtcactcatgaagccccttaacagtcctgaaatgaagataaataatacagccatttttcgtacagagaaactgaggtataaaactgagatcagctgcagctctcctggtccccattgctttcccacagattcaaccctctgaagcatcctccagtgaaaatgtagtagcaagattcaccctaccaggatttctctccccctcttagaaaattacttcctgcgctagaaatcctcacttgtctgtgtgactttagacaactcgcttaacctctctgtgcctcacttatcatctgtaatttgagggactagaaccagatgatgactaaggcccattccagctcacagtcttgtggctaatttcccagtcctctgccagccctcaaagagagtcgtatgggacactttttccagcaacagccaaactcaacaggagcaagcagaatttccttctccaattgagaagcaatggggtggtggttggagtcttgttgatgtcctttgtccttggagtgaggcaaacagtgaggcttcagatgttattggcactaacagcagggcctggaggtggccacactcttgtggaaggaccatgcagagctgtccctgtgggcagtgtaggtgcatagccaagactgagggatgttttaataactacttctcaataagaagacctattttattctgcacaggggtgtggacccaatccaggtctcccaggaggaatctactctcacccataataggggattggttcagctcagctgcgctcacaaagggctatacagcatgcagcagtacaggcagctccccgcagctccatgtgaaaatgactcacagcagttatgaacatcaaacctcctttgatgtgttcccagacatgaagaacagccacgggaggaggagacggactctggttgctagctctgtggggtggcgcacagagggcctggacacatctggtaccatcctgaagctccaggagaaattcaggctgggtaattacctaggacttcctaggataacagagcttcctttcatctatctctctccctccctctcactgtctttctgtctccagctacaagggaattagattctccaaggaattacaacctgtttctgtaccttcacctttcccgaggagataacaattcacatccctgaataaaagttgttttattgagcacaaaatgaatgcacccccctcgctcagcatctgtgccaattgccttaaagctatagacctggcctccatcagccaagtgaaaggattttcctctgtcatggccatttccagactctcagccttttgagtagccacatggtaccttgtcctcctaataggctctcaatgatgattgaatacaaaggctctaattctctgttgcattggcagctcccaagactgggtcgatcacaatcgtccacagcagaagacagcggtgctgacggtcaaatgagcatcagggcacacagcagaaggggagggtcagccactgtcccttcatgcccatttcaacagaaagcttatttatatgcaagaggtgttccccttccagacagggttcaagagcacattggtccctggaaacttgagcaaagtcttcacggttatagaagggagtggcaaaggacatgtaggagagaatcagttccaccccatgcctgcacatttcattttctgaaatgaaaagctctcatacactcacagagatctgcacatacccacacatggaaatagcataaacagctactctttactgagcagtgaccacgtgtcaggcacaatgcctcgggcttcacatgcatcatctctaatcctcatcgacgttctgggtgtgggagtgagggcatccctgttttatggatgaggaacctaaggtcagaaaggctaagaaactttcttaagattgaacaactatggtagaagagctacaattctagatggttggattccaaagcatcatctcttaaccactgtactatggggcaatatgcttataagcaagtgcttactctgttggaggcactggggttatgagatagtgcaggaaagacatagttattcacttcgcaaagcttcatttttaccgcacactcatgcacacagtgctacacacacacatgcagagttactataactgtggtgtcttccaagagccctgtcactaaggtatcctcagtgtcgtactctcagtcctcctgcacttgaaccacagtttgaattgtgcatagggtaaagactgaggtcttctacagaaaggcctaagctgcttgaactttacagacaattatgtgagcaattcaaccttttatacattatgctgtagttacccagctcctgaactagtcatcaggtattttatttgttttttaacgtgatcaggaagtttctctgactcatttctctatctttgcagaggaacaaggtaggagagcaacaggggcaggaacagagaggatgtcaagcttgatgaaggttcagtaagtcaagtcataggtcaactagaagaaataaagcaggggaagatttggggtggggctgaagctccattgtttccatgacaccataagataagtggtgatctaggtgatctaggtgtgcaaaggtgaaacaaaacgaaagacgcaaacattgtactagtttcaggttttgccaagagcagattggctgccaaggctacttcagccttgactcatatagatccatgatctgggaggcaagacagcgtcctgctgtgctggacatctcagtgacattgacccaactgggggaactccctgaggttaagaaaacctccctccaaggctgagttaatgaactacctagatgtaagacaggagactgaaaccatttaagtcccaggaaaaatgcagacttaccttcttatgacctagatctctttgcaaatctaatgaaaaaggtttgttatgcacaaatgtttccctccaattttatttcaggagatttgtgctctttcctggactgcccctgaacctggaggtaataattctagatcaaagtctccctagaaccttgtaaagggtggactgagaagactggatatacagctctaggcaaccagtcctccactgccaccaccatgctttctaatctccaggggagcctggtcatcttgctggacaattgctgtttctcctgacaaaatccaagttaggaaactgacagggtctttgtttctatttctctctatgcctatctctcaaggtgccctgtcattaatgaatcttaatcctcacttttatttctcaactctggctcccaatttctgttttcccacccctcatctgggggagccaccggaaccccctcattaatccacagacagccatctcaggacttcatgctaagaattcattgtttcccactttcctgcatttgaacactggagggcaatgctggaccagccaaagcactctaggtgctccgctccatctttgtctcaaccttgcctgtcatttcaggaagcagcctctggttggaagccaaaaccaaggaccagtggagcgcccataggctagcagaacagctaggtctattacagcatctcccccacacgggatcataggaataaaaggtagctcacggaaaagcacatctggtttcatgggtgacacaatcccctgggaaagaaactgagcggggtgcttgcctaactgtgtcattaaccagaaacaatctgtgtctctgactaggggatgcagattcctacctgtcttcactcactcagatgtaagcccctggagggtaatgtcttagtaaggtctgcattcctgtagcaagcacagtgtttggcaacaaatacttgctggatgaataaatggatgaatgcgtgtatggatacatatgtataaaatggaactggccattttcagatttgttgttgttttctagctcttatgacacccaaagtttaaatcattaatcagttgctgagcattcttagtcttaaagacaactaaggatggtcaggtggttaattaaatcagtggttgtcattgtacaaatgttatttcaaacaccacttcaagagtttcaggtctcttatttttaggaagtccttcattgtgtcatccatgtgtcctcagacctcaccagcctgtggattacaaaatacagacactatttcattaatattcaatttacaagaacctgcgggctcatcatgtggaatattgagtatccgtgatgtccccaagtgatttgtgggcatttcatgtgccacagtgggtccccacggggcttgacagttccatggagccagagctcttcttcaggccatctttcatcatcttgtgagacttttctccaggctgctctcccctctaccttcaccacaatggatcccatgtcaggtggacatggtctactctcttaatcattcaaagcactgctaaatgtttgaggaagaaagaagagcacattttgagacccaaaacccaacttgagactctttctacctccaggcaggcttacgcatagcaaagaccagctcaaggcgcccggtagaagtctgcaggcatctccatatctccaagtgcagagagcagaggagattttttcttctcagttcaagactagttcttttcctgccctgggatgattgacagtgagaaaaaacatttcctccagggaagcgctctacctgcccctccaccttctcagacggggcccgaccttcatgaccctgacaaagcaaacctggtgctcaactgtcttattagatcttctaacactatgtgtgtgacatcaacagccctaactaaattcacacttgggaaaaatatgcccctcattctaactaaacagacaccatttaattttcctaacagaacacttactattttgacgcacgacacctgttttcagttttatgataacttcataatctccaatacaatgagtgagtgtttatttgaaatgagaataacctcattctcaactagttttctcaacagaagaagagtgctcaaagttcatctagggtctttacctacagaaattcaatgctgtcagcaatcttcaaggagcagctctgccaaaggaaaaagaaagaaagaaaaaaggaaatcctgcttttataagttatccctattattaaaatttctaacaaatctctccctacagttcaaacctaggtccccagagtatatgggcctcatccttctcataaaaatgctgttaaaaaaaaaaggtgtcctttgacacctttcctgagtgcaaacagagattgaaaaaaatcattctaaaataacatttttctgtcactgcccaatgggaggtgagttgatcataggtgaagcatgtcctattagtatgtcttgctcaggatgcctttggtgtgagtaagggatgggtttctagggcaaaatctctgttctatacccgcaaaaaacaatgtacagaaatttccctaagagaggagattggcagtcaatacataagactccataggcaggaagtgtccagggtcagctccctgcattcaaatacagacctgcatcagggctgtgatttccaggtccaaggctcggtgagtggataatgcctaaggcctgatgccaggcctgatgtccaggtttaacactgatggcaggccacagaccctcctgtcttgggattccaaaaagcccagaatctttcccagttcctactgacactaacttttgcccgggcaagaagtgtctgagattgcttcccttgagaccatagtcctttcttataattccaaaactaagcagccctgtttatgctgctgtggcagagcatggaatcttggttagtccttccaaactgcacccattgggttatccctggggaaatgatcacattacgttactttgttgaacactgaggactccaataaggactgtgaatcccaactatttctggtgtgggagccagggctttcaggtcattcaccagaaattatccaaccagaaaactttctttcaagttctgttcaaagtccagcagtttgcatacaggattcagatgagacttctaagaatcatctgtgtcttggatagagcaccctggcagcctcttgaaaatcaattccctaagaaacctatcttttagaagtggaccttcacaaagccagtgagagaatgggaggagtatgtggtttccaatgggagacatatatagacttttatgtcatgaatttctgaagtcagaccgtgacaaatgttggtcagagtacaatgcacagttgcccaaaggaggggaaattagcttggttcaggaggactaggaaatcctccccatggaagttttagttaaagtgacttaaaggatgaatgattttgacaaatgagggattggagaaggacatggcgggcagagggagtacagcttgagcaatgtccaggagggatatagaactgtgcttggggaacagtgatcacttggtgagagttgagtctgcctgagttggggcagtggagtggtgggagtggtgggctgtggcttgactgagaaagcttttgtgaatcacattaagggactagattctgttatatgggaaatgggcagaaatcacaggcatataagaggaaatgtgcttcgaagagtgcttggaaagattactatgggtgggaagactggttccaagaccggaaacaatgagatcagatgtaaagttaatacgaaactgaggtagacattgagaaggatcagaaggacttggaaagagaaaacagatttaagaaacacctcaaaaatagataaatgatatgtgggaatgaaagaaaagggagagattgtctcttcccgacatcctggctatgtactggaagattccctagttcccaagccccaaggtcttaccattagaaatcagtccttactcatttgtccattaaggcttaaggtgtcaatccttccaggaatgcttttatgtttctatggtccaaaggcttaatctccagtggcagaatgccaggtaccaatagaggagatttgggggcagtggtcttctcgggaccctcaaaaatcattacatagttgcccactcctcttatttataaagctgttcgtgtgaataagcacccaactactttgtctgtgcccatttgatcactgattgaataagaaataaaagccaaacatctatattctttttcttctctgaataatcttttcccctgtcttcagatttggaacaaggaaacccagatccagggaaaatattctaaatccttgacctccctatccagttggcactccagcccagtaaaatggcttcaagtacaacattcccccaacagcgaagacagccttcctgggagtcttgggtaggcctgtccagggccaccgtgcagcacacatacatcttcccaaccagctccactgtcacaaacaccatccacactgccatgggcaagcctctggccaccaatgccaccccacctgctctggtgtgggcacacctacagccatgccaccaacactcctcgtgcacatgtctatggtgtatctgtgcagtcacagttgtcaccagctcaattctgtgtaaccctaagtccaggcatcttggggtgaatgtctccttattcctttgtccattgtcctgctctccctttaaaattgttcatgagtgtattttgcagaaagatatgtgatcttgaaagacagagaaggaaagagatgaagtaggagagtggcaggggtgggggtacagattttgagaaaggcaagaaaaaagaaaggttccttgacctccatcagtcccaactcccaaaataagactggccctaaagatagcttattatttatcccaaattaaaattttatggctctgcaatcattgtgtacacagtgaaaagaaaaccatcacacaaaagatgcagttatcctcacagtgggaacaatagcagccaagctgattctgctccaagaatagaataacagtgctaagtcaggaactccaaaactttgtcaacaaatagaataatttcttggtgggaaaatggctatgaaagaaggtgggcaggaaagcaaccttctgactcttgaactgggcatgggttgccagggaaaattccagccttggtccctccatagtgagctcacaaccagctctgctgactggggaaaagtcctgcctgaatatgcacagactccagaaggccctcaccttacccttgcccagaatcatatacagaatctaacaggctgtacctgcttctcttgcctaaagttatgcatcattaccagatttccagctccatgatggcagaaatttcagctgatttttttttccattgtatcctcagcattcagcagaaggtttgtatatacttggcactcaataaacacttgctgaatgaacggttgattgattaatcaattaattgattaatttaaaatgagcaaaatactttctccctgtctggcttctgaagagtgagtctgagtactagaaactgtcagataggcaatagaagccacagtccacttggaaaaatgactgtttctacctttgctcatccttctgggcatcttagattcctgaaattcaggaacaaggacccaagagatcatgacccaccaagtgtctttcaacaaaagactattttcctggctgtttcctttcagagaataagcctcctggggctgataagcgaatggcaccatatgctgaaaacacaggccctgagtggcagagggcaccagagcctcctctgaggagcctgttggattgcagcctttcaacaaatctgagtgtgtcttttgatagcatcagcatcaaccacccccaaggacctctttcttttattgcttcagcaatgaagcaaccacatggctgttgtagataaggtggctcaagtgcattgtgcatgcaatgtaggctgctggtgcacagcactgagaatcgcagacacgccgtgtaccagcttctctacactgcgttgcccttcctctgtaagtggcccccaggtaaacgggtgtgattccccaccacttctcatttctcattttctatcatttttttctttgccagatggctcctgcaagactgaaatcacacagccttccaacatggccacaatgattgggacagatgtcaagttccaacgctaatataacattcctgatgggaattatgattctttgtgctggcatctgcaaagagctaaccaaaggtttacctatatctgctatcctttcaaggcaccctggaatcagagcactgctagttgtctgtggacagaaaattgttctccagaacccgaatccttaagcatgtgcagccaagagactgagccatttactgctgtgcactgtgggcaccattatgcatgctggatatcacactgaacaaacactgtaagcctcaagcagcctcaacacagaaaattcaaaagatccaccaacaacacacagggtgtttagtgtcatcttaaacttgcatcttgaatgcatcatcgattcattcattccaaactaaaagtcccttaaggctttcaaattgatgtactgagtattgtgaaggataccaacatatataacaaacacttctcaaataataaaatgtattcagcaggtacaatctcctcacttttatgttgctaaaccatgagaaattaaaattaaatcctgtataattacttgaatcttccagctgacaaataaaagtagtctttgatacacagaaggacaaatgaattgcacacacatacaaaattaaggccagcaattaacatcttaatgacatacccttaacttaccaacatttctaaaagcctggaaaaatattaaatatctatgtatacatgatatgtacagtaaatttatagatagatgatagatgaatggatacatagacaggcaagctgtaagaagcatcataaaaggactgagctcaagttcagactttaaagccagacttcttgagttttgaattccagaccttccatttactgactcaatagctatgtgaccttgggcaatttactttttgccttgctttcctcatctataaaataatgattacaataacacctacctcaggggattgttgcaggaattaagtgacctatagcacatgttactgtattcagagcaaagcttggaacatgaaaagcactcagtgagtattaactacttttgcttttgagtgtgataatatcctgaggatgattactaaatttcccctgtgttgggctgggttgagcctttaggaagttgttgataagaaatgtcagtctcttgaacaattaaacattattttctacattagtatcctatctagtaagaagtaaatatcaatggaaattcagagaaatacaattcaaaaggccttcaggacctttttcctggatggcaataaattattgagggcttcctatgtagaaaaaaaaaaaacagaggaaagtaatttctgcttgaccatcataaaataagcaaatataggctttgcgagatattaaaatacaacagtaaccccactcattaaatgaatagaatagtggaataatgtataaatttaaagccaaaagtaaaattaaagttgtttatgcacatatttttgaagtaaaatatttgtcctatcaacataaaaggcatagtagatgacctgaaaaagtttccacctccaagaagataacaaatcaagtcaaagtcacagtatgcctgacgttgtgtcatcctcaaaaactgggaagtcaggatcagtccaagactccagaagtgaggaggctctaaaagacacctccacttcagcctctgcttattcaaggccccagccatggaaactcgatggtgtgaactgctgagctgagaactgggggtaagtgaggactgtcttctctgttttcttttctgaagatgcagggtctcctgctaattcggattctgtgttttattcattagtgggaacacaaatcccctgctatcttgctagctttctcatttgcagccaacatatgggtttatcagcacggttagccccccaagaacagcccttcagggacatgggataacacaaaatgggaaattcttcttggaataaagagttggggaaggatcctttgtaaaatttggttttggggtcagatttcaaagtcttaaccctcatgggacaggcagagactcggggatatttggtgagtgactgagtccctattcctcctgagcttgcccttccccagggcacctcagagccagaactgctgaatgttaacatggggcactcaggtttcctacaggacacttacaactctggtaaccctgctgtatactctgccagtaaggaactacttagtaattcctccgagagccaacattcaaagactaatgccacgtcacatgcaatagggaaatgcagctctatctgtcattcacatctctgattctgtcattcattactccatgctaaaagtcccagtgggagaaattgtctttcttctttttcaaaaccagcttctactgaaggtaaagaaaagtttaggggtagaagaacaaagtcattacagaaccatgcattgattggtgagcactgcccaggggcaggttttgtggtaatgatccataagaagcaagcaaaattatggtggagtcgatggaatatttgagagtctctgccccaaccatctcataatcgaactgggagccctccaatctccccatgcaagccttggaggacagtcatagaagaaaaagtgagcaagaaggtttaactagctaacaagtgttcatcaagtatccataaatctcagggtacagaagtggcatttttgtattcaatcatgtatatattagtgtttgctatgtgctgtatcccatgccaagaaccaagccttcttccactgtgtaactcataccgtagcagggcttacagtctaatagaggacccaaatcagatgcttgtggaaacaagagaaatacttggttgtaataattatgggggtgttccaggaggaaagtacagattgaaattagaatatttcaatttcaggatgagttaggtgatgggagccaagaagacatgctaaaggaattaaatcctgagctgagactagatatgaaaaagtttgtttatttacatcccaagttcccaagtcagtaacagaagcagaattacaactcgagaaaggccccacttgcttctatgctgttttgctcagcagctgcttcctttggtggcacacagctgggaaagtgagtcacagatggactattggcagccaaaatttttttagagacaaatgacactgtgatttttcctgacacccattgaaattcctcactaatttccaaaaatatcttatgttgttttaaaacatccagtgaggcccagacatttcagtagaacaaatcagagaaacgaagttaattccagccatctgagcattctgagcccaaatcagctagactgagaagaagaatcgtttacttaccgaaggcagtcccaggacacccagcagctaaggtcctgactcacagcattctaaccaagagaaaacacaaacacagcatcttctcttttcattcacttctgttcctgttcttcagttgcttgtccaaccagctggagacacagcagagaaaccagaaagcaaagaaagcaattaggaacaggagaaacagctgataagcactctgcctaggtagaggtgaatcctgggcacccatcagggaaagactttgccattactaaggctttaggtgaggagtttgagggttacgaataagagataaagcaaggaaagggcttttctttgccaaatttatctttttttcacccataaaactcaaagaggatagggaaagaatgaatgtattctcaaatcaaaggaaaaatagttctaaaacttccaatgagtgagaaaatcagaagttctggcactgactcccatttatattgaagtaatactatgggtaaatattttatatcaaagaccccagagtggcagagaccatcagagaatggcattaaactgggcacgcatagtagccgatatggggttaatttgatttgaccttggcatcttttctcttcttaaagtcctcccatcctttctttatcctgtatagacaaagaagactggggtctaacttttatgtgtcttccatcctaagctgccagagacagtcctttgccaaagggcacagtagattgatactgcccatatgtctctgacacggctccactcagctcattcatttatctacccaagtcctacggcagcctaacatggctcaacagactgctgtttccctcagaggaatgttctgtgccagccttgaaataacaagttctgtgtctctcctggtaactatggctcaggcagggggctatgaccaggtcactaaccccaccatggcaaagaagaaaagacaaggcaaagaagccaatatctgtggagggcttacaaatgagtacctggcacaggaataagcccttcacaagtgttctctcatttcaacctcacagcatccctgcaaggtaactataattaccccatttgcaaataaggaaatcaagactcagagttgtaatttgtcccgctactggtaagtcacaaagcaagattcaaaaccatgggctagtagacctgcaaagtcagtgctccatttacatgtaggtaatatgggcactgataccacctaggcagtgagccacaagctattacaagcaggttctatccaagtgggaggaaccttgctctaggtacctagcaggttctatccaagtgggaggtaccacctgctgcagagtgccccacttctccctgcacctaaaacagtggataaaagacctggatttcccatgttttatcctgagttgctggcaaattctttcctaatctcagtcttcactagataagcaaccaaccctcttggttccttgagagttggggcgtctagaaatcctgcctggactagcaaatatctgtgagttcctaatattgaccagctctgcactggacattaggaatgcaaatataaataaggtactgtttatgttctaagtactcttaaagttcaatgcaggaaacaaacagattatcagagaatagaggtgataagtgtcatggcccaacatggcagggggccaggggaacgcctccctcaggtggagttaaagaagggagaagaaggatggtatggcttttccaggaagaaggagaagccagtgtaaaaactgagcatctggaagtctatgacacatctttgaacctgcaagtattttatgtggctaaagtgttgaacacaacactttcctacatctaaaatgtgcaccacacctgagatgaggctgcccgatcattccaacagtaacatctgataaaagaggccaggagttgaagtgggggcaaggggcttatctttgcagttggcttagaggggccttctttatcagttgaagagggcaggaaaggctgttaggatttttgtggagagatgttgggggtggggggtggggtgctgcacctgtctctcacaggctcctgaagaaaggttgaaaataacagcttttaatactgaataggccctctcattgtggaggcaggctgagataaacaggacttttactatcatgagtgctgtagctcattgcagtctttattgtgaaagtgttcatgtgcataagtcagataaagcaaggatggttttccattaccatcctaatcaaaatttccaaagcttttagagatagctttaattcttactctgtgaagaaggatgaatagagtcattttctgaaatgtttccacaactatttcaggtattgagtgttttatatcttcccttagctgccgaagagtcctggggatccgtaggggtgagcaggaaggggaaatgcacaggcttccttcatgccagttgctgagagagagcttagagacaaatacctgtggtaatgtggaatttctgagttgagcatgggtcaactaaattaaaataaaaatttttattcccaagtctcaagttgaaatgggtaagccaagaaggtctgagaccgcagggagaaaactcctggaggaatccactaaggagacaagtaggcagaggcgcttaaagatacaaacattaaacactcacccagggaatgccttcatcctgttggctctctttgttctgctcaaatatctgtctggcatcctctctccacctaaggttaaaaatcgggcattaggacacagagtagacataacgtaaaaattacaactaaaagtcaaccctcctgatatcttctattcaacatttcttccagtgcactattatcttcatcacatattttttatagggtacttactgttcgtggtattggaatgggtcatgggaatagcaaagttctaaggcaagttctattcaaagttctattctcaccaatgtgttttccatttatttttaaaagacagggcattagaaagtacaattaaagattacaaagaatacaaaaatataacggcacatatgataatgagggttagtgatttcatgtgcagtgctctaggagtttatgaaaggaccaattgctataagaaaatttcttaggttcgagactgcagtgagctatcgtcacatcactgcactctagcctgggtgaaagagtgagaccctgactcaaaaaaaagaagagaaatgttttttaaaaccttttttgcttttgtaaaaaaaatttatttgtatatacttagtgcaagcgcaaatttcttacttgcatatgttgcatagaggtgaagcttgggcttttagtgtacccatcacccaaatagtaaccattgtacccaataggtaatttttcaaccctcactcccctcccacctcccgacctattggagttttcagtgtctattattctactctgcatgtccatgtgtacacatcgtttagcccccacttataagtgagaacacacagtatttaactttctatttctaggaaattttacttaggataatgaccttcagttccatccatgttgctgcaaaatatattatttcattctttttcatagctgtttagtatatataccacattaagaaaattgtcttagaatagctgaagcttaaaagaggcaggagttggataagcaggaaggaaaaggaagggtatttcagggtgggtatactagttatctattgtcacatacaaatcacttcagaacttagaggctcagaacaacatttattatctcagtttccgtgggtcaaaaaatccaagtgtggcttagctgcatcctctggctcaaggtctctcatcaggctgccatcaaagtgttacctagggctgtagtcagctaaaggctcaactggaataagatacacttcgagttcactcatgtggatgttgacaggctgatatggtttgggtgtgtgttccatccagatctcatgtttaaatgtaattcccagtgttggaggtgggacctagttgaaggcactggttcatgggagaagatcccttatgaatggtttagctccatccccttggtgatgaatgagttctcgctctattagttcatgagcgagctgatcatttaaaatgagcctggtacctcctcctctctctctcttgctccctctctcaccatgtgacatgtgcccaggctctcctgccctgactacagagaaatggacattagatgtggtcaaggcatctctagagcaatggttctcaactctatccacatatttgaatcacctggggatatcctttgaaaatactagtgtctgggatacatctccagagattttgattgatttggtgtgggcttgaagctctggcttaccagatgactcaacctccttcccctcctcttgctcttccctccccctggggttgaaagcaactggcttaagaccttgctattccaagtgtagtctagacaaacacaatcagcatcacctggaaggttttgagaatgcagaatctcgtgcaccatcccagatccactgaatcagaatctgcattttaaacaagactccccaggtaaattatatgcatattaatgtttgagaagcactggtctaggcattcgtcattattgaaaacgttcatggaggtaaaaaaaaaaataaatcactctttcccaaatgtcacccaagaatccatacttgtaaaaaatctcctgaagggatactgatgtgccgccagggctcactgataggcagtcagtcatccccagttcagtttacagattatttgtgttactaccaatataataaatattcttattggggtgatagtgagtccttgtatgcttcttagaggaaggtattacataaattctaggttttatcatttctcattcatccacaagcaaataaggaagtggattaatatttactgagtcaatatactttttaccacaccacgatggattatccatggaaacccagaatcttgtgccacataccttcaattcaagatcaagccaaaaaaaaagatccacaaattattggtgtctgattaagtctgattgggaagaagaggaacaggagacacaagaatgtgtgcgtccagtggtccaatcctgcaggatgaatgaggacatgaagttctggcccgtgatggattggggtaatgtagaaccagaggttggcctggggtgagcatgaaaaatagcctagagacaaggaggaggaaatcctgggagaaaatacctggactgcccaacaatctgagggtctgcgcacaatgaaaaaagaaaccagacaaaaattaaagtaaaaaacctggagaaatttaaataattcctgtgcttactagcaggtaattaaggaagcattttatgtaacatctgaagcctcagatttagggggagacagggccactgaaggccctagcatagtaagggcatggaccaagtttctctgcagaaatcccgaagccaaatgagcgatatgaacacccactattatttttgtattattcattttctttttttctttctttctttttttttttgaaacggagtctcattctgtcacccaggctggagtgcagtggcgtgttctcagcctaccataccctcctccttccaggttcaagcaattcttctgactcagcctcccgaatagctggaattacaggcacccactaccacgcctggctaatttttgtatttttagtagagacggggtttcgccatgttggccagtctggtctcgaactcctgacctcaggcgaatcgcctgcctcagcctcccaaagtgctgggataacaggcgtgagccaccgtgaccagcctgtattgttaattttcttccccctccactggtaaggacaattgagagttgactaaattcttattattgttgcctccactgttctgctttctgtgattcttatccatcatgagaagggctgacttggaagagttcagagcagtgaagagaaatcccagagagtgtctgccaacactcaaaaagactttgaatttgatgtcagaataggaataggcttgccactctcaccagcctcccaagaagagtcattgggcaggctggatggctagaaaaagaagatacctgtctgacgcccaaaggcagctagaaggcatcctggcttcaggaacagtgccatcacctggctgccctcacaaagaggtcatccaacattgtgaaaccatgactatgagtgaaaggcaagagaaaataagggaatctgaaaccatgtgaatatgccacttcctctgcatcacgggacaccagagacgggcaacgaagagaatgttacttctatcatataacacattctcgattcggaaggtgccacagccttgagaaagtcctcattacaccatcttgaaagctctcagggatgatataggtagggtccaaataagaaaatggactcaaggaaatccaaattgtgaccttcactttgaacaattaaaattttaaacagaaaattagaatcgttgaatttgaaatccagaaaggatcttaaaaacaaagtaggaatcccctcattcagtttaaatgttcactaaatattgaatgagtaagtgatcacccagcctcaattcaaatattttcaatgacaattcttgtttcaaaaaatctgtcctataccaaatcaaaatttgcctcccataacttcatatctttatatttgttatgccttccagagcaacgcagactaagttcaccttcgcatattcaaatatttaaagatagctatcctgtataaccattcctcatgactgtctaataaattttaaactccttgagagaagcatccaagttcaatatattttcctgtaccaatgcaattcttaatagagtgactcatctgtagcgggtagtcagcaaatgtgagttgaatacatgaattaatatctatgtgtccacctgaccaacagttctactcgggtgtctcaaaggcacttcagctcaactccaagacttaaatcaagatcttccttgcaaatatggccctagcctaagattccctatctgaaggaataacaccatcatttcaaacccatccactgctctccatccactgccaccagccaggtcaaaactaccattttcttctttggattgtttctatagccttttgagtaagttagccggcctctggtactattcagtatctcctccccacagcagccagagtgatctctccaaaatacaaatatgatcatgtcatgcccctgattaaaaatccttcagtaacttcccattgcagataggcaaatgaccaaaatccctaaaagtcctctaagaccttgcacagtctgactcctcacctcttctgccatacctctcactcttctctccctcattttccaaacatgccttcttccagctattaaatacttgaatgtaccgggtgccttcccaccccagggtctttgcaacacttctcccactcctcatcccctgtttaactcctattgaaaggagttaaacaaaaaagatcaaagcctacacatccgcttttcagaggcatcttgagatctcctaacaagttcaggttgtttattctttaacgctttcatatatcagtttgtaatattttattaatttgattatgcctattttctcatgagtctgtaagctctggagatcaaggactatatctgcatttgcttattcaacctgacaaatcgcataaacatagctgtgtgaataaatgaatgaatttcccacattctgggacttcccagaatttgatcatcatcacagactctgggctgcagtggggcctcaagccttgccatattctcactttttaggggtctcggagactccagtgtcatcctgagctggagtccaaggcttcttagaaaccactgatttctactcattctgtctggcatactcaagagcccattcttgggcacacaggacaactgaacaggattggagggtccttcataggtctgagccagctcccacatagggaccctgaacaggtaagtaaaacctgcccagagagtctagctagacatgaagaaatcagaggggcccaaaatgattattattttctcagtgactactggctgggcttatgatgatccctcttggtgtttttcattttgcatggctattttcagtagctgtatcattaaaatacacaagtctataattatggggatgcatatcctcatccctcaaatatgtactgagcacgcacaatattcctggtcctgtgccacacgctcggttacaaaggcagccaaagctcaattcctgtcctcaaggtgctcttcctagtggaagaaacagacatgaaaatagaaacttactaacagagaaaggagcaaaccaaacacagagaaggaagtgatggcctagagatggggagggcgtctcagaggaggtgacacgggctcataacagaaaaagcacttgtttccccgaggtaaggtgtgcttgcaggttccttaagatgacccaggagggaagatgagcatcctcaacagttacacacaaacacactcaccttcatctctgatgcttgcagtgaaaataaataactgaaaataggcccaacgtgctgtctcatgcctgtaatcccaacactttttttctttgtttgtttgtttgtttgtttgtttttaatcccaacactttgagatgccaatatgggaggattgcttgggcccaggagttcaagaccagcctgggcgacaaagcaagaccccatctctattaaaataaaaagaaaacataaaatattgaaaaacagccaaaaatatgctgaaaaccaccatggcacatgtatacctatgtaacaaacctgcacactctgcacttgtatcctggaacttaaagtaaaataaaaaatttttaaattaaaaaaatgaaactaaataaactgaaattttatggaaaaatacaaaaccccagactagacacaatcagcttctttttgtgggaaaatgaatttatatcaaagctttcataggggttctataaccacagaatgtagttagttccctgccaagtaaaacttagatacttccaaaatgctgctattgtacacaccgcagaacagagcagccaaaatggtagtggtatgggttgggaagataaagaattaagaaaagtaaagtggaaggggagaggaaaaggagaatattatttccttgaatgatgatcactccttttattaataactttctgttcttattaaagagatgtcccaaacctctgggctttcccagaatttggtaccactggtgcactgacctatcctcatcctgccaatgtgaggaaacccagagagactagtcaaatcccctgcagagcagcaaccacgccagtggggctggctgtgaactttcactttggtgtgttctttgatttcatttggtgtgaaatattgagatttctcctcagatatcccagcgccttgtagctgcactggatctataaatctttatctgggctagattgaaccattttcatttatggagttgtttttaatcagagcaagagtaaaacttttgccctgtacaaaagagtcagctgtaaactgagccattctgcttcagctttcagcttctcctctgaagttgtgtctcttctgagagctctggaataaaacagctgccatagtcatctcacccttccatattttcctctttgtattagtcagctctgctatggtaactaacagtgccaggacctcagtggcttacagcaatgaacatttactttttgttcccacttttactaccaattggctgctgagctctgctccctctgtcttcccattccagagcccaagatgaaagataagccactatttgggacacactttttttttctgacaggatctcactctgttgccgagaggctgaagtgcaatggtgcgatctcagctcactgcagcctcaacctcctgggctcaagcgattctcccacctcagcctcccaagtagctgggactacaggtgtgcatgccaccatacctggctaattttttattttattttattttattttgtagagatggggtttttccatgttgcccaggccagtctcgaactactgggctcaagcagtccacctgccttaaccacccaaagtgctgagattataggcatgagccaccatgcccctccacactgtttttatgacagaagaaaaagaacaagagaaatgctagcagaaactccagatacttcttaaaacttctgctcagacacagcagacattatgtccactcacattcatcagccaaagcccttccatggtcaagcacaagatcaactagtcggggactcacacctttcctgcagaaggcactgcaagacacatagcaatgggtaggaagcaataaccctttttcatggaaagaaggatcaaatacttcagaataataattataacctaccataccctttaactccacccatgtaatttgtctccatcctggggagtttctcctgctgtcaacttaaaaggaatttaaaatgattttttttcttcttggaattcttctggggcaagatttgcccaattattcttcagaatgtcaccatccctcaagatgttaacagtggttgcacaatttaaaagaattccaccatcagataattttggcaaatgctacatattaatagcctcctcttaatatttacaattcttattaccatattaaatgctctgagaacccctgctgtaaagatacctatttaacgtgggattggaatcacagaattctttttgtaatggcacagccattaagacttacgaaattctataggcaaataccgtcccaaaggattacgcaggattcagtcagatagattcctgctgtttcctcatttctgtgcatccagactgaaggatacctaatgacgttgagaggagctatgcataaggccaatgggtctgtacaggcctcaaaaagaaggcttgcattttttgctaagaccaaactcaatgtcagaaacctgaaaatgttattcagatactactctttgtctactgaattaagtataaacacttcagactgtcttttgctccttcctttctttctgcaacaaacgtatcttgagtcctactaggtgccaagtactatgccaggcattgagtacacggtatgagcaaaacagacatgcaccctgccctgtggacttgccagtttaaaataagagagacagacagaagacagggatatgagtaaatagccagtgatcatacaacctcccagtggttagctacaccgttggccacccattcctccttgaaatgctttccacacttagcttctgagatgccactcttggctgattttcctcttcatcactggcttctccttctcagtcccccttgctggctcctcctccactacacagcttctaaatactaaagcagccagggtctatcttctctcctctatctctccctagatgatctcattcaccctcatagcattaatttcacatatgtgcccatgactcccaaatttatatctccagtgcaaaactctcctctgaggatataatcttcccccaattgaaccgccttagcacttcccactcttgagttatttcatgtgttttctcttttgccatgattgttttcatacttccttcatcctcttcctgacttataaacccctcgaggcggggatccttggtctgtttcatcttcagtttccgtagtgcattgcagagtaactgtttaatatatgattattgaatttaatgtttgaactgaatttctgctttagggatcactgagacacagatgtaatgaaagggaatattttatttaaagaaataatgcctcatccttctgtatttccaaatgaacaacctcaaatgagagaacacagctacagacattagcatgaggtgaatacttaagtttaaaaatgctaaatcaagccagtatcatcccttgtggtcacagcagctgctgctgcaaaggttttataaattgcctacattcccgcaccccatctggcgatgctggtgtgttacagccatggatgacttactcttcacaatagccttcacttggatctattccctactttaaaataaaaagacaaaaagaaggtgccaaagggcttgcctaaagtgctcccacccaacaagagtacaattcaaccacataatgctgcctcctcagcatttagaagattagattcagggccaaaggggaggtcagaagaggaaggccccctggtttgcagaaaggtgtttcaccatcagttctaataatagcatgtggcagctgcacttctggtccttcctctgcattttaatcccattattttctaagcctctcccaaggcctcctttaccagtcaaaatcagccaaggtttcatatgcccttagaagaaaagaggactgatagaacctaagtatcaactagagaaaagccaagagcttttcgtgctggatgatccgtctgagtccgggttcctgattgccacacagggaggccctgactatagtgtggacattggttcctttgcatagctccctcttgtgtatacacagaggctgctttttctcatcttgtttgccctaaaacattttttgacttagcctccacatacttgaaacttagagtttaacctgtcaaaatcagagggaaattgactgaattgcatctctttcacgaaaacaaacatcttccaactgccatggcattttagactgccctttctgctagtgttgcttccctattgcatttccctggataaacatctagtttgtgccataatatttattaacaaggagtcctctgggcagacggtggcattaggaatttctgcttggcatttggtatgctgtccagctgagtccccaaccatgttgtgagtcaatgcgaacacagcaggtttcaataaaggcaacagttatctaagcaggctgcagccgtgactctcagctcagcctctgggtcaccaatctgggacgtgagctggcacctcgttaaaaaaggtattctgacagagagatggctgtcagtggactcttccaaaaattctctttccctgggttcttctagtccatctccttggcatgtgccattccctatgcatcttttgttagactacatctctggtttctcaccacagcctggacactgctgatgggctagattgataccgtatgctttgtcatgcaccgtgatcccactcacaatgttattccagtgggatagatgctgagatggttcaccatgcaagaggaatcgtgctgcacgtagtattttctttgccctcctttggtaacttcgcaagttcccacagtcactactcagttatgcacgtgtgctaactcaggctcagactactttgcgattagagccctgccaattggatagcttgtatttctattcaataatcttttcattcactcatactaaacattcattccatagctcaatgttaagagccctttaacttgtcatatacatgatgactataacagcactcgcattctaagctaggctttaacacagcgctacagtggtgattatagaacagccactctgaactgcggcttctctagctgtggtgaatgttataaagaaagtgtatttactctagtccttgcccttttaccagtccccacacactaccaaactcaatataaaccccacataaccagcaagaatatctgaggtgtgcaggttatggcaatgggacagcagcagacgcacagtgggtgaggttcctgggacatgaccaggacactggtttatagtggcccaagctgctgtaagtctaagatcccactcaaatactgtactcactttcccacttgatggtttaggaactcttttctagcccccaaagctacattctgagccactttttttttaaacctacacagctgccttcccaaaagtatcctgcagtaattccatgttcctcctccattgtttcctcgttagctctgactccatgttctggcaatctttcagcctcattcctttttcctcccagtctgtaataaaactaagcaaaaggtagtaggtatattagctcaagaattgggatgtacctgtggaactgttgcgtgatgcaagtttttgtcaatgactatgggagcccctggcacggagggccgggcccaccacccctctcccaagggaaagaggacaagtccccatccatctgtcttctcccctcctctggcatcatagacccaccccagtagatagggtcatctcactgtctcccattggaggtggagtgggggagggtctcactcccagaaatgctcctacagctttctcctctcccttggattgaaggatgaaaggtagttatttgcttccccataggggatgaagcagggagtttccctagggttctgggagggcccacccttgtcaccaccctgtggtgccccaggggtaatcggccaactgaaggaatgtaagatctatataataaaatcttaattccacagaagtatgattccagccacaaaatttaagctctctatagacactaaacactctacatttccataagtcccaccaccaaaggaggagaaaagagcatttatattctctctaacactgcgctatcccctcagcctactcccaaccaagaatcttgagcaaaattctttgctccacttcagaggaggaaagtgggaaatgttttttcctgtgtgcagagactactacaaagagggaggggctcctgttcgggcccatttaaactaattttccatctgctcccaatccaggtttttccagttttacctctttattgggatattgttgaatggaagcacataattaccattattttattttttataaatgggcttctacaaacaaaaacacaggattagtctattattagcatgaaaacctgtgccgtggcttctctgagttctacctggggaccagcacacccccactgtcttccagcgagcagaacaaatcaaagaggatttccagagacagcaataactttacattccacccactgctctccctggggcagcaaatcttcactgtgaaatctgcaattccaggagagcagaaagcaatctatctccctccaaaaacaagttgccatttcagggactggacacattttcactcctaatggtaggtctccttggattactatggtctgccatgagcctgggaattgtaagacaaaaacagaggaaggaaggaaggaaggaaggaaggaaggaaggaaggaaggaaggaagggagggagggagggagggagggagggagggagggagggagggagggagggaaaaagaatgcaaagttgaaatatagcaagaacccattactctatgagtccagtgcgctacaggctgggttccatctcaaacacacacacagtgatgtcccaatgtaaggaatcccaactgaattctacctctcagaagggagctggataggacaaaatttctatctgaaaggtcagagcaggattaggaggagaaaccaagaacacagacttagcccatttcaactagcacagaaggacccagaatgccaggtatgatagcacctaacaaatatttactaagcacccactaagtgcccagcactgttgaaagagatcaagggaacagggagatggttggtgctgacctaagtttgtaagaagtgagcaatcaccaggcagcaaaggtgttgggggtccgcgctggtcatagagaaaggacaaggagcagaagactggccgatcccaatgccacagcaggccctatggtcacaggtgacacctcttccttgtcccctcagtacaacagtgtataagcctttactgtcctacaattcttctttttgttacacagtggctttcaaccctggctgcacatcagaattatctaaggaagttattaaaatcctgttgcccaaaacccaccccagactaatgaaatcagactccgtgggggtggcacctaggcttcagtagttcttaaaactcccccggtggtcccagtgtggggccaagattgaaaaccattgcatggaggtaattgtcctaattacctctccagcttttctctgcctctacattcctcttatctaagctgttatattgcctttttatttttagtttgttctactttgtcctttcagtagataattctataatactccattaaaccttttttcatgctttaactttgttttttctcatttaattttcatcgcccactctacttactccctcttcccattatgtttgttttgttttgtgttttctttaattcagcatcaacatttgcagggcacttgatatggacagagtacggcagcaggcatttaactgctgctaaaaattatatttaacgcagtaatattttgtgttagatcctgtgccgtggctacaggctcttgtcttatggaagattggcactttggcttcttccttggaagtagctgcattgctgtataaatttaagatccaaaataagtatattacaataaaaaataaaagaagcatccacaaatatgagggaaagaagcattaacagcagtctgaagctaaatatcaacatcacccctgccaagctcttggcctcattgtaggtggaagacgctgccatgtgcaacaaaaagagaaagggcccaggctgcatgcacaactaacgaggctgttccctgaggaaagggcatttgctgatttagactcatttcctcaaggtcctcaagcaagcccaagagtacataggccagtcgctgagacactgaaagttgagatgtggaagaaagggccaacagactgtcccagaagcagaatgcttcagtcctccagggaagctttgggggagatctgccctcgtgtcctcctacagctcagctgagagcagccctggagcctcagaaccacaggccctgtagttccctgggtctggcaaacccctgggagaacaaatcactgtcctccccacagagccagcccagcactgagaacaccatacaagccagaggatgcttgccaaatagatgcatgaacgaacgaatgaatgaatgaatgactcctctgatgaagttgtcccagggagagtttgtgggaatactgaaaaggagggtggtccccaagctggtaccccagtccttgatactctgatgtggctttttaatttctctgtcttccttttaccttgatgtatttattctctatcaatctatttgtttatttatttatttactttaggaatcaagccagacaccttgttggagcaacaagagctagagatatttgttccttttagaagaagcaaaattttccagtgccaactgacagggaagaagatgaataattacactatgtcctggtaaagaggacccgagacggcttcctgattttcgtacatcaacaaggagacgtctatgaccctggtctccagcacacctttcttggtagagttgagaattcaaccagccagttcttcctggagattctcagagccacattgagagagcagaggacttacaagtgctgccctatccatggtgactccccttggcctctaggtaagtcacacactgaagcctgcccctcccaccttccaccctggtcagctaatctaggttagtgcaggtctaacctagattacaaggcgtgctcgtgtgcataatttcatgaccaccaacaaccacatggggcaacgttatccccattttattgtccaggaaaccgaggcctggtgtggtaagtgacttgcaagtaagaggaggagtgagatgtaaacccagattcctgaatctaaattcagtggtctgtactgcagcatagctgccgcctcttgagaactagagtgggcagtgtggaagtgggaattcccaagttcccaggcctcttccagctcagtcttctatgtaaaatttttcttttccaggcttgtctgagcagaggtagagtgaccctgccgcctgttcctcaacagtctgtgcaaattcaaagaaatagagtgtgaattc

SEQ ID NO: 79 - DNA, 177175 bp, Homo sapiens
gaattctctaagcccaccactgtggttttgccagaagcactgcagatgtggaaggaaagtccatattcagaatgtctaagtggactaaaacaaagcaaaacttgccagcagccagagaaagttgatatatcatgatatatcatgatatatcatgtctttaagaatgattgctgaattctcatcaaaatcaacagaagccaaagaggaaaaagtatttttagagtacttacaaaacaaacaaacaaacaaacaaacaaaaaaactctctagctagcttcctatgaacatgaaagtctaattttaaaccctttgtcaaaaatcattgttaaaaaggtggaaagtcagtgcacagattgggaaattatatttgcattggtgtatttctgaaaaagattcaaatgcagaatatataaaaaacttgtacaagtcaacaagcaatgagaaaacaatacaaatggccaaaacttgaagagacacttcagaaatatgatatctaatagtaataagcatacacaaaaagcacttaatataattactcattaggaaaatgaaaatgaaaccccattgagtgatccccctgtgccctttcagcaccccagttgtattaatgtagccaggaggaaatgaccacaagaggataatgaaaaatagtgactacttccaggggaagggatggccaagtaggttttctagaaacttctgttaaattaagtttagcctaaagctgcctccttatttatttaaaactcagggcaaaggtttctccatacacagggccctgtaacctaacaggatgcataaacaggctacagtctgctctctaccaatccctaagtttcggccataggtggccaactgttcaaacatgttcaaataaggcaaatgccaagctttaaccaatccatctgtttctgtaccttacttcctttttctataagtcactttactttctctgtccataaatattctttgaccatgtggcagtgacagagtctctctgaacctgttctggtctggtggggggctgcctgaatctctaatcgttctttgcttaattaaactctgtaaaatttaattcgtctaaagtttttcttttaacatgtccatcattgaaccatgttcagtggaagaagaaaaagcagtaacaggctaaagaccggaacactgaaggaaagcaggttttactaggaaaaaagaaagttggtattcattggccatactatatgtcaggcactatttatacatttcaaattcattacctaatttaagcatcatacaccctacgagataggttttagtcttccaattttttatatttgggaaatgagacacagctttccctaactttgaaaagcatctctaactaaagtcagccagggtgtaacatcttagagggctcctaaaaaatcaaagtttggactatggagaagcaaatagccacaaagcagcagcattggctttctcagtgaggatgacaagatgacaaacctaggcacaaattgcctcaggatcaacagatggaggaaatcaccgactaagtatttaagagtgctgaatgtatcagtgagtctcttctacagtagtgtgctatgaagcacaagaggctagagggaaagatgagatactattccttaaacactccaagcgggcttccatatcaaggcctttgcccactctgcctggaatgctatacccccacaaaacctcatggtgtagctctgaactcctctacgtctttacgcaaaagtcaccactttgtgaagcctttatcgaaatctttctattgtatattccttctttgagaatcaggctctagcgtattccacgtgttgagaactaaagcaccaagttctgaagcactgccacctggtgtcccgctgaactatttggtgaggtttacgctggcttccctgctgccctccagtgttcacgggctaagctgtgatgaagcctggttgcaataggagctagcatttctgaaccagtcagtaaccttcccatggtagtaatcatgtgagacaggattcagcaggactggctgagacttttttttttctttgaaggaagcaatttttatcccttacgcagcttgtccctgctactgtgtcttgtctccattgcctggatccagacctcacaagttatttatgtatttatgtatttatttatttatttatttattccaaggcagaagaatttttcttagtacagaacaaaatggagtctcctatgtctacttctttctacacagacacagtaacaatctgttctctctttcttttccccacatttcccccttttcttttctacaaaaccgccatcgtcatcactgcccgttctcgatggtcgctgtctcttcggagctgttgggtacacctcccagacggggcggccgggcagaggcactcacttcctagacggggcggccgggcagaggcgctggctgggacttttttaaatttcatttttaaaatatttttcccttaatatgtgaggtcgattgatttcaaaatggcaaatataatatatgggatggtttaagctaatagaataccttggaaacaaaggttggcattattgcacaaggtgggaagtttttctctattaagtgagagttcatctactgctctgtcccttactgtagtatagaaatatcctaagaagtgagaacaagagtcaatgatggagagaaataagccattgtagggaacacagtgcagcatactctctccatgttatcatatgctgcccaacctcccaatatagcatcataacgccactgatttcccactaacagtaagaaacatgatagaacatggatatgtattatagtacataaaatatgctatgcaaattgcaaaatgcccctcggaaaaatactgaattttatcttgtggatagactgcactgcaatttcagatacagtctcccaaccccccaatattttctatattgaatgcatctggttgagtgcctaagatacagaagttattgtattagatgatttattcggttggtgtaaaagtaatttctgctttttccattacttataatgtaatggcataaccattatataggcttggattgcatttctggacctaccactcattggttgaattatcttgagcaaattacttaataacttttatgcttcagtctccttatccctacaatgtggatattgatagtacttactacaaagggttattttgagaaataaacaaaatgacaaatgccaatgcttagcccagtaccaacaaaaagctactggttacttacagaaaaggaaattgaatatgagagagattaaatgtcttgcctagcatcacaaagtgtcagagttgagccttccctccatgccttatgtagagcagataccttttctcaccccaagaataactctctatctcattacagtgctatattgtctttatagagcttatcaccgtatagaattatcttattttgtaaaaactcatttatttaacttcttctcattgcactctagtcccttttctatctcttcaccaccatgttctccatgcctggaacaatgcctagcacacaggagacacaaacaatacatgtttgttgaatgaatgcacaaaaggtaaaattatgtccagagtccttgcaattcaaatattaatataacagtttaagctggattaatctttgtgttatttatccagaattgtcaagatttatatcctgtaagtttcttaacgtaatatttaaatatgtaaaggctaaatagttgaatactagctttggtttatctacattggtttatttttgcactttgggggaattaataaataatcttactaaaaattttatctataaatccctcactttactcactgtggatatgaggtagaaaaaattctgaggcatttttctctgtagtgcatgcatcttatcttttatgttgcaaaagtttttcagaggactcatgtatatgtatatatttttatgttttaaaaaattctgtgtgcacacatacacacacacacacacagacacacacactccttgcataagagttgatatacaggcccactgtttgctcaaaacagagaaagcaaattgaccttgtttcccttcactatcagggtgggtacatttagaatcctccctgatatattaggctgttaagaatgataaagattgatattactagttgagttgtcctgtggccaaagtggggaggaaggaaactaggatcatgcactcttccagaaagagaatctcgtaaggctgtatttagttgccaacaggcttggcctttacttcaggtcaaatgtgtggctataccttgcaggattctgtcctactattatagatagaggaattctccctgctgttagaggtatatcttcttgatctggacactgctccttcaacatgtgggtgaatttatcagtggatcggtgttctcaccagaaatgagctccacagcatgtaggctttctgagtgattgtggccatgacttcactctcctatgataaagttacctgaatgctatgatcttctccatgcatctggagaagaaactacagaaaagaaactactacagcaaagacttggaaccaagccaaatgcccatcagtgatagactggattaagaaaatgtggcacatatacaccatggaatactatgcaatcataagcaggatgagtttatgtccttggcagggacatgaatgaagctggaaaccatcattctcagcaagctatcacaagaccagaaaaccaaatactgcatgttctcactcataagtgggagttgaacaatgagaacacatggacacagggaggggaatatcgcacaccagggtctgtcaggggatgggggactaggggaggtataacattagcagaaatacctaacgtaggtgacaggtcgatgggtgcagcaaaccaccagggcatgtgtatacctatgtaacaaagctgcacgttctgaacatgtaccccaggacttaaagtatgatttaaaaaaaagaatggcttgtttgtctagcagccatccctaaccctagtcctcatgcttctgaactaggagtcattattgaggcttccaggatttcctttactacccatacatttatctccttttctgggaaggaaagctagaagttaaccattgagatactttctaatcctgttctaattttttagaacgtgatttaaatgtatgtggaaagtgctgtcccctgattttagtacataccccatgctgtttcctttgcttacttcagttgttcactggaaaggttttaaaggcacttcatacactaaatacctagaggttaaatttatattctgaaaaaaattaatgctatcttatattattaaatttcccttggatatatcttatttctccaattatattttgggctcacagggaatagggaatgttgctttgtaatctttttttctttcttttcctctcccctagatgaggctgtagctttgtaatttttaattcctcagagctcctagggaaattcaaagcacaaaaattactgtttaaaaaatacatgcatattgaatcaaactaacgttatatctggactgtgacagaagcaagacagcataattcttatttacttttaaacaactttattggagtatgtttacgttccataaattcatccattttaaatgtatggttcagtgatttttaattaataactgatttatgaaactattaccataatctatttgtaaatccttttcaacactctagaaagatccttcatgccaaacttatagttaatctctaacccaaccctggccccaggcaaccggcttacatctttatagatcttccttttctgaacatttcatataaatggaatcactcaatatgtaatcttttgtggctggattctttttcttaaaatagtatttttgaggctcatctgtgttgtagcatatattatgttttattttatttatttcatttttgcttatttattttattttatttattatttatttatttttgttgccgaatatcattcacatcttgtatgaacatactgcattttgtttattcattcaccagctgatggacatttgggttgttctcatttttttagccttaataaagaatatccacaaattagacttccattatttttagaacatatctaacatgtaaaacattcatggtgcatcacaaatgtaggtggcatatcagattccaattataaagtctagagctagacagatatatgttctaattcttaatatgccacttaggtaattgaccttgagtgaattatttaatctccttgagctttgggttattttttgtttgtaaattagaaacagtaatgtctctattgcatgactttcttattagatagatgtacataaagaaaaaggtaatttagatgtgtgcacatttataatttgagggggattcaaaagttgttttttaatgtttgaagattcaaagaaaaatgcttttcctgccacaaatgccatcccacctgtaactccctctaaatttgaataatagcagtccacagttaggcagcgcacttctgaaagggtgtcaattctcgttgtgttccacactcatgggggatttcctcaaagtttatgaagttggcctgaagaaagcagttacttcgacccctctttgtgaaccacaggaaactgaacatagggcagagcgtttctaggacatttatgggagctggtctctgattggctaggcaaccagatgcagaatcctgttttctgaagcagaatatttccacagattttggctgaaaaacgtttttctgctgtgggtacgtgagcaggaaacatggagaagaatcctttggcagccccattactaatcctctggtttcatcttgactgtaagtccaggggttacaggagacattcttagtctggggtgatgatgaggaaggaggaggatgcagtcagacactctaggttttatttggggatgtgtgaagaaaatgccaactctgtagagagaccaatttctatgtctgactcttttttaaaaaaacaggcgtgagcagcatactgaacgtggaacaaagtcctcagtcactgcatgttcaggagggagacagcaccaatttcacctgcagcttcccttccagcaatttttatgccttacactggtacagatgggaaactgcaaaaagccccgaggccttgtttgtaatgactttaaatggggatgaaaagaagaaaggacgaataagtgccactcttaataccaaggagggttacagctatttgtacatcaaaggatcccagcctgaagactcagccacatacctctgtgcctttacacagtgctgttcaggcacctgcagcccatacgcaaacctgtgtctggtgttgcactgttaccagcattgacaaagaaccatgagtaggatggaaaagacaagttcgttgaattacagttttttttcaagaggattgtgcaaacatagaaaaataagcatgctagtgatcataactaactaccacaagagcaaattaagtaaacatattccttatgacagatagatgtcagagtgctaatgaagcataacgcatgacctggtaactgggccgttactaaacaatactaaccccagctcccaacagctcattaaccacatcatggagtcagacccattgcctgctcttttggcatgattctgaaagaacccaatagttactcaaatctatctaaaacaatctgggtaaacaaaggcgatatttaccccctcattgttgctatgtcctgaaaacgaattcttctattatactttatcacagcacaaaaggagcatgtcggcatgcccctccctcacacacctggcctggaaatatgcatgtttaataccagaacaggtgatgctgcctcctttaatccattggggattttggttttgctttagttcaacttttcccccacatgaacatttgtatttttatttcttctcacatgtggctattttcatttttaaatatcactgataatatcataaaggagcactgatgaaggaccttcactattttacgtggtctataccccagcttgtactgtgattgtgatattggatgactaactgaactctattatcaaagtctcttcatttgtaatttccaggtatattaagtaggctgagtgtttggtgctctcctccttttgcagatttccaaacaacccaccagtttaaggtcccacttgtactctagaggcatctaattctaagcgttcttgggggctgttaagatgaagtaagttgcttctgggcctcctcatctaaaagctagaatttcaactttctctaaacatctacattaataattatttatccagctcctgtccagtttcctaaattatgctgctattgcatttcctctctcttttgtggatttatgtttttaaaaatattattgttattatcacatatttaggaaaaaaagctggtacattttaaaaataataatggagtgtatacaaatctctgactggacccatttagagatatatatatatagagagagaattacttttttcaaaatttattcacaaggtagtaatgaatctatttgactatcagatcagaagcggctaaatttgtaatattatttgaacatatatggaatcagaagggtatagcacaggactgagtgcggagaagctatggttcattgtaccctagtgtcggtggagaagaactacacaaaagaagactgatcactgttccagctgctagtcaaattcccaaaccagctctccattattggcataaagatcaatggaagaatttctaatatttccagcaatgatcttgaggcttgaactaactctgaattggtagaatcaaaaggcatgagtaaaataaaagatgaacatctgactcatttgtgtgtggctgcaacacaatgcctcacagtctcccgcatgtcaaggcacacatagaaattaattacattcatacaacacttcagtgtggaatgacgctgcttgaaaccagcccatgactccaacttccttgagaactctgcctgccttaagccacgatgagatagagatcttcccacacacacgatcaagaaaaatgtaaatctgtggtgcatggtccttacaaaaatatccctatctttatgaaagctgtatgtaaccaagtaaatatggatgaaaattttcagtgtctttggattctaaaactgatctgaaattgaaaataatgtgtcaaattatgattatttatagagacacaggcatgttcttgtaaattttgttagtttagacacatggaaagagaagagtgagtgaaatataaaaatgttaaataagaaacacagatctctattgattgcagggccccaacctgagcaatcagccacctgctcctgtactgtggctgcacagagctcttgttacctctgatcattgccaccaggtcttctgtgccagtgcagaagcacaaggctggcttttgaaaagaagtttggtgaaacaggcagatgtttcagatcaagctattagagactagcagaaatcagccagaggaagcatacatttttattgttgatttctcacaagttctcaaaaagactatttttcattgaactccagagcttttgtggcttgctgaataacaaactgttgtacaactcacttaagcaagtgccattttactatctcatgatacttctgctccttgtgatgctgactgcagctagggtcctctgggggcttgcctgactagaacccctggagctcacttccatacccggagccttggtgggaatgcggaaggctgggctcatctctcatcccaactattctcagggctttcattacacatggcctctgcatgtggtctctcatcaagatctctctagggcttccaatattacaaaagtggaaggtgccaggcctttttaatgtttaggccagaactgccacaatattatttctactgcattctcatgcatacataagaaccatgaatgtgacattacttggaaaaggggcctctgtaaatataattaaaattgagtcatagagccaacccagagtcaacatagaagggaaatacacaagggcatgaatatcagaagcacgattttgagggcatctttggatactaactcccacaagagctaactaagtaaacatattcctatgccagatagatatcagagtgctaatgaagcataacacatgaccttgataatccagtaattatcaaggtcatgtcaatttgaacttccaaatactgctcgtatctgtttctctatttctatattgcttactgctttcctaatttaggcattcagcacctctcacttggatgattgcaatggcttcctaattgtcttcctgcctctattctcaactctttgaatctaacttctacatggcaactagagttattataaaatgtatctaataagatcacttcctgcctccctttgggtagtaaggaaccactagaagttgaaactctgtattaaaactacaaggccggctgggtgtggtggctcatgtccgtaatcccagcactttgggaggccgaggcaggtggatcacctgaggtcaggagttcgagaccagcctgaacaacatggcgaaaccccgtctctactaaaaatacaaaaatttgccggacgtggtggcatgctcctataatcccagctactcaagaggctgagacaggagaattgcttgaacccaggaggtggaggttgcagtgagctgagattgccactgcacttcagcctgagtgacaaagcaagactccgtctcaaaaagaaacaaacaaacaaacaaacaaaaatacaaggccatctacagaatcctgtttaccttctattttaatcttccatccttctctcatatatgtaatatatatatatttatattatatatatttatatattatatatgtatatttaaattctaaccctttatgtgaatattaagggccttcctaaatctgaccccttttcccagaatatatttttcccattgtaatatgcacacaggtctactcaccctttatggcccaattcaggcattatttattttttatctgagatttcatagaatctcatagaatctgagatttcatagaataacacttgtaacatcttattataaatatttttgaatctgatcctctcttacaattgttttgacaaaaatatttgccactgagagctattatatgtttatattcaatggaaatgtttcctactaggaaatgcagagattcagtctaagagtgcagagatttcttttactccttgaaccaatgcatggccagcttcccttctcttcctttagtaaatttccacttccaaccataagatctagagagaggctacaagacagaccatgctgcgagttgggaaagggcaagcttgacccgggcgagattcctctgtctgggtttatgcctcctacgtaaactgcaccagtactgctgccctggatgaagagaagaggatttctaaagcccccacaggtgctccttgcacactccttgctcttcttgaatggggaaggagtccttattgccttaaaattgttagctttgtcttcattttgagatccaaatccaatattcctacgaaggaaaaaaaagcatcccagtggcatgcatttcaaaagtttatcttaattcacaagatttgccatttttcagcacatccgaaaactgcttcttggtctgtttccatttcatgcagtaattcagatttagattcactttttaccctacacaaaatgttgagatttccgccattaatacatttacaaggcaacactttaaagacattagatttcttgtagtgggttgaatgatgacagaagatatgtccatgtcctaatccctagaaatagtgaatgtggtgttatttgaaaaagggtctttgcaaatgtaattgagttaagaatatcaagttaagatcaccctggattattcaggtaggccttaaatccaatgacaactgttcttttaagaaacacacggatgaggctgggcacattggctcatgcctgtaatcccagcactttgggaggctgaggcgggcgaatcacctgaggtcaggagttcgagactagcctggccaacatggtgaaaccctgtctttactaaaaatacaaaaattagccaggcatggtgatgcacacctgtaatcacagctactcgggaggctgaggcaggagaatcgcttgaacctgggaggtggaggttgctgtgagccactgcactccagcctgggtaacatagtgagactctgtctcaggaaaaaaaaaaaaaaaaaaagaagcacacagatgagaaggccatctaaagacagcggggtagaggttgcaattatgcagccacatccaagggatgcctggagccaccggaggctggaaaagatgaggaaggatcctcccctagaacgttcagagggaacatggccctgctgacaccttaatttcagacttctggcctctaggggtataaagaaaataaatttttgtcaagccaccaagtttgtttgctacggcaaccctaggaaagtagtatctcctaaaggtgatatttctaaatagctacaaccaaaccttgattgtttttatagaagggcacattgtcaaccaataccatttgaatatggtattgatatggttctaatattttaatactttttggaatattttaagtttaaatcgtgacacagtgtatatacaaacacacacttttttttttatcatttaatgaacacctgagtatccacaatttacccgctattagagtaggacatgttggtgaataatagacaaatactttccaatagaaattgattatctgttagataagactttttttctaattatattaatgtcttccctcatcacgctggcatgtgtaaaagtaacatagtgggatggcagacatgatctctaaattggataatttaccagggaaatcagggtgacgaaagagaaatttgtatttcttatcgtctgttttgaggtaatgcgttgtctaacaataaatcacaagtgtctcccacatttattaaaaagtctgtgacctaatatgtcccattaaggcacttataagcatgtgctacatggcacaacatgatgcttagtgacaatggaagcgacaaaatggaactttctcttttcttcggatgccctagttttaaatcacagactccatttttaagaggcaaattattcctccttgaacaatgtcaccatcagtaaactcttttcttccaatccttgacacacatacataccacctaaattagaaagcagctttattaataaaataatctgttgtcaaatcagcaatgtttgagtccaccacaggggggcagcatcggcaaacatagactctcctctgagagggtgggcaaaatagtgtgattggttttctcaacttgcagtcacctctttccctttctttccaaaatgcacacatctactttccaaaatagaccgcaactatttctattgatctggaagaagcttgtaccaggcaacccatttaggagaagttggatgaagagggagagggagatgctactcatcacatcaatgttggtcttatggatgcaattgtcacgtgagtttgagacgtccctgactgcttccagagaataaatccaacaggatagagaagtatctgcaggcagggaatggactttctgtttgagaaacaagagttaagacaaagggagagaaacagagagaaagagacagaatggataaagcttgagggagatgggaagggagacgtggacagaaaggggaaaaaagaaaagaggagtgagagagacctgcgtagctcaggagctaaatatctaatctgattttatgtgatgcttcccattgtctttctaaacagaggtgaatggacaacaggtaatgcaaattcctcagtaccagcatgtacaagaaggagaggacttcaccacgtactgcaattcctcaactactttaagcaatatacagtggtataagcaaaggcctggtggacatcccgtttttttgatacagttagtgaagagtggagaagtgaagaagcagaaaagactgacatttcagtttggagaagcaaaaaagaacagctccctgcacatcacagccacccagactacagatgtaggaacctacttctgtgcagggcacagtgctccccaagcacctgctgcctgtctccaaatcttgccctgggtcttcaggagcagatcatcctactctccccaaagagcgggcgccagagaaagccaaagtcacaatgtctgtgaggatctcgagcaactcctccccatggcagtaggaatgcatgtagaaattcactctgttaagacctggaagagtttagcagttttagttcctaaaacttaactaccggttttcttctacacaggtgtctcaaagaattctaattgtcttaggaagaatcggtggattttaacaaattgtgatacagatatttatataaaaagtcatctttcagtgcagtggtccccaacatttttggcatcagggaccggttttgttgaagacaatttttccacggagagggtggggtgatggtttcgggatgaaactgtttacctcagattatcaggaattagttagattatcttaaggagcgagcagcctagatccctcgcatgcgcggttcgcaatagggttcgggctcctatgagaatctaatgccactgctgatctcacaggaggcggagctctggcagtaatgctcacctgccgctcacttcctgctctgcggccaggttcctaacaggccacagaatggtacagattccctgccgccaggggtttgggacccctgtttgggtggtagcagaggtttccaagcagtttctttaaggttttagctcaattgtattgcggaagatttgaaaattaaacatttttcattatgtacacaaaacttaaaagaagtttacgaccaactccctgaagagtcacctctgtagaactcatctgcttcaatgcaacgcagtccaacatagcataaagattatgcaggcggtaaccacctttccagagaactgagtgaaaagagctctttttaaaatgaggagtttagacgaaactggaaggtgacccatgaagagatttaggcatggtctctttttcactcttccaactgcaattatattcgccaagcccagatgaagctgatgattcaagttccgttagccatgttcattggtctaactacggggaaaagtcagccatagatttcaaagtgtgttcactgacttgaccaattactttatttctcagtacttacaaagatttttatcttgggaaagagaggataaaaatacaactgtattggagagtttaaacattaaaatcaactgagattggtcagctaaatggtcaaataaagtttttgcacctttttaataaaaagttttgtagccataaaattattgtgatgaaaattttgtaacataggaattaagttaatttatcaaatgaacaaagtcaaatacaaaatagtactatgccacttataaaacaaaataatatatgtatatagaaaaatatggatgggaacacacgcatgtttaggttaatttctaagagcaccgtaattatttagtagttgttttcatccattataacatttccaaggctatttcagagttgtgccaaaaacagttatgttaaaattattgtaaaaattattttctcctcttctgtcatagccttggcccttttgcacacggatcctctcaaactgacctttttttcgggggaggggaggggaaggtgggtctttctcccacaaagttttccttcctttctctttttttctttcatacgttttctgtgtttttctgctacaatcatgccaaagtacaaaataatactaattaacaaaatcacaagcactagaaaacagacatgaattataaaaggcctcataaataattctggaaagatcaaaaagtgacctttacagccagtaggggagtgatttcatccatcaaaacagctgccagagatgattcacatcagaagtaaaaaaacaaaaaacaaaaaacaaaaaccacaaacaccaccttaccagtataattaggatctcgttttgattctttaccaaatttaaggagagtatggtctgatatttcttggtttccctcactgattgtttctcttttcttcccagtgtatcttttattaagcacacatgaggggctgtcatcctttgattctccaatattttctgtctgggagaccccatgtacagaaacaaggggtggactgacagtttcaatttgactctagtgtcaaattgaagtgtttggctacttcctccaaaatctttcttcataggattttttttttgaaggttttctcaaagactacacctaactactgtacaaaaacacatcagtagagtctgcttaaaagacctccttcaaggtttcagtgagcatagatcgcaccactgcactccagcctgggtgacagagtgagactccatctcaaaatataaaatgaaataaaataaaaataaaaataaaaataaaataaaagacctccttcagaaggcattaatcatgtctttcttcctttttatctctctttctttccttccttccttccttcctttcttttttttctttctttttttttgtcacatccaatctgtatctccatgctgtctagagtgattagagtgattctctatcctttacagcaatggggcgcattagtccacatctctgtttttcttgctcactcacaggagataagattaaaaacaggtaaggataatattgttttatgaagcaggtattataatttcaaacttataaagaaagaaattgaaacctcaagatattaagtaacttacatctactcacttataagaatggataaagttcaaatatatgagaatatcagtactggttaggctacacatcagctggaactctcatacattgctgataggaaagagaaatgatcagcactttgtaaaacaggttggcagttcttacaaagttaaacttcacttacaatatgattcatcaatccctctcctacgtatttagccaagagaaataaaagttatgttcgcataaaaatttccatgtgaatgtttacagaagcttaattcataattactaaaacctgggaacgatcagatgtccttcacctggagaatggttaaacacattgtggttcatccatatgattgagtactactcagcaacaaaaagaaatgaaatattgactcatgcaacaacatggatgaatcttcaacgtgtcttggtaaataaaagaaactaagtctaaaggactacatattgtgtgagtttatttatattattaatacatatgggtagaagcaaaactataaagataggaaacagatcaaagggttggtgagaactgtaccatagacctgtataccgcaaaaagtaaatcttactgtgtataaattttttaataattagaatgtgagtggaaccccaaaagaaatagaaagtgtaacaaatgcttccaacaatattatagtgaataatgtaaacacagtgacactgtctttaatgtggaagaaaataactaacctaaataatttttgaaaacagtattttgaatagatattgtaagactaaaggcaaaagaatggcacacaaataccattctgtagttaataaatttgtttctcaaggggtataggctagcaattcttaaagtaatttatgtgagcatttggattgaacaaatgtgtataagtaaaatatataatagatcatagatcatgagagccagatttctcactgttgggaaaagtaataaataatgaagggagaaatctatgcagacccagtggagttgaactcatatttttttaaacattcatacatataggttgatacataaataaaattattaggagacttgagtgctttctgatgcccaacagcaaaggacaagcctgtggttactttattcaaattgattcaaaagcctgaaagactttcagcaaagtagataagaaatgtctgggaaacctaggtggtcttaatattaggaaagataacagaatttgtgttgtcaccatatttagttctgtcagcgtatctctttggtttttgtattgaggtataatatgcatatagtaaagtgcatgaacattcatcaaatgtttgtgaacgttttagttatgcacatacctgtgtaataatcctccaccaatcaagatgcagaatatttccaccaacccagaaattatttcattcctcttttcaatcaatacccacctctagagataaccactattttgatttctattgccttagattagttttgctttctcttgaatttcatattaatgaaatcatgcattacattttatatgtttcttatgttgaatactgttccattgtatgaatatgtcatcttgtttatctacttctctggtaatagaaatttgtgttgtttccagtttggggctatgatgaatacaactgctataaatgttcttatgtaagtctttttgtggacatgtgaaattgttgaaccttcttatataacttttattgttgtagtagaatctctgggtcataggacaggcgtatctttaaccttattagaaacttccaaggcatttttgaggttatatcattatggaaaggagtttcaattctccataaccttgctagtacttaatattgttgacatgtatttttaaactttttaattttgagattattataaattcacatatattttaaaaaattaagacagatcatatgtatcctttactcagtttactccagtggtgtaaaactatagtacaatatcacaaccaggatattgacgttgactcagtcaaggcacagaacatttctatcaccgcgaggatgctttctattgtccttttgtagccatattcatttcctctctgctcccatcccctccttcatccctaggaactattaatctgtccttcatttgtataattttgtaattccatatatgttatataaatgacctttggggattgactttttaaactcagcataccgctgtattttgtgtcttgccaaactcgagaagtttttggcttttacttctttgatactttttcagccttgccccttttcctttttagtgctctgatgaaaggaatgttagatattttgttatagtcctgcaattccctgaggcttggttcatttttttaatcattctattttccctttgttattcagattgagtaatttcttctgttctaccttccagttcactaataattttctctgtccactccattttgctattgagcccatctggtggactttttatttcagctacatttttaagttctaaaatttccattttatatcttggttcttttttatgtatcttacttctttgctgagatttctatttccacctgaagctttctgtttctttatttgtttccagcatgtctgtagttgcccttcgaaacattttcatcatggctgctttaatatctttgtcaggtaattttaccatcgctttcatctcagggttggcatctattgatcgtctctttaaaattctgtttgagatcttcttggttctgagtatattgagtgattttttttattgaaatctgaacatttgagtattgtgtttgaaactctggatcttatttaaaatttttgtttttcctccttttctctgatgccactccagcaggggaaggggaacaccgccttactacctggtagagatagaatccagggtccccattcaacctcattgacatcagagggcagggaggatcgtcaaactgccaggtgggggttggacttctgggtccctatgtacagatgagtcttgaaaaacatgagggtttggggcaccaacccccaagcattcaaaaatttgtatacaacttttggctcccccaaaacttaactactgatagcctactgttgactagaagccttactgataacataaaaaatcaattaacacatattttatatgttatatgtactatataccacattcttacaataaagtaaactagagaaaagtaaatgattttaagagaatcataagaaagaaaaaaatatgtttacagtaccatactgtatatagcagttctgtaagtttatgtagtctgttcacaagatgaatcatctgtctgaaattgcaggcaactccaattgcagctgcagcttaatatcaagcaataaagttttttcttgtaaggtcatgacttttctctgcttcttgggcgcacttccagcatcactagtggaattttgtatggattccatggtgttattcaaggtttacactattgcactaaacacagcgaaaagtgtgggagatcggtgagagatgactttttactgcaatgcgcaaatggctagagagatgaactgctcatgtggagagaattagcattgcattttaagtaggtattcacaaacttgagctcactgcaacagcaacagaaggtggctacaaaattattacagtagtatagtatgtactatagttaattttgtgcagttgtgatttaatactgcatctttaagtttgtttgcatttctctggactccaagtgccgccacatacactctgtgtttatgtgcttaagttttgatacatttaaaatttttataataaatttgtgtatgttttatggtagtaagtgataaaatagactagtatttacatgcattttacacattcatgacatatctttttcttaattttattgatatttttagactacgttgtgtgtttgcaagtttttttcaactttttgcaaatctcaaaaaatttttccaatatatttattgaaaaaaagttcacatataggtggacccatacaggtcaaacttgttcaagggtcaactgtagtctccactgtaatttatttttcttcctttatggttagggttttttgtgcacttttaaagatattgctgtccacttctaatataatacagttgttctcctgtgtcttcttttaaaactttatagcttcacccttcacatttagatgtctgacccatctggaatgtgtgtgtgtgtgtgtgtgtgtctgtgtctgtgtgtgtgtgtgtctgtgtgtgtctgtgtgtgtgtgtatatatatgattaaacaattactttggcatctatattgaaaagaccatttcttccccactgaattgcattggcacctttggagaaaatcaagtgattacatatgtgttcatctatttctgggcatgattctgttaaatcatctttttaacaattctcataccaatagaccattttctcttaattattgaagtttcacataagtcttgaaatctggaaatgcaattcctccaactatcccccacctttttcttcaagattgtctagcttgctataggatttaaatttccatagaaattgcaaaacagattctcaaacttctaccacaacaaatttctagtaatttgattcaaatttgctgagtttatgatcaggttgagaaaattgataatttaaatatggattccttagatttataaatatagctcttcatttatttaggtcctctctaattccttttattaatgttttataattttcattttaatgaactttcatatccttaattaaattcattcatttatttcattgtaaatggcatttttattttattttccaattgtttttagctagaatctagaaatacaatggaattttttattcaatgactgtgcaattcatccattagttctagtagtttctttacagatccttttaaatttttttatattcaaattatgttatctatgcagaagaagaattttacttattcctttcccaaatgtatgcattttattttctttcctgacttgatgccagttattccaatgcgataataaatggaagtgtgataatgtatcttgttcctaacctcagagaaaaaatgtttagtattttaccattaattacaatgttagccttggatatttttatagataccttttatcagattaaggactcttttctacatttctagattgttgagagtattcatcatgtgagggtattggccttgtatcaaattctcttgtgtgtgtaagttttgataaatttaaacttttaataatagatttgtatatattttatggtggtaaatcataaagaagttaaaataagttgaactcattattttggtttttcatcaagcaaaggaggagaaaaccttacccattatgatcttagagatcatgtaatcttctaaaatgtaagatactctgcgaatactcagtagattggacaaatacattttttattctttagagctatgcaaaatacttaatgatttttcaataccattaaaaaatcacctgttagtggcctcaattgtcttccaaaaaataaaggcgaacaaaccaaaagcaaaaaaggaaattgcattaattacttttcttctgcctttgttaatgtaacaacatgatatagtcctccctactttcagtaattgtttgtttcttcttatattttcggcagtactgtcctgttaacttacatctttgtgatctggtacagagtaggctcttagtgaatattttttaaatgaatggaatattattactatgacttttactctatatctttgtagcttgatttttcacacccgtgttggggaaatttattgtctatcattgaatttttgcctacaaatctgaccctgtgtttaccccattgtagtcttttgttcaaaatctattccagaaaactgaaagagtgcacagacaataatttaaagatttgctcagcataagttctctcagtaaatttgtcagttatgactcatctacgcattcatgaaacaagtaattattgagtgcttattctgtgccaatatctcttttttttttttttcttttgagacagagtcttgctctgtcgcccaggctggagtgcaatggcacaatctcagctcactgcaacctccgcctcccgggttcaagcaattctcctgcctcagcctcccaagtagctgggacaacaggcacttgccaccatgcccggctaattttttgtatttttagtagagacagggtttcaccgtgttagccaggatggtctcaatctcctgacctcatgatccgcccgcctcggcctcccaaagtgctgggattacaggcgtgagccaccatgcccggccgccaatatctcttataaacattgaatagtatgggcttttgaactagcctttaattatgggaatattagaaacaaaagaaaaattaactccaagtcagcaattgagaattataatgggaatattattgaaataacaaagtaatttaaaaaatagttaaaacctttcttggagtgttagaggactgataaaacaaagatgagtacagaggtattaaaactaagatacctaccttcaaacctgataaaagagtcagaagattgctggctgactttttgcctgattatagctacacagttcattcagtcagtcagtcacaagagggggctgcttcaccttaaaactcaggtttctttcttgcagaagggacgctaagcttatgttttccactaaagttccacagaaaacaggaaaaaaaatgatacacttttatcctctttagacaaattgtactttatgatctcttattaagtgtgttatggcttcaaaagttctggggcccttacactgatggactaagtcttttcagagcacctcccttaacactgctttctccaagttacacttccctaatcatctcttacctcccctattccttacacctttttcttcctttcctttacctattcttaccaccatcaccccaaacttctttgcttttcctggtctcttttctttccgcctcagtgtccttggtgcacacagtaggcataagcacgggcatagaaattaggaaatgaacatgaaggccatgagtttaaggaggatgagagccagcaccatttatgtcattagtcactatatcaagaacagatatattgagaaatggctacttagacaacagtcaacacatgattccagggacctctatagaaaacccgagtttggggagacttagctttcagtgtcaatgttatcaatttttattttccccctgagcacatcacttcctacttttgaacttcacttccattttctagaatgtagatgggaatttccaactccttacaacacagagctcactataggcttctgggatttaatgacactttccacaagctccatggagcagaggaaactttatttggtacattgaggaagaaatgatggaagaaaaggtctggatagatacatccttatgatcagttttcctcattctgtgccagcctcttagactttaaacctcataaatgatttcagtagacaccccctgagttgaggatgtctggttgatatcctcaccgtcttctcaggaacatgactaaacctggggaggaagacatagaaaagcaactgctctatcattggctgacaagatcctgacaacaacacaatgagagctgcactccttgcaagtctttactagtagctgttgcttctgttctctggaaattctttaaacctagaatcagacacaaaaactgaactctgggtccacaatcctcatttgtccttgaagtatgaggctggtggcaagagtaactgtgtttctgacctttggtaagtgctctgtgtctacctagggagggcttctgaggacaagggaccccgaagggtggtttgccctctatgctccctgtgctttatccagcatactagatatgactgagaactgttctgtgcatttgtctaggaagtacatacatctacataccaggctagatcataaccataatcccagaagagcccttggcagtattcagttttaagaaatctatgggtttactaaatcaagctcccatggaatacagcctagagggtctctgattattggcatgtatctttggtctttataattaacagcaatgatattttttgtgttcttgcaggacataaaagttttggagtgttaagggagtgttgtatccttgatccatagaattgcattggtttgagagtcaggagctaatctgattttcttgaccccttaggaactataattgatgctaagaccacccagcccccctccatggattgcgctgaaggaagagctgcaaacctgccttgtaatcactctaccatcagtggaaatgagtatgtgtattggtatcgacagattcactcccaggggccacagtatatcattcatggtctaaaaaacaatgaaaccaatgaaatggcctctctgatcatcacagaagacagaaagtccagcaccttgatcctgccccacgctacgctgagagacactgctgtgtactattgcatcgtcagagtcgcacactgggacagatggggctgcacctgtgcaatatctccctggtggcaagtgaggaggagggtagcattcacctagagcaaaatgtcgataggagtcaaaaagtaacaagaaaagaggaaaaggaagggaaggagagaaggaggaaaataggtaaagtaaataagggagatacgatgaagggtaaaaagataagaataagaactttattgttgatgcggctgagaaaaatgataaagaggctgtgaatcataatttgaacatagcaataaaatgaagagggttaagaattttcaagactcttcttcatgtcaaaaaaaaatcatttcagtttgttagtaaaaatgaatggataaggaaaatcaaaataattctgcttgtcccaaaggcttttttcgtctggatccaggggcaagtccaagctttgaaatgcatgctgttatagttgttccaattaccagaaacaagttgatgtttctgcaagaaaaatctgaaatgttctttcttactagtgcagtaacatcagttactagagcatgcatatttgtgatgaaggtttttctttttggaaagaaacaaaaatcaaatgaatattaatttgtttttatttttcttgaagtcttgaatctttaaatagtcttcatcacgttttatttcctaagcagcacacaaatccatcttaccataaaagactcagataaagcaaaagtgaaagacctagctgcatttcctcattcttccctatctcacaccactcttttcaaagaacactagctttgacagtttaaggtataccatgatagccagtttaatttcagttatctatgtttgcatataactttatgcaatcacacacaaacttacatacatacacacagttttgtcatgtaaattggatttattagattttttaacttgccatttatttttcatttaataaattgtcctagagatctttctatatcaatagagaagttcactttattctttttggtgcttatttagtactttgagacattccatcatataattgcttttctcttgatgcatatttgttcctattgcctcactgtcataaagaacattgtgttctacatctttacagattcaccttagtttgtgtgtatgtggaagtgtttattttaatgagatttctgaaactgaaattactatgtcaaagggaaggtgcatttaaaatttttggagaaagtggcaatttgccctccaaatgatgtaactacactccatataatacatatatatgtattattatacacataatgtatccattataactattatataattaataaatataatacatataatgtgttaaatagcttccaaccaacagtaggtgaaagaactcattttacatttttataaaaattgaattgagaattactaacggcttttatttttattttacttaattattctatttatttattttgagtctgggtctcactcttgtcacccaggctggagtgcagtggccggatctcggttcactgcaaccttcacctccaaaactcaagcaatcctcccacctcagcctcctgactagctgggactacaggtacacaccatcactcctggctactttttgtagagacaggatcttgccatgttgcccagtctggtctcaaactcctgagctcaagagatctgccagccttggcctctcagagtgctgggattataggtgtgagccaccgcacccagcccagtttttaataatccaaagatatattatctttagtcattttcctgattcatagtgtttttgagcaacttttttctacatgtattggcactttttcatttggcaatatgcttattcctaccttttgaatatttttctatttagttgtcctcttttctctttttattcgtaagaattagtttcatgccttaaataatacattatttgtatgaatattttattctaacattacctttttattgcttatttctaatataattttaaatttttacatattttaacctatcaagtattcctttcctttaggccttgaaggtcaatatctttacaggaaatccctaagtatatcacatattttaatatttattaccatttggttgagaattattttgagatgtatgttacagattagaaaactgagtctcaaagagatttaaaaacctgctaatattcacagtattaataagtgagcatcaactttaaatttatttttaaacctgagattgtctaacactaaaatctgaacacacattgtttaacctcatcttactggaagcaatcataagaagaaaaccccaaaataatgaatcaaataaagcatcagtggaatggattatagtagccatctaagacacatgttagagcaaaaggtccggaatgttagggtagaaattgcgagttatgagttgagaaagtcaatggtccttaatcttatagaaaggtaatgttagtaccccaaacattcaaatagcagccaaaatgggtgttttgattgtggaagaactctaacgcatcctcagctctttattagccatatgtgttcccaggcagaatggatattgaagaaattagaacataaagcaaaggaagtaggaaagaggagtttgatcctggatctgagtggcttccaattattcttggaaacttcacacagattgaggaatttttctggtccatagaatgggtagataaatgtaaattactatgatgatcatacttggaaattgctttgattccatgagtgaaagataagggaacagatatctacacacaaatcttagaaagtgcactgagatgtgctggtagcagtttccaaagattgacatatcactttcaacgtccttacagtcactttattcacactccttttctctttcacacagtctttaatctcatttaccttttgtttaacaccatcctctactctcctgtatttgaacacacaaatgtttgaggcctgtatttttggtttttattcactgaagcatcctctgtatctaggacagtgcctggcaaatagtaagtactcagaaaatatttactgaacaaatatatttatttataattgaaaatttttactggcaaatactaaggatgcaataaaatactagggacatgagttagattcgctatgaggatacatgagccattcagtgagaagcccgaactcatcaactttaaagaccattaatttgaatcccctttagccattaactcccatagccaccatctagacaggtcttatgataatgttctgctccacctctgaaatcttacctgcagtctaaaacctcccgccctgagattctcaccctcagttactctcactgtacttgttctttgactatatttggttatttaatcccttgacacctttcttttcttttttttttttatttaacttttgttttaagttcaggggtatcgaacttaaaataggtttgttatacaggtaaacttgtgtaggtttgttatataggtaattctgtgtcatgggggtttcttatacagattattttgtcatccaggcattaaacctagtacttatttgttatttttcctgatcctattcctgctcccaccctccaccctcaagtaggccccagtgtgtgtttttccctctttgtgtccatgagttctcatcacttcattcccacttataaaagagaatgtgcagtatttggttttctgttcctgtgttagtttgctgagaataatggcctccagttccacccatgttcctgtaaaggacataatctcatttctttttatggctgtgtaggattccatggtgtatatattaccacattttctttatccagtctttgatgggcatttaggtcgattccatgtctttgctattgtgaacagtgctgcactgaacatacacatccatgtgtctttatgatagaatgacttatattcctttgagtatatacccagaaatggtattgctgggtcaaatggtatttctgtttttcaatcttcaaggaattggcatactgtcttccacagtggttgaactaatttacattcccaccaacagtatataagtgttcctttttctctgcaacattgctagcatctgttgttttttgactttttactcatagccattctgactggtgtgagatggaatctctttgtggttttattttgcatttctctaacgatcagtgaagttgagatttttttcgtattattgttgactgcatgtataagacatacatgtaagacatacatgcagccaacaataataacttcttttgaaaagtgtctgttcgtgtcctttgctcactttttgttggggttttttcttcttgtaaatttgtttaagttccttatagatgctgaatattagacttttgtctgatgcatagttcgcaaaaattttcttccattctgtaggttgtctgttcactctgtagatagtttcttttgctgtttagaagctgtttagtttaattagatcccatttgtcaatttttgcttttgttgcaattgcatttagtgtcttcgtcatgaaatttttgcccatttctatgtccagaatggtattgctaagttgtcttctaaggtttttatacttttgggttttacatttaagtctttaatccatcttgacttagtttttgtagacagtgtaaggaaggggtcccatttcaatcttctgatttgtctagtcagttatcccaacaccatttgttgaatagggaatcctttccccattgcttgtttttgtcagctttgtcaaagatcagatagttgtagatgggcagccttattcctgagttccctattctgttccattggtctatgtatatatttttgtaccagtgccatgctgttttggttactgtagccttgtagtaacctatagtttgaaggtggggcatatgatgcctccagctttgttcccctttattttcaccttatttctcagaagcttcttatcttttattttcttacctataatgcttatactctattacctgttgctttcaatctttagtcattgactatattattctcatcccaattctgcatcatagcagtgatctaattaattcccaatcatgaatctgtgtcttccttattgtaatgcatatcttgtctgatcagagtacaccgatgcgcagattggtgtcattaaaacatactgttaccagccgggagcaggggctcatgcctgtaatcccagcactttgggaggccaaggtgggtggatcacttgaggccaggaatttgagaccagccaggccaacacagcaaaaccctgtctctactaaaaatacaaaaaaattagccgggcatggtggcacacatctgtaatcccagctattcgggaggctgaggcaggagaattgcttgaacctggaagacaaggttgcagtgagctgagatcatgccactgcactccagcctagacaacacagtgtgactctgtctcaaataaataaataaataaataaataaataaataaataaatgttgttaccttcaaaattaactaggcccacaatgtttccaggaaagtattcttcttctctgtaatcacatctcactgccattttctaaaacttctcacatacctcagacttcctaacccagatcctcctccattcactctcttgggagacatttaatctctgtgtataacaagaaaaaagatcccattagaaggtaataggtgtttcactttctaccttcacactccaaagtatcacttaaatctaaactactgtaatccttttctccttcatttcaataaaattgaaaataactgtttttcctcctaccaaaactttgtccttctacccataatccacattccaatcccatctgtctcctcaaaactttgatccattgtttatacattctttccaaaagcatgtaaatataccctaatttgtataaaccctaccattacctcttcaacatcctcatccagttaacaccatgactcttttctcctctttagaggatccagcaacctctagaaggagatttctatattcaaattttttcttccttgtctcatcacaatgcctcttcccacagcagttgaccttttgctgaaaagaccaaaatcatgatttttgtgttgttaaaaaaatcagtagttcaatagcacagtatggtgactatagttatcaataatttattgtatatttcaaaatagctagatttggaatgttgtcaacacaaggaaataataaatgtttgaagcaatggttaactcaattaccatgatttgataattacatgttgtatgtatgtatcaaaatgtcacatgcatttcataaatatgtacaattattacgcatcaataaaaaatcaatagacatcgaaaagttatcatcttatagacatttatttaccactcactctgttagccattcatttctttttagaattccttttccttctcttttagaaatccagccatttctgatttgccacttacctccctggataccctttgaggtttccttttctttttctttttttttttctgagatggagtctcactctgtcacccaggctggagtgcagtggcacgatgttggctcactacaacctccgcctcccagattcaagcgattctcatatcccagcctcccaagtaactgggactataggcacaagccactatgcccagctaattatttgtatttttagtagagatgggatttctccatgttgaccaggctggtcttgacttcctggcctcagatgatcttcccgcctcagcctcccaaagggctggaattacaggcttgagccactacgcccagcttcaaggtttctttagtactttttccattatctatcccttcagtgtttgggttccttgaggatttttttaagtccctattctcttctaaattttgctctaagcatttgtctcggtaaaattgcatctagtcttatagggtagtactacgtcacagataacatagtgggcaaggaactgagcttgcagtggaaaagaattggattctaatccttgcatgtccttggacaaattatttaacttcataaggacttgatttcccatctgttcagtatagataagatctactgtaaagggttatagtgtaaaatgtgcaatagttatcagtggtcaataatgtggattattaaatcatattgatgagacaaactccaattctgttgatatagcagatcagccagacttgttttctgagcactggtcacaagaccctgctgaacaaaacaggagctgatcaaaacagaatgcagcaaagagagtggccaaaaccagctaaaaccaagatggagatgaaagtgacctctgattggccccactgctcattatacactaattataatacatttgcatgctaagtgaaactcccaccaccaccatgacagtttacaaatgccatgacaatccccagaagttaccttatatggcttaaaaggggaggaaccctcagtttagggttccttttccaggtaattcatgaatttatttattatttagaatataataaaaaaatagccatatatatagctagccaacaatccacaagggctgtaactgctgctgctattactctgtctatggagcaaccactttcctgtactctgtagctccaatacacttgccttcactttgctctgtcagctcactcatgaattctttcctgtgtgaagccaggaaacctgctgggctggttttggggatcacctacatcactatcacttactatgacttggacaaattgaatcttttcttccatgctttagtttccccgtttataaaatgacgatgataatagtatttacttcataggattaaataatattatttactttataagattaaaatagcttcctcataagcagacccctgaaaacactgtcatcagattattctgctaagaaattcaaaccaaggaaatggagcccaaacccaaaagactcagtgtgtttccacatttgacctccagggggcaatgtctcacagaccggaaatgtctctgctaagaagagttctgtccttcctgagcggctttatctcacagctcactgaggtccatattctgagtaggatcaacaccagagtggttgttgtcaagagagcagctcttactagtggtctctaggccttacctaagcagggaactcttgaatcccagattttcctcattatagggactcaccatcctctggcacattccttcccactcaggagatcttctagaatagagctctcagcttcctcactgcctagccatgctcttagtggtcattctgctgcttggaatgttcttcacactgagtaagtataataatattgtttccctgctcccgtctccatacaaggaacattgttccaatcggaatctaaatagagactctgtctcattacaggtagatctgttctggtctcactaacagagtgttgatgttgcaggaggaaccagaacccagtcggtgacccagcttgatggccacatcactgtctctgaagaagcccctctggaactgaagtgcaactattcctatagtggagttccttctctcttctggtatgtccaatactctagccaaagcctccagcttctcctcaaagacctaacagaggccacccaggttaaaggcatcagaggttttgaggctgaatttaagaagagcgaaacctccttctacctgaggaaaccatcaacccatgtgagtgatgctgctgagtacttctgtgctgtgggtgacaggaggactgtgcctgggactgcaggaggagctgaacacaaacttcctgagacactgaggttttcaggaactcaagggcacagcctgacctatttgtagcaaggtctctcatttgatgaaagtgagaaaggtggaagaacagagccatgaggagtgcttgactccagagaagaaacagagacttcaacacgttccttcttttactactgggtcacatcagacaagatgtagaagagacagacttctatgactgttctccttctgcttggaaataccacactgaagagggtcaagttttttttttattatactttaagttttagggtacatgtgcaagattttaaattagtgtgaccagtactggactcctgatcctctccttctcactgccaacatgctgcttctattaccttttgtttttcaatcgacagcatctcattctttcagaatctctgcccgtagcctcagagttatttttgactcttattttttctttcactattcacattgaatccatcaagaaattcagttggccctaactaaaagatcgacccatagtttgaccactgctatctctttggtcaagccaccctcatctcaatgaattaccgtagtagccttccaaatggtttccctgcttgtcctcctacagaacattcttaatacagcagccaatgagatctttcaaatatagataggtcactcatctactccaatccttgcaatagcttcccatttctcttagagtaacatcaaagtacttacagtgacctataggaatgcatgatctatctctcgttacatttttaaaacaccaacagaaaaataactttggcaaccctgaattctataccaataaaaatatcacaaagaaattatagtaaagacattctcgaaaggaaaactgagagaattcgttgtgagcagacctgctataaatgaagtcctaaaggaagttattcaggctgaagggaaaggataccagaggaaaatttgcaacttcaaatacgaaggaagaacaacagaaatagtaaatagatgataagatacaagaaactagtttccatttctcttttacagtcagctttactgaggtataagttatatacaaaaactatacatatttaatatatgcaatttgatgagtttggacatatgcatacaaccgtgaaaccatcatcacaatcaaggcaatagacatgtttgtcatctctaaaagtttccttgtgactctttgtttttgttgttattgctgctgctattgttgtaagaaaaattaacatgagatttaccctcaataaattttcaagtgctcaagcctgtattgttaactatggacactatgttgtatagcagatctttagaacttatttttacataactaaaactttaaaaccattgaacaacaactcccaatttctccctccccccagtccctggaaaccattattttattctctgcttctatgaatttgactattttagatacctcaaataagtgtaatcatgcattatttgttcatctgtgactgggttatttcacctagcataatctcctccaagttcaatcgtgttgtcacaaatggcaggatattcttctttttcaaggccgagtaatgtttaattgtatgaatataccacaatttatttatttatttgtcactaatctttcttttccatatcttgcatattgtaataccacatgcagaagaataaaattgaacaccatacgcaaaaacttactcaaaattaattaaagacttaaacatgatacctgaaagtgtgaaactactagacgaacacgtagagaaaaagcttcataatattggacatgacagtgatttcttgggcatgacaccaaaagcacagacaacaaaagcaaaaaaagacccatgatattacatcaaactaaaaagcttctgtgcagcaatggagcaatttatggaaagggagaaatatttgcaaaccatatattgataagtggctaatatacaaaatatgcaaggaaccataaaactcagtaacaaaaaaaaacaagtttaaaatgggcaaaagactcaaatagacatttctcccaagaagacagacaaatagtgaacaagtatatgaaaaggtattcagtatcactaatcatcagggaaatgcaaatcaaaaccacaatgagatatcacctcacaaatgttaagatgaccattattttttaaaaagttaagtataggtgaggctgtggcaaaactgaaatccttgtacagtgttcttgggaatgtaaaatggtgtagctgctatagaaaacattatggagttcctcaaaaaattttaaatagaactaccatataatccccaaaccctacctctgggtatatatccaagataattgaaatcaggatctcaaatagatatctgtattcccatgttaatttaagcattatacacaataatttctcttcttaatttatttaaaatgcatagactgttgaaataaaatgttataaaattccccgttggggttttcaaagtctaaagatggaaggcatctgagaactataacatgaagaaatgagggtaaagtaacctatatacaatttctatattgttcatgaagcagtataaataaatataaacagactgtgaaagattaagtagtaagcatagtagtagtaggcaatcctaatagaaaccactaaaaacataatacaaaaagaaatagtcaaaaatcaaatagatacattataacagaataataagagaccaaaacaaagggcagaagtggaaaatgaatactgaagtaatagacttaaatacaaccatattaatagttacattaaatgtaaatggtctaaacacagatatttaaagacagagattatcagtatggatttttttcttaaagaagacccatctacatatgaactgactttaaatacaatgacaaagattaaaagtaaaagaatggaaaaagagatccatgaaaacactaatcaaaagaaatctggaagggctatattaacatcagacaaatgggacttcagaaaaagaaatattaaagaaataaagtgaaatattacataattataaaagggttgcttcactaaaaaaatgtttaaagtgcttgtacctaccaacaaagcttcaaaatatttgaagctaaaatggttagaactaaaagaaaaatagacaaaaccgctattacacttggagacttaaaccctttgtgttcagtaaataatagaacaagtgttatagttagagaatcagcaaagatgcagcagacctgctcaacactattatattgacatttatggaacactccagtaaacaacagaaagaacataaagccatgcttagaagaaaatttataacagtaaacatttacattagaaaaagaaaaaaggctcaaatcaataattttatttcttccttctgtgtatccccagtgatgaatgtcctgcacagaaaaaagtaatcctagcaatccaagaaactctgtttttgagttcaggcaaagaagagtattttctgctgttactgcaccaggtacccaactggaaaatgatatgtctcatattttatattgctctcctatgctcaaagattaaaatgagattaattctatttatatcacatgtcacagttctggaggaggttatgagccttcctattatagtaatgatatcagaaagggtacaagataagtttagtccttcatcttttaaaaaaatatatcagttatgaagattgttcgccacgaaatgaattccgttatatacattataaattatataggacattatagggtaccttacaatacatctgcgtattttcacacaaggtgagatatcactaattattaaatggaactatgccactatgtttttccttagcttttcaagggataagcacaagaatattcaagttatgcagtgggtcaagcctaagaacaaatgggaaagctgatagaataaagaaagactcaggctaggttctggactagctgggactaacatataataagtccataagtgcagaatgaactggatgtgaggagtgtgtaacccttctccatttcaacgtgcccaccttttgctttatttttcgctgaatgcctctcaatataacaatgtaacaacacactgacatgtcatttaagtgtcagaagcattatgggacatgatagagggaacaatcagcttttctgtgtcctatttgatctttgacagtataaaaatctgacttttttcctgtgggcaggtatagagggcgtatatgataattttgtgtactttctgctcaatttttctgtaaacataaaactgctctaaaatagtctattaactttgaaaaatcaattttagtatagaagctaaaaagaaaaaagaaaaatcaatccaatgcgctcaatctcatagaaaatatttgctacaaccagttcggattatttcttactttcctgccttgtgtactctcttcaactttttgtgttggtgcttctttggtttgtgtatttactatgcagcatgcattatgtaaagttttgcatatattatataatttaagtatactaacataaaagtagaaataacttctgttaggaaaagaaatataataagtaatttaaaagaaaaagtttatggattggatagggtgtgtagaactctcaactctgtcattatttgaattatagtagaaacgttaacaaacatcttaaatttcaattttatcatctgcttacaggagatcatcatgatcatcctgtcagcagttgttccaattatcgaataataaaatatctttcaagggcttagctcatattctagcacaatgtaaacatttaataaattattataggtaaagaaatggaggcccagaaaacataactaattttgctcataatcagaaacctagtgcattagagaaagaacactgagttttgaaatcctagctataaaatttaagccaaatatcttcaacttatgatatcactgatctattctcttgaatacatatattggaagtaaaagatgagcagctagagaaaagtagaggaaaagagagaaaccaggggaagcactttgaaaccaccaaacatgtattatctcttcagatattcaatcacacagataggcatactccttgatggccatttgtactagggctgcaggacttgataaaagagaacctacaacaacattctgtaaccttcaattgatttgttgccctagatctggtccgcatctctctacaaggttataaatgtaatgttgttttcagctgtttttccttgtattaatgaaatggaaaatcctttctcttctgtcctgacacagccctgattattaactggagtcacaatatttttctttctattgttatacaaactgtgtggaaagtattctctttattctcaagactatgatttaatccagttagtaagagggaagatcaagatagttagcttgatttttccattattcagtagatgggcctttatataaatgaagcgggagactggcagtttactcctatactgtgtgagcttcctttcattaagacctcggtgtcttacagcttctcatgactcttctctctcccactgtcaccttctatagcagcagtctctttcctggcagatcttaatgtgggaattaaaaaaggattgatgtgtccacatattaccacagacagattgatagggtcaggctagaaagaattatgtagaaaaactcggcgatagaagcaaaaggcagaatgggatgtacagctgagccagaaaatacaaggcaagaaaagataacagagatcgaatgcccataaatgtccttatttctgtgctagggctctgtgactgcaggtacaacagagaacacatgagatcctaaggaaagagtgtatgtacgggcgttggaggcctgtgagtaccatcagaacttcctgagtttcttccaaatgtcctttcttcagtaggtatatctctgaagcacctgtgtgttgaatgaagaattacctaaagggctgaatctttctcttcttaccttttctctagtcagtgccagactttagggcatgttgtcctctgggatcacagacctcattgaaaacaaatcccagtatcccagtacggcttccattctagtgggaatgggaaggcaggcccccgttgtgctcctctcctggggatgaatgttcactgaggttctgcagtacctctatgccatggctctcctttagtcctggaaacagcattcagactccagtccgtcatagcagtcactcaggatcttacagccagctcagcaacaaacaaaaacatagtctggggctcatagcatcccttccaaagactagattttctgatttcaggtacaagattcttgtggcaaatgacaaaaacaatttgtcaattcttccgaacagaaggtccagcaacccgaacctcccagggtggaccagagagatgctgttgtatatgactatgctctgagagggatgagagtgacaaatgaggctgctaccttgtgatagccctatgacaaaaatgaaaaggatggcagccttggaagccagttgaaggaaagatacataaaacacactagcaagaacagaatgcttactctttctttttgataagaaagcccatctgtcacatgcttccttggtctagggaccaggttacaataataatgatgataatgatattaaaatatatcatttaatatcattttcattagtaataaataaaaaacaagatcaagtaagtaagcacgaaattcaagtaattagaagaaagaaataaatctaaggaaatcatgaaaatggtacagataaatgtataaacataactaaattatgagaaaaaagaaaaaatagaattggacaattttttaaaaattgaatcatgaaaaaattagattaactcttcttttattgaagtaattattcaaaaaagagagaacctatgtaataggtattatacaggtgtatagatacatttatatatacattatatagttttctatcactttgttatcttaatttatgttttagtcctccgtgtgtttctccttccttcacctgttttcaagcaggtggtgtctctgtgtttcaacatgtaagtgatgatgcctgcgaagacagaaagctgtgtttgcctgtagagtcttctggcttgttttgaaaaatctaatttctttcaggaataatagggtttatggaagtgggagaggtggaaggaggttttttggtataaatagaacagagaatggcttttccaggagagaataaaggggtctgtgggtcctaggcagcagggaacaggtcgttgtttcttgacaactctctgagaattagtaagacccaagagtgggatggctgtttgataattagaaagagttcccaggcttgcaaaatattttggggactccataaacctgaaaaacagaaatcttccacttagaatacacacctaacatgaatagtttataacatattggataagaaggctatgtttgtgattccactcacagaccatagtgataccatttatagttaaattggcttgtgagaacgattactaggcaaagaatagaacttgtcttggttgtctttataatcacatacacaggtctgtctctttgaagcattagatctcaacagttcttaagtttggatattgggctgggacagatgaagaagacctggggatccctcagttcagctctcatggcttcacattggatgtgagcacagaggctgtcaaagacttttcccaacaggctaagggatagggcaaacagtcacgctcattgtggattactcagaattccctatgagaaaggcataaaaaggttgtaaattcggtagtaatcctgaatttacaatcttatgcagttctgcccatcaacagggagcagacttcgtgatctctgcacgccaaagggggaaagaagatcaaagcttcttttcatgctttaacaggtattagcaaaattctgagaaggattgccaatatcctgttcataatgaatctaaactggagtgaaaaggaagaggtaagagctctccttactaataaggaggcagagcttcctccacccttcagtcttccagcctgaggctcagccacctacctctgcgtgctatgttcttttggcacctgcagcctgtccccagtggtgctgctgggcttatggctcccagtgtcaaggcagcaaacttattctcaacaggtgtatagggaaaggcaaactcagtgaatcaaatatttttaatattctgaaaaaatgatctggaaatacaaacatataacatttaataaatattatttataaatcatatgaaccattatcaacttctcttcctctgcctcagccatgtcagtaactcagttactctctcttatttcttggcattatatgatactcgagattattcaagtgtatacattggcctatagtagttgcttttctgtttctatcccctaaatattggttatattatcttattttttgctcctacatgaatgggacctacaatataagcagtccccacatacacacacacttgtgcttaaatctcaataatctcctactagtgaatgcagtgcaggtctctttaatttatggttacttttttccagtttcttccatttcaacaatgtgcacattttgttttttgtgccacctcacaatttttctttcctgactctttgtttccttgagaggatcaggcaagaggaaactgacttctctcatctatccatacccactctgtgatcttagataggcttcttcctctatcatatggagacaattttacctactctacctcttacaggattattctgaattatcttccaaaatgaagatatctttgcatcaaataatatagaactaggaaagaattatatatatgatgagatgagcctcattgtatgggtgaagtaaaatgtggactatttctgaaatggattgtatattaaattgcaatctggttagaggtttaaatcactaaagaggtagttattcatataaaactgacttagagttgctttgataaattaatcaggaacacagaccagttaattaatttatagcacctgttaacatccaaagaaattaaacctttcttctcaaaattaagctctaaccatttacactatagtcattttaagaattttaggattatgggccaggcgcggtggctcacatctataatcccaacactttgggaggctgaggcaggtgggtcacctgaggtcaggagttcgagaccggcctggccaacatggcaaaaccctgtctctactaaaaaatacaaaaattagccaggcatggcagtgggcacctgtaatcccagctactcaggaggctgaggcaggagaatcgcttgaacctgggaggcggaggttgtagtgagctgagatcatgtcactgcactccagcctgggcaacaaagcaagagcccatctcaaaaaaaaagaaaaaaagaaagaattttaggattatgtaaagctactaattggcttacagaaactgactaaaataggaggtcttttccttggaaggaaaagatgtaataatctcagttttggataaaattgggtaaacagatttccctacggtggttaaagggataaaaacacaagatatccccagcatctacattacagacttcaatgaaggaagtaaaaatatctcaatagttgagttgaggaagtgggtcaaggatatgaatatccacagatgctgacaagggaaatatatgttatattcataaaattcaagtaattaagataggtaagtatacatgtccacttaggttagatgttaattcttaataagtaacataatgatctgaggctgtttgtgtgccacttctacatctcaaactttgacgtggatcccctggagatcttgttaaagtacagattatgattcagtagggtctgaaattctgcatttctaataagctccaaggtcatattgaagccgctattctgctgagcaaggtttccactatctgagaggcagtattccacaggacctaagtgggtccactctttagccacactgcctagattagaagactggctctgcccgcttactaactatatgattatgggaagattaatgaacttctctgtgtctcagtttcttcatttgaaaaatgagaataatgttaacttcctccagtgatgttgtgaagaataaatgtgttgatttatatgaagtgtttagaaaagtcaacaacattgttaattgtacatattgtttgtcaagcttgccatatcaaaaatatctatgtgtttttgactactaaatacctgtgtgtttttgattggtatttaattggctacttgtgtactagttgtttaaaaagggacaaggtgactaattattgagttttacatagttgttacacttcttcacataacgcttgtcacagaacaatatagtcatatattctgggcatttttcactcaggatgagtgtggctgatgaggctgatgtattcttggatttttctaggtgatgattcatctgggctgggcctttcattagggcctgttgagaaagaattgaagtagtaaagttgagcttcagggaatcctctaaatagattggttgaaacacagtctggtttatatacataatctcaatgaagactcaagacatccttgtggcataagtaatataagccccattcaactcattagaaaactattacaggcgtgggttaagtaaattgtttgatgtgacctagccagtaaatggcaatgatggagtattaatataagtatatctgaatccggtatcaagtcatttaggcagaattcaccacttctctacgaaaagtgttaagtgttaaaaatatttctgaaagttttctcttgtatccaaacatttttatattcagtattctatttgtcctggtgatcctgagctcccttgaggacattggtggcactaaggggaggcttacacagaactggtgccttgaactcagtttcccctcaccacccttatcacactggaggctacccagggtggactcagagtggaaggagaattgttcatgtggaccacaggctctcaccgtggaatgattctggaggacttgatagtgtggctagaggttctattttaagctctgagaaatgtggaaaatctcctggggaggtcaacagttgaccctggccctttcctctctggtgcaacctccaaagggctattctatttctctcactgagctctactttatgtgtaaaggcaggttggatagtttccaaatctttgttgggctgcccctctaaaccttggataaagtctttccctgtggccccattgttagcagttattacatgtccaatgtttgcctgtaatgctgctacaggtcttttttgacacattagttttgaaaattgtttttgacagcaactcttttggacactaaggacctggaaggcagagaccttatcttgtctcatttatatcccccaaatctagtacatggcctgaaactgtgtttattaaatgaagaatgtgttggaaaattagattctggagaaaggcttgcttagaatattttaatcagaaatgaactttgtactttttcgcctatactcctacggagccacattttttctaattatataccaagagggataatggtacagtttgagtgtgagtgtttttattttcttttttatatattgataacaaactttttttataatgggcatatttggggtagaatattttctttttaatatattgataaactttttttataatgggcacatttgggatagaatatacttctatcccaaatgaacatgaaacaagcaaaacatttcttcaataactgaccaaagatgatagggattccacttcaccttagaatatgaatagctaaatagtgtgacttaattgtgtcatatattatgaataacagagttcatgagaaaatgagctatattttcatatatttgacggagcagaatatggcagtgaaagagcaaaatctctttcatctggatattcatcatcccaaaccaaatcttcattaaacttgggtgctagagctactaggaaagctcttgggagtcttctttgagactttgcggtgtggcttctgatgaactgttaatttggagacttgcataaatgtaaataaagtggcattaggacagtcctcaaaagccaaaagatggaagagtgcaaccaaacctggctcatttgcaattgcagtgatgccttgtggaaataaaattaatatctggggtacagtggctttaaagcaagatcctagatcactctaaatagctgtgaatcaggaaaaaaaaaaagtttccggttgctggatattctagatcttcatttctagattccaattatttaagagaccacagagcctttgtcaccaggacagagtcatttgctctgataaaggggaacaagatcttacaaagaacattgttgatgtgaacaactagtttactgaagacaagtccttcaacacaaaaagaaacaagaaaaagagaagggacaagcaaattgttatcgttcagtcactccttttcaatccacttgttactatcctgatccaggttctcattatttctcacctggctaattggaatagcttcttaagtatatcctctaccacttagttcatgcctctccaatctgttaccacctctggagttgtcctgctaaaacacatgtgtaactagattactaacctatttcaggaccttccacagctcttcattacccaaaagtaaaactcaaggtttatttggccatctacaccactactccccgtaactttttatcctcattcctatcattacctccatgatctctgaacttcagcccatcagatgacctcactctaacacctccttcttttatatgttatttcttcataaacttggcaaaactctacgcaatcataaaggcccagtaaacatgatacctttaaaaaaaagatttttccaagaggtgcctctacttcattatatccttcaggccaattcatgactatatttccttttcttatacccagtagttcttacttagaatagaaccccaggaggaagatatgactccagccacactgttctgaattccatcctttttataaggatgaaatccagaacagaaaaattctgtggcagaatttttcttctgactgaaactgcaaggagattcaagcactaaaaaagatcattccatattcccaatcagtataatgacaacgatagttaatcccagtgtcaaggaaattttcttctcatttccatcttgaagctaaatcgttattctacttttcagataaaagcatattatatctaaagggctcgggttatgggattcctcaaagaagcagtcaatagcttgtaatccttgagcagctcttttcttgttcccatgagccccacaggctgaccccctctattttaagcccctcaaggaatctggattcccacatacccacttacaggtaaaatttttaaaaagaaaatgcatatgcattgtattttcccatttaagatattaacaaatagtcatatggccaatctgactatctttactaatgactgtatgcaatggctgaaacaatcctctcggtacacaagattttgtgatatttgaatacatactatactcacaccacaacatctatatccttaaatcactataccaatgcacaaacagtttacatatcaattcatgattatgtgttcacatctttctgtctagtaactgctggggttacaagagtgaaaaaaaaagcacaaccttttccacaaggaacttgtagatgagcccaacaagtgcaattaccagatagtgtgatgagggctttgataagcatgaaccagggatctaataacagagtaatgcagtagaatatcaaaaaagtattctaaattaaataatctacaacagaattgttcatctttaatttagtaaaaataggtttatgacactcatgctctatggccctgtaaatgtagcatcatttcacaccacatatgccccctactacagttacagttactcagatactacatggctcagcacgcttgttgaggatatcagaaatgataagatggtactttcattattttctattattcttttattctggcttttaaatgatcaatgtttaaaaggatatattttccattttttttaataaggtcacaatactctttctgtaaccggaccccagtccagctgctctccacttgaaagccaaacagagagccgagggtagatgggaaaagcaggtttaatatgagagccagcaaactgagaagatggcaaactagcattctaaagtaccattttacatttttaaattcaccatgagattttaaaaatgaaacataggatgggagacatgcaggaattctgcagggtgcagggtttgtgtgtcttgttctcgaggctgtattgggtaattgcgcctctgggggtctggaagttgttatcttgacttcggcctggtggtggtggacaaattgttcacaagtccccctaagcttgatgatgcctcaatggggactgcgtggtttgtttctaggtttgactctgggatttcttaagcaagagaataattagacaagcatgcattactggcaaggagtgtccagaggggaagaaatgaagggatgagaggggagggaagggaaggaagaaaaagaaagtgggtgaggtccccagttacatttctactttaatcttgatatttatgcctaccaaatgcaattgggagaaacagagcattattggaaataaatcacttttctatctctccacaggagggtagtatttcaaaaggcaacatacattttgggttggaggaaggggcgggtggagagtgaatgattccattggctgccacactgaggctcctggctttctatggaactcaaagtgggtggcagcaagcactcttctagcccagagaagtctgttccaggacgggctctttcaggagcagctaaagtcaggggccatgtccaccatgtgatagaaagacaagatggtcctgaaattctccgtgtccattctttggattcagttggcatgtgagttgaaaaggttcccaattaaattaacagaaaatccctgatggcaagttgttttatggcaaagtatgaaaggaggaattataaaagaaggaagaaagggggaaagcaagggagggaggagaaaggagtaaggagggaggaaaaatcatttcaggttgggaaacaatccctaattcccttccctggttccttctgctctgtttctaaacaggggtgagcacccagctgctggagcagagccctcagtttctaagcatccaagagggagaaaatctcactgtgtactgcaactcctcaagtgttttttccagcttacaatggtacagacaggagcctggggaaggtcctgtcctcctggtgacagtagttacgggtggagaagtgaagaagctgaagagactaacctttcagtttggtgatgcaagaaaggacagttctctccacatcactgcagcccagcctggtgatacaggcctctacctctgtgcaggagcacagtgctcttgaggcacctgctgcctgcacccaaaccctgctgccagccccagtcacgaggctgccacatgcctccagctccgcctcgcacagcttatggcatgaatagagagaacaacctcagcccctcatggaaccatttctgctgcctttccagaaaacattttccacacacactggaggacaagacccctctgctataacacaaatatctggaaatgcagcctgctattaggatcattaacgatatgggcctgcaactccccggggtaggcagtagcaaagagagtcgatatagagggacaaatggaagctatcagacagactgtttctgagtgttccacccctgtgtagaaacaaagcagaaggcaccagggaagggagctagggattctttcccaacctgaaatgagtttttctccctccttccacctttctcaccccctcattctctctttcttccttctttcattaattcttcctttcatagttggcatcagggattttccatctctttaggattttctgttaatttaaatgggaacgccttcagctctcatgctaattgaatccaaaggatcaacatggagaatttcagaatacttcatggttcagattggtcattccgttttccagaagaccacacccaggaatgttcagtacaatggggcagaaatggatggtttcccagctttcttgtagtactccagagatgatgaagctgctatctttccagactcttacactgcagtaaaatgcagaagtattgtaaaaattagaagaaagttactacctttttggaagaaagataccgatagtacacctcagtagcatccaactgtggtttcaaagcaacatcctagttggtggttctgaaagtgaccaaacattaactacaatggcctgtatgttcataggactggcttggggaagagtctttgaatggcaaatgtcaataacttcaagttttcaagcctgaagaagaaagaagttggcagtttcctccacatagcaagccctccactggcccattttcatacttgaagcagttgtatttgttctgtaaggcaagatgataagcaaaatgcacatgagtttctgagttttgaaatcaaaataacttaaattaaaatctcgtttttgcaattttctagctctgtgtccctgggcaattatttatcctcacctacatttccttataaattaatgttagtaagaacacctatcttgctgagttgctatgaattaaatgagataaaatacataaaattgtctcaagttccaggcataacatgtatactcaacaaatgtccttaaaataatattgttatttatggccatatgtaaatgtcacccctactgtggaattttcactgactacttaagggggaatgagttattctctgcctaatactctgagtcctcaccagaggagtcaggaaggcagacactgcaagctgccaacctaatcacaattcttttctgcctccttattaacaatgccctcaattttgatttgggcaacaatatgtccagctttaaaaaagctcaacactacattttaccctctcttgcagcaagagattgccatatacatatagaacagttctgaccagtgagataggaccagaagttggatagggccttcccataatgtttttttctctcctgatacaagtacacatctctctatccctccttttctctttttaaaacatggaagagataactttaccgtaaaggaaaacacataactaatcccctttccttatcccatgcctggtagtcttttagatgccaagtcaaatccagcccccagatttaattttgcatgaaaatttttaataaaccattatttggttgagttttctgttgctgcagctaaacatagttctaactatagtaagattgacataaaatggctttatgatttcttgtttccatgtgtaaaggcaggaaaagatatataaacaaattactttgtttatacaaacatggggactccatttatgttgatcatatctgtttcataaagtattaatattcctatatttttttataaaggaaaaaaacttcacctttcatttagagaggactcgttattaaatttccatagcaatttcttatactcatggaagattatggaatccagatttcatcctaaagtcttttaaccacagacaatttccatgcaaataataactatagtcttacatttgtcttaactttatattccaaaggttatttttcttattttcttaaccttactctacccagtaatccattttaaaagcctcctctaaaaactttatcacattaaactccttcattctgaaaattttaaaggcaaatacaaataaaaataagaaaacaattttaattatctctgatgcaaaaagagaaagacactctcccctccctttcgttagagcacctactttagaaaacttgtaattgtgagttttctatccctttgaaatgtaggtaaatctttttaaaagctaaataaatcccttgccagttttacaatccaggactgtctttctcaagaacctgagagcatttttttcaaaatgtaatcacgaagggaggtagtgccctaatctagttttagtggagaataggtgcctaacttcagctggtactttgctcccagttgcaaaccaacctcctgtcgtaaagatatgagaaatgtttcctttgcatgaaggcaattacgaaacaggtggctacctcaattaccaggtaaattgaggatgaactatgtttgaaaaatgatgctgtcaagtcctctttcttgcggactagttattgtttatcttgagaaactgtaaacaatcagttgcatctgctcggctatataaaaggataagatttctttatttccttgtaatatctttagtggattgcctgtgagatgcatcacattctggtttaatgcttattcaataaaactgttttttttttttttttttttgagacagagtctcactctgtcacccagactggaatgcagtggcataatcagggctcattacaacctgtgcctcccaggctcaagcaatcctcctgtttcagcttcccaagtagctgggaccacaggtgcatgccatcatgctcagctaatttttttgtatttttatatagatggggcttcaccatgttgcccaggctggtctctaactcctgagctcaacctatctgtctgccttggccccccaaagtcctgggattacagacgtgagccactacacctggccaaaactgttttctttctcttctacctttgtgggaaggtgttatgggttgataggagattctgttttacttcctcaacaaaatggcccagggtctttccctaatcactgggcttacatgtctcttcctgaaaagcaccatgacactatgaaaagagcaagggtttctaaaggctctgtcccttattggctgtgtaaatttgggaatattatattaacttcatgagcatcaatttcctgataagtactgcaggaagtaagaataaatacttaatttacagtattattgtgaagattagcaatgttttggtaactgcctagcataatggacttacaaattaaaaaattgaaagtgggaaccacggcttccacaaggtacactcaaaacctcatttgtgtcctgatatatgttttgagccaggaatatgtgtaagagttaaagaaagaggaaagaaacacaaaacacagcttggcagttaaagacaggtttactttagataaaacctgagaggggcttctggctgatttatttatttatttatttatttattttatttttatttttattttttggtcaggagcactttctcttgcagactaagagtatatattggttttagggtgagggggtttatcacaatcttggaatgtttatgtgtggaggagaagtttatggcggggtttggaatctctctgggaggaggggaggttatcttgaggctgatgtctttttggcaggagggggattatcttggggctggcaccttcccagtcagagcagggttatctcagagctagcatgcctctggttggggaggagtttggaatgtttctggttggagatgttatttgtggtttatggtcatgctgaccatagccattaggctgatggcctttggacttaggaagtttttgattaaggtgaatgttaaaatgagggcttgtccaagacagcgatgctcctgctttgtcaatatggaaaggacacagtccctgcttccaaggaactcactctcatggtgatagacagtcatagacttgctcccatagccatcattctccaggggctataagttgaagaatcctctgacctacaacctccattcagagcagtaatttctgagagaaattgcacactctccacactcctgaatcactgtatgccttcctaaaaacacactgctgatgtttaagaccagactcaggcaccacccctgggtggggcatctgcattgctgcagaggaagtggtgttagctctagggggtactctaacctgagaaaagtctccttaggctgtcaggaggattgatggatgaatggagaataaaaatctctgaaacaggaagaaggctaataatttaggctgagggtgggggatcagtagcaaaagagtatatggaccataaaattcttaataacatacataatcctgctttcttatcaccaattctcctttatctccaagagccaagatgaagcttaagatttaaagaagacaatttgtttaacatttatttatagttcatgaattaatattttttagtatcaggggccaatatgagactagatctgtttgtccagaaattatttctaatctctgatcactgttcttatctaaaccatgcctatggacatagagggtagaaggatgattaccataaactgggaagggtagtgggaggctggggaacaggtgggactgtttaacaggtacaaaaaataggacgaataagacctactatttgatagcacaacagggtgactatagtcaataataatcgtacattttaaaataaagaatataagtggattgtttgtaactcaaaggataaatgcttgaggggatgaacaccccattctccatatgtgcttatttcacatagctttcctgtaacaaaacatctcatgtactccataaatatatgcacatacttaagtactcacaaaaattaaaaattgaagaaactcaaagccaagaaaaatttttaaaaagaagcaaattgagaaaatgtaaggtgtagctgggaagaaaaggatagagaaaggttaagaagaaaattatggaggactgtctgaattgaaaagcattgtctctgtgagtttgtcaacagcaacattactagcattttgggcagggtaattcttttgggggaaggggcttttctgggcactgtagggtgtttaacagcatccctcatctctgcctactagatgccagtaagattctcacctgtggcaaacacaaatgtctccagacactgtcaaatgtccctggaggcaaatagcccctggttgaaaaccaatggtctatatgtctacatattgaatgttgaattgatagagcaggaaaaacttttagaaggtatatatatgtgtatatatatatttagtatatatatgtatatatatttattatatatgtatatatttattatatatgtgtatatatatttattatatatgtgtatatatatttattatatatgtgtatatatatttttattacttatatattcatatacacaaaatgaggatgttaacatttttctactattataacacatttttattcctatggtggtcatacgtcctaagttgctattatttcatttggctttaataaattaaataagataatttcaatgtaaaaacgggaattgtaatatatatatataaacatatgtattttatatataaatatatataactttttatacaattcattcacaatgcaaaaaatttttcagtctgatcacgttccagatttcaccttggtcaatatcttttatctctgactcctcaaagacatatagactgtttctctattctttctctaagctactgtgttcctgttcttccccaaaatgattcttaaaccctaaaaagatgacccctccattaccccccacccacacacatacacacacaaggactcacgcatacgcaccacagtgtgcagaaggtgaactaaaccacaggtaggtggagttttccactaggaagctgaggggcaactcccgggagctgctgccgctgaatctgtctcatgaaatttctcagccatgggaacaaaattagttccaaattcaagatatgatacttaccaatatttaaagagaatagatatcaaggtgtgcccctgtagcaaaaaaagtaaagaatcatgaaggcattaataggaatcttgctgggcttcctgtggatacagatttgctgtgagttaaggacagcccagaggaaacctggaggagtatcacaactgaatttggaaaggagcaatggaggaacgggagagatggagaaagagaaagaacgcaactctcaattaagctgtgtcctctatcataaggaagaaaactacagagaaattttctacacttggaaacagctacagtgattttgtgatgactctcatctgcatctacttttctctttctgaacgggggtaaaagcgcaaatgaaagtggagcagagtcctcaggtcctgatcctccaagagggaagaaattcattcctggtgtgcagttgttctatttacatgatccgtgtgcagtggtttcatcaaaagcctggaggacccctcatgtccttatttaacattaattcaggaatacagcaaaaaagaagactaaaatccgcagtcaaagctgaggaactttatggccacctatacatcagattcccagcctgaggactcagctatttacttctgtgctgtggggacactgtgctcttcagacacctgcagcctatacatgaaaccatagctgaaggcctaacccatccccgagagtggcagtaggtcccgatgtgattagcattgcattcccactgcctacatctccttgcatgtcctgattcatgtggaaagtatttctaaatgagttgtaacttgacactatggtgcaggtgcataaatggttcccctgcagatatctgtgggaatggtattactaggcaaaatctattgattgatcaactctttcatatattatcatatctctctggataagaatgagcagagtcctcaatcctccatatccaagagcaagaaagcaccagtctcacctgtacttccttttccacatcttttttatggcttactttagtacagacagaatcctaggaaaatttccatgatattttttctaacagacttaagtgaagatgaaaaggaagagggaaaatagatggcctctactaccatgaaggatggtcagagctttctgcatacttgaccagagactcagccacttacctctatgctgtggagacacagtgcttcccaggcacctgaagcctgaaatcagacaagtacctgcaattctaagactcaacaataagttagagatgtccatgtgttttgctgtaacatggttttgagaagcatacacttgataaatcaaagtgatttcatttccaaaaaagattctgatgaatacttactctagtaactatctctgtgctaaacagaacaattcctaacatcctaatccctaaatcagggaatcaatgagtcagaaattctagataaaggatccctcaaactcaatgataaggctttctgtcaaaaagggtatttgcaccccgaatgctacttattcttatcttacattatctatgtataaaggaaaatcttgagaaagtcaaaccaaaatgtgtcaaaaaagacatgctaagctctctaatccttcattatttttttttccaacttcttttttttttttgaatcggagtttcactcttgtcacccaggctggagtgcaatggctcaatctcggctcaccacaacctccacctcccaggttcaagcgattgtcctgcctcagtctcccgagtagctgagattacaggtatgcgccatcatgcccagctaatttcttgtatttttagtagagacagggtttctccatgttggtcaggcttgtctcgaactcccaacctcaggtgatctgcccacctcggcctcccaaagtgctggcattacaggcgtgagccaccacacccggtctccaacttcttaaagtatttttaattgttcattttgctcatattcaatagtatctatatcattttcctctttgttatgttttgtgaaggttattagaaaaaagcttatttccagtcatgagtatgctatgtcatcttcagcaagtgagtcattttatttgtccctcatctcagaatcctcatttataatgtgaagatgatatttcccacccaccactactcacaagtttgatacattaattattcaacaaataattatcaaatacctattaggttctgtagggaactttgaataaataaagagttctttccttgttgaatatatttctagtggggaacacatttttattatcagttcctataaaatagagaaggacttaactgggacagtaaagggtattataaaaacaaacagatgtctgttaaaggaagctttctggagtatgtggtgcctcagttcaaaatctggcaatttaataggagttaatcagactgaagaacaaaagcaagtgggggaaggttctccaatttgaggaacagcatacatatataggcaggaagcaaggcagattatagcaattttaagacataatgtataatttgcaagttattaaataatgtgcataagtaactcttattttatgggagactaaataagaaccttgaaatgaatcgtctgtaaatcataatatggtaaggtgaaggatatggggaacaaaattactaagcatagctacatcctaacagagcagataaggataactgcactaagaacaaataaaaataatcatgcaactgattgatgataagaaaatgttagttcttcagagaccctaatcccttttaagtgtggaaagtatttctaaataagttgtataagatatgataaatatgatacataaatgtgatccattttgactattaaataaagctgaaatttccaatttgataaaagtctccactgattcaaggtactcagcaaactctaaacagggtaaatgtaaagcacatgcacacacacacacataaacacacacagaacaagagaaatgcatacttctacacatcagagtaaaactgctgaaaatcaaggaaaaagagaaaaatccttaaaatcagctttgcttttgtttttcaaagggtcaatttcatttccctcaagtttttctgaaatcatggatgagtgagtctagcaaatgcccagccctcttcaggagccgggaaacatatgtggcccagttgcaaatttggggacagcttatggaggcctgaagatcactgcatttgatccacataggtagacacctgagcagctgggctggccaaaactaatttgacattatagtataggcaagagaatggcatggactcctcattccagtcaaccaaaagcaaagaagaggtgttattctactggctgagatgattgatgctgcctttcatggagaaatggtttgctacaatacagtgggggtaaagaagagtatgtctgtggaaactcttaatcccaccatgaatgatgataaaatttaatggaaaactacagcaactcaatataggcaggactgctaagacatagatcttgaggttatcatcccaccagacaaagaaatatgattgctgagggcaaaaaacaataatgaatgatggcagaagaatgaaattgtgcatactagctacaacctcttgaccagtgacagaaacaagatctgaagtagttatgggtacatcttccttactttgatgtgtgtgtgtggggcggggagggttaacaacccattctttttatttcttttattcttctactgtctgcaatagtatgtgtttttatttgttagctttatggctcactataaaattcacaggttatcaaaggagaagtatgactcaactagaaaaagaataaacttcatttaaagatgtataaagtgacacaagggaccttgcattttcttttggggaaaaggttagcatccttacaattttatggaagaaattgcatcctattaggtagaataattattttactattgtcttatatggaaattaaataccatcaaatgaggtatgacctaacgcaaagtttataaggaggtacaaaatggtggtttgtactggattaagcagggaaccaagtttcccagagtttccttttttgtatagtagcaggataaaattggccaaagagtaatgtgtgtgagctatggaaggcaaaagtgaaacagtagccactgctctctgaagcagtcatttgtcatatctgacaaatagacacggatatgcccagcaggtgccagcgtgttctaactctgttccactccatgcctagcatgccttcctgctgaccagtcaccttcagatgcctggcgatagatgaatggagatggtaaccacacaaaggcaagagcttccttagacttctccttgaacttccccttcaaatcacacttcagcagctgcaaatgcttggtttctcagattaactggttagagtttccttctctggccctcccacagcccttagaccttcactttcctgtctcctttcacaatcacgtaaagccaaattcccataattaagcccctatcccatacaactcatggtgactttcctgcacttgacgataccctgattgatgcactagacaaatataaattagttcaatggaaagttgtccgtcttttaaaaatgtgtatccagatacctattgggagaaagaacaatcagaaatctagtcttaccagaaaaagagtagaccttaaaagaacacatgtagcaaggtgagttgcaagggaaagaagagagggaagaaagggatacagcctgtgggctcctgcatttccatgaaacactgggtgtaaagaatcaaatttactgaacttaaagtataataataaaaaaaaatctatctatatatatatacaaagaatcagatttatcactatgtgaagatgtaggaattatttttaattaaaaaattctcatcaggaagaaattacttataactttatgaataatttaacatatatcaatctaattctgtgttgttaaagtaaagatatcaaaggaatagctctactcccatgtttcagaaattcctggtagtataactgagtagtctttattagggaagacagacttctctaaacatatctggtgactcagtttggtgtatgcaaatatgaatatggatatgctatgacaagtgtccccaccccctcccccaactaatttcctgtgcagagacagctgtgtcacccatctccactgattctgcaagggacttgtcataaatactgaataaggccaaggttcaggctctttagagtggttacttccctaggaatagaagtgtcaacgtgacttttataacatgctttgagcacgttataaaatttgtaaattgataggctcatcttctgctctcccacaagctcaaaacactgtgaattttttacatctccagaatagaacctcttgctcttgtgtggcggagccatcatcagttcttttaatgttcaccactctcggtagataaaagttctatttcattctaattgttctatgatatgatttagaatcactttaatgacacagtcttcagtgtgagaacttctcttggttccagcatgcataccccaggaggagcagaatctcctcaggtctaggggacctagtgggctgtaatactctctctttctctctctttctctctctctcactctctctctctctctctctctctcacacacacacacacacacacacaagcaacaaggtgaattcaccacaaatataaaattgtgagccaccaataacccacaatcagcctcaaagcttgctgaaaaatctcgcactaacacccctcccaaataaaacagttttctgtagcaaggcatagagtcactcatatccaatgattcaacatggggcttgtgatgcatctgtgcattgtgtattttgtacttttgttgtctaaatggtgagtctgtgtgcatgtgtatgagagcacgagcgagagagagactattacagaccactaggccccatggacttgcaaaatcagccttcttatacatgattcatgcatggatcctcatgttttgcgtgtgaccacccttcctaacatcaagtcataaatttcctacagacagatactgaaattcaactataatgaacggagttcatttgctgagcactcttggctataatttgtctgtgtacttttaaaattgcagatacctttgtccggaatgcccttttcctacaaagccaacttgttaatcttcctttatctcttaaggccccagctgaagggctctacctttgtagggtcttccctgactccacactgctaacctcctcagcagaactaatggatcaccgttatgctttcctcataaaaacactcatgtctcgtgctatgttgtaagtatatagttacacatttttctttctcttcaaattaccaggtatttatgaatgaagattgtcccataaccatatttgagactctaagccaggcacattgctaaatattgcataaaaactaaattaatattgattgatatataaatacacaaatcaatgaaaatttcttcactagaaagtctgaattatataggtttaaagtatataatatgcaacacagacaatttatcagtttctcctgaatcaattatttttaatagactatatatatacatacatatgtatatatatactatatgtgtatagtacatatatacatatgtatatatatactatatgtatatactatatattatatatgctatatgtatatactatatatattatatatactatatgtatatactatatatattatatatatactatatgtatatactatatatattatatatatactatatgtatatactatatatattatatatatatatactatatgtatatatattacatagacatatatattttttttgagatggagttttgctcttgttgcccaggctggagtccaatggcgtgatctcggcttactgcaacctccatctcctgggttcaagcgattctcctgcctcagcttcccaagcagctgggattacaggcaggtgccatcacgcccggctaatttcatatttttagtagagacagcgtttcgccacgttggccaggctggtctcaaactcctgacctcaggtgatccagccgccttggcctcccaaactgctgggattacaggtgtgagccatgatgcccagccagacttaatgtattaatggacttaaaacacttttaatagaggcattttaacttttctgagtatttgtttcattattcttcaagtgaaaattcaaaatgtttattaccataataaaatatgcatcaaatattattttattatgtgttatcagtccttgctaaaaataatttcaaaaaacattttggaatttaatctcagctgaaatcactagttgccctactaattcagcattaaaagtacaattgattcttcttccttcctccatcatagtaaaccatggggaaatacattacctgtggaccaagagtgaagataagcagctatgttgcctttttggcatcttctggtaaatttcatgaatatattgtctatagactttacaggattatgtcaccgtttttctcttttgaaaatacagaacacactaaatgatctcattcaagttccaatagagataatttcagttcagaaggtgatctaatacagaagataaattttgttgtgctgatttgtgtttttgagagaggtacccagaatttaaatttaatttaattatgttgtgctatttatcatatagaaaatatgggcatatttgaagaccatattagaattcaattgcactaaagagtaagctacgaaacttctttgtgttctaaattcatatcattgtattaaataaaacatcatacccatatgcgtccccaataagtatcaatccttattaatgtttttaaacaagatgtctgccttagtatgccagttgacaaggtgtcagtcatttgaccttatgtaattctctaattttcagctatcattttctactattgctgtgtgtgtgtgtgttctctaaaaacttttccttctctttcaatctcttgttttttaactttttatggagaaggcattataaaatcatctttaggaaatacagaaacacatttacagaaactttctacatttgaactaaagggggcagtgcttcctttcataaagataaataagcttagagctccacacaggttgttcatatgtaaaatgaagggtctgtggaaggacatgaataaagcacaggaggttgaagtcagatttgcagctttctaggcaggagacaagacaatctgcatcttcacaggagggatggccatgctcctgggggcatcagtgctgattctgtggcttcagccagactgtgagttgtgcatgggaggtttgaatatagtaagaaaagctacaaggaacactacaaggctgggagataattggagaagttttgttttgttttccggatcttgatggtttcctgtggggacattaaaaataaaactgaaaatctgttattctctttccaaacaggggtaaacagtcaacagaagaatgatgaccagcaagttaagcaaaattcaccatccctgagcgtccaggaaggaagaatttctattctgaactgtgactatactaacagcatgtttgattatttcctatggtacaaaaaataccctgctgaaggtcctacattcctgatatctataagttccattaaggataaaaatgaagatggaagattcactgtcttcttaaacaaaagtgccaagcacctctctctgcacattgtgccctcccagcctggagactctgcagtgtacttctgtgcagcaagcgcacagtgctctccaggcacctgcagcccgtactcaaacctgctttggggactcagactgggagacacatagactcgcttccatttacacatgccaatatgagagattatgctttgaagtaggtgaggcaagttgagcctaaagaaagactgatacatgacaaaaccttacaaataagttaagaaagttccctgagttttagagtgtttaagagtctaaccactctccttttctactttcagaaagaggttgctgatttagctaaagcataaatctctagtgatgctttgtttctgctagcttctggaatgcgggtgccctgtctcccttgtatactagggggcaaggatgtgtgtttggaatgggaaaaccaaggtcctactgcaggttcttccagtgatgaacatttcctgagatgtcttttcttttagtttttctcagtgtacaggcatttctgagcaaagaattgcatgtgtgaatactaacttatgtatatctgcatatctataaatatttctatatgtagcataaccatctgtatctatattaagttaaacattcgttcttagcaatgtctccaatgctaaatcattaccacgtggatcacactagcctcctccccttacttatccataaattcccactacaggggtgcacagcctggctctcactgttaacaaaaagttattcagtaatacttgttaaaacacggtgaggcagaatttatttaggaccatcatgataggtacagagaccactgcaacaggattttgcagtgagggagaagaattggattcaactccgaatacagcatagacaagtggagatttctagccaaggggcagattaggggtcagtggataggaaattactaagaggaaacattagaaccaagggatagtctggctagaccagccaaacaggatccttgcagaagacaggtcagggtgatcagacatcaatcccctgggggatgatagaggatgaggagcccagttggatatggagtgtaatcagatatcaagcggaggatgacgagggcagcaggggagggtgtggttcttgctaaactgacttagaaggattcttgttaaaactacattttacaagaaaatgtacagatgagcttaggagaaacttcaaaagcctgactaaagtttggtcaagcaaagaatttttgtcattaccacccactattcatttacatcatagtccaattccattaaacatgtatagtggtatcagaattgttacttgtagctccatgagaaagaattttatcacttagagcacactgttgtgtaatggtaataatgtctagattatgttgaacttctattattccacctgttttgcatgtattacattaattcttctaataattatttaagacaactattagaataatccatattttagtagagaaaacaggctgtgggagttcagggatttgttcagtatcactaactttgtgagaaaagagagttcatggtcactcatgccccaaaccaccaagtatgggcccttcctacagaagctattaacaagtcatgcttttgaacagctagcaatctttaaaattcttatcatacatgtcttcatcattgacctatagaagagtgagattatcactcatagagaattaaaagctgaaattatggttttatatgtatattgtatttgtagataaatgattagagcttgttcctcacaggctgattttctgaagctgaagatctttacagagagaagatacagaaattcaggatacttcccaagaagcatgcggaagcctctgtaaatcccattacttatggcataatctgaacagtgacttcaggaacagtgatttcaggaatgctgaagacatttttgatcagaataggggtgatatataggttggcttagctttgttcatctagggatccttgtggggttggtttaactataaggtaaaatctgtaggttgatcaattctctcatatttaattctatattcctgaacatggatgtaaagctaactcagtgtgaattagatttattatccctccatatccaggagcaccaatatcacatgcagtattttttctgttctttttatggcttacattggtataggcaggaaaaattccaagatccttttcgtaatgcacgtaaatgagaatgaaaagcaggaaggaatattaagcatcactcttcatacttagggtattccatgcacatctcgggctcctactctagagcctcagctactctgagcggagagtctgctgtgcatactctttgctcacaggcatccagagcctgttcccaaattcaaagctgtagccacagatcccagcaaaagggcagacacgcgagagttgttgctgtcttctagcagggtgtagagaaatgtagctatgatgaatcatttcatttcagtttcaaaaaatatggaaattcagctgaataatcagtccagttactatatatccctgctcttaacaaaactatttcaaataccttaagacaataaatcagcttttcttcttttcagatatatttaacatgatttataaattactgaaacccattataaagttctgttacaatggacatttttcactctaactgctgttacatttaccccatttcatgtcttgcataatggggagggaatatattaatgctgtctttatccttctaaagcaacgtagaatcataccagaaaaaggaatactacatccaatctcatccctgtctttttgttcaagctcttcagactgcttcaactttcacatttcattcattcccacagttatctatttacgttcttttcttatctaatatatttgggaaacagcattgggaaaacatactttctagcattgttctagccataagtgtgttgtatcttcttgagcaagtgaatcaacttcttaacattgtatatcaggaccttcatctgtaatgcaagggcaatgatttccagctaacatcggtctcaagttttattcattttatcaattagcaattgttaactggttgcctgctgagttccgcataaatgttacatgctgggaaaaaaagagctatggaaaaatacatatcttctttgactaaattgtagtctagttagttatgtaggcagctaatcagacagagtaaagtgaaatgaggccaaccttgggaaagcaaacggaggtatgaaggcatatggaaagtcccacccccatcttagccttagaggtgagtcaggggcagcctgtagtatgtcttgcctatgctgagacctaaagatttagtaggagtcaatcaagttgaaagacagagaaggtagtaaaagtgatcttaaagatagaaacagcatgtacaaggtgacacagaacacaatgaacctgaggactaaaagccagaattatgctataattaaaattatgtatgttataaaatgttcaaaccaccactgcaaagcagttgtaccttaattctcagttttataaatgagtaaccataatatttgtgaggttaccaaatatgttttctatttacttgagatttcacttaataaggttattcatttgatacctaatatgtgtcttagactcgaaaacaatagatgcaaatgagaagaataaggcattgtttctgccttcagggagcatgtaatattgcagagtgtattacaatatagtataataaaagctatcataggagaagcgtagaatataaccacctaacagtggcatttaatttggaaacttaaatgtaagggaaagctgcctacgggaagtagtatctaggttaagatctgtaaaacagttagccaaaaatggagtcagagacagggtattacagaaaaagataaatagaatgtacaaagacatgaagtcaatatttagtttaagagaatgacattaaactaattcaggatggccagagcatacaactcaaaatgtatgtcagtaaatataaaactaaagcaataagcagaaaccactttgtgaaaataattaaaagccattataagatgtttgtacattacattatcttgaagacaatgatgagcagtgaaagaaatctgcacaagtaaataatataatgaaatgtcactgtttgaaagattactatgagttcacatacttatatattatatccatgtgtgggcatgtatataaaatatatatatgtagtaaaatacatataatacattttcccttgatacttcttttttctcttaattctggagtaattctttctgtaacacagtatattgataggaccttcttatagcaagaaaaaaacctatcctgtatgaaaacttactcaagaaaagccaaaatccacagtttaatcaacattcctcagtctggccacaggggagagctgtttaaaaagtattctaggtagatgcatttagttctctgcagttaaactgttgtgatgtgtctctgattggttgcccccaaagttgcaatatcctggaagcaattgcaacaggcctcattctgagttcaaagcaactcctgttaaggaagcccattcagaagctgactggatattctggcaggccaaggatggagactctcctgaaagtgctttcaggcaccttgttgtggcagttgacctgtgagtacacgattcagtctgggagaggttgtgatatgacagcatcttaatgacaatagctttctgtcttgggaagggcccttttaagaaccagacctaagaagtgaggaaaatgtaccgtaattatgtggtgatgcttaatgttttaaataaggaaggaagagagaaaatcacccttcccttcacgagattgagcatctcattcgattgtctttctgatcaggggtgagaagccaacaaccagtgcagagtcctcaagccgtgatcctccgagaaggggaagatgctgtcatcaactgcagttcctccaaggctttatattctgtacactggtacaggcagaagcatggtgaagcacccgtcttcctgatgatattactgaagggtggagaacagaagggtcatgaaaaaatatctgcttcatttaatgaaaaaaagcagcaaagctccctgtaccttacggcctcccagctcagttactcaggaacctacttctgcggcacagagacacagtgatacccaggcctccaagacctgtactcaaacctaaagctgagccgcagatgctcccctagcacagatgcccaccacaggagtatggggaacttaccagaaggttcatccatgataaaagagaaacctgaaggaaattcatttgcttcaacacataacacaaaaagcaagccatggccttaagaccatatctaatttggcattgttttcttgataattatttaattgctttgttggtattatatgatagataacttagattcagagaaaattacatagatttcagtttcaaaaactggagtgaattcctatttgactgaagctatacatataaactccttttggatctctgcattcctatctgaaagtgaaaagtaacctctctttcttctcctaggtacccacagcttgacaataggacagcaaaaaaaaaaaaaaaaaaaaattgtctggttctttcttggacgtgaggattgtacacggtaggtatttagattgttaatcttgttacctatctggaaaggtcactagcattattttttccaaggttttaaatatctgttttggggaaatggcatttagaagtacttcaattttatatttgccttgccttctcttctcattgaggtttattctgattgatttccagctttgcccaagggaccctgagttatcttaccagtttgcccaatggtcaagatccttcctcaattgttcctttcatatcaacccagcacaacactgcatgtaggaaacactcaacaagttttaattgagtcatatgttgataagaattgagaatggccaggtgtggtggctcacgtctataatcccagcactttggaaggctgaggcgggtggatcacttgaggccaggagttcaagaccagcttggccaacatggcgaaagcctaactctactaaaaatataaaaattagccaggtgtggtgacacacacctgtaatcccagctacttgagagattgaggcatgagactcacttgaacctgggtggtggagtttgcagtgagccgagatcacgccactgcactccagcctgggtgacagagtgagaccctgtcccaaaaaaaaaaaaaaaagaaaaaaagaaaaagaaaaagaaagaaaaaacaaacaaaataatcacacacagaattccttccacaagatcagtcttccacaaacattctacaacttgcttaaatctttagtcttgtcctatcagtctaccctagaacaaaaatttaatttttcaactttctatattcattgagttttatccatcattttttttactcagaaaactttaaaattaactttttaaaaacttaattttaaaaaattaatttaaaaagatctccatgctgggaaaaattactttctctttaacagaaaccagattcccatgccttcttagaagctttttatcaaaaacacaaaacaactttatacactttgcatatataactgtttctcttatagctagtagtttgttgttttgttttgtcttgttttgtttttgagatggagtttcgttcttgtcgcccaggctggaatgcagtgatgcaatctcagctcactgcaacccccgcctcctgggttcaagcaattctcgtgcctcagcctcccaagcagctgggattacaggcacacactaccaaacttggctaattttttgtatttttagtagagatggggtttcaccatgttggccaggctggtcttgaactcctgacctaaggtgatccggccgcctcagcctcccaaagtaatgggattacaggtgtgagccactgtgcccggccatagctagtataattatatacataaactgtaatgttacttcttagtaactcttattcttagtgaaaaactgaggaagtaagtaattctaattaagcaccagatacagagtccaagacaaaggacaatccctggagctaggcttcacaatctcctaaaggcccaaatccaaaaacatagtttatagacaagttaagtgtcaaaaattgtcataaaaacacattttatgatcttaaaacatctagcagagataatatctgaacaataggccaatagacagacaaagtgtctaaattaaatttggaagaggtttctattttattttatttcaccaataatttttaaattgtctttatttgttaaagattactaaagtcacatgaacttaaaggtgtttgagttaaggtttctatttttctcataaaatatttaagtgtttactttttaagccaattaattagaactctttcacatattttggttgtgaaacatcacatacacataacacatataaatatatagacactagacacacagacacacagacagaagcagatcttgtagaactatatgattttttatttaccaaatttaagtagttgtttttattcacagtttcaattacctattttattgctctaggcaactgttaggcgaccctaaatttgcatttctgaagtgataactctcaggtgaaacaagataaaggatttgcatctcaaaatacagacagagacagggaatttaagctctttaaatttggttgtgttagaggaagattgaaaacatggatgccaagtaacacaaaattatataaatttatcacgggcttttataaggtgaccaatttcatttagataggtgcttttaatttagtctcttttttatctggaccattgaattcaaagcataactcacactaaatcttgggtcccccaaaagaggtaaacaccatggggattaggacacgccatgttttcactgtacatttcactgcaaatacatttcccctgaggctggtgggcaacccattgccaatcagcccactctgcgatcagcccattccttagccattatacacaccaaaggcaagcttttcacaataaaaagaaatttctagtaactccagaagcaaaaatttctggtagtgcaatgcaaaggagagaagagttttagatctgagaagacactgtccattttcaactcttgggattccctgaggaaaaaaatagcagtttctcccataaatgggtctgtggcacattttctgttttttcttaaggaatcccaggctgttagaattttttgttgttgttgtttgtttgtttgtttttgtcttcttatgtggtactgagggtggcaagaggaaggaaagggcgatagaaagagagagacagagggagtgcacattcctagcagcggtttaagaagaaattcagttgcctgagaaatgtttacagagagagagagaacagaggccttaaagcagtaagtaaatacatacatagcctaaatatcagttttaattaagtcaacttttgactatggagccctttaaataaatcctgtcaaatctcttattatcagattttagctgagacaaacagttgatatttctgacttttgaacttctttaccaaaagatatacccccaggtgccttaatcaaggttattatataaccgtgggtacacaagctgtctccaaagagttggcaagcattttttaacaagatccagaatcaccccaaagatcgctcagcgaaggaaagtttcattaccaataaatggggtataacccatatttctgtcaggccatgtgtttagagtcttaccttctcagctgaccatatgcacacaaaggccccaaagcctcatgtgcccccaacagatgaaaaaagacaggaaacaaaaagctatggaagtgggaaagatcaatcataaagatcaataataaattgatacccaacaaaaaagtcacacaaatattaaaccgagaggggctggatccctgaccagtaatcagactcaccctgtggatgtgaaagtgcagaattttaactattaggccacaggtggagtggcctttgtttttccttgaccagaaagcaaacccaagcctctgcaggaattttacctaccagaactggtttaggtcagatttttcactcttaatttagtcaagagaatttttaaggctggccatgacactattatatgtcctttttaaatgtgatctctttgttaatagtttagaataagagatccctaaaatctttaaattaattgcaccgaaagaaaggatgggaaaagggtctcgttgtgtaaatgaaacttctcaggtagtcaaattgttgacctttcttacccagccagggtttttagaagtgaaaattgactttctccagctgcagagtttcattcaacattagagggggccaggagttggtaaagtctaacagaaggtggaccaaaactgaaaagaaaaaccagaaaaagtgatcacagaattcacatataattgcgatctctcagcataagggtaagttatagccaactgacaataaaccttgcccttcagctaccaaatcccaatatgaaaccagctccttacctggagatggacccaagctgaagactgctgtctgccatcatggaagcagaaactaccagaaaaggagttttacagcagaataaacctcagatcccaattgaaaatttgggggagatcagggatctctggagggagaagttcccagaacttacatagcaaatcatccaatctgtaagagtaataaagagctccagccggtaccagggccccaataggagacctgctggaggccaagagccagactccactcagagtcccttcgtggtcaccaacatgtaaaccaaaaagtgactgaggcagatctctattgattagaggtttattttgccagtcgaggatatgcctgggaaatagaaacataagtcacagtaggatccttgacctgtgtttttccaaagagggttttggaaacttaactatttaaggtgtaagagcaagcaggagggaaaggggaaaaaaggagggacagtaggcaatgagacaagtggttacattcttataaggctttgattaacactcaatgaatccacattttgtgtgtgaaaaaaagagagtagaggaaaaaatcaattaagcattcatctcatcctcagtaaatctacattttacatacgatagagtaagcatgtgaaattagagttacctgtttgggaacagaaggaaggcagtgttttgtgtgactccgtttccaaccttaattttccccttggcataataactttgtggttttcagattttatttttctttccagattgagattcccatgaccccccatttgagttcaattaataattaatttgctagaacatctcatagaactcagagaaacacttacttacatttactagtttattataaaggcatacatatattacaaagcataaggatgaagagatgcaaagggcaaggtatgggggaaaggggtgcagagcgtcctcactgtcttggggcacaccgctctcaaggaacctccatgtgttcagctatctggaagctctctgaacctagtccttttaggtttttatggaagattcattaaacaggcataattgattaaatcattggccattggtagtcaaccttcagactctctccccttcccagatattggggatggagctgaaagtcccaactctctaatcatgcctttgtctctcccatcccccatcctgaagttacccaggggctgccagccatccgttcagtcaatcattaacaaagataagacatcgcttcagagtttctaagtattttaggagtcgtatgtcaggaaaaggggtcaaagattgaatatatacttcataatatcacaagtcataaaactgaatagtacttagcaaccaaaagaaataaagtactgattctttcaccaatatggataaattttaaagcattattctgaaagaaataagctagacacaaaagaatacctaccatataattgtatacatacgaaattttagaaaaaagcaaatctgatcgatggtgacaaaaatcagatcagtagtttccaggtattgggaatggaagaaggacattgacaacagtaagtcacataggaacttaaaaggtgataaaatattctatatgttgattaggatagtggttacacagatgtaaatgagggaagagagagaccctctcgtactgttttatattgttttatactcagtacctgttttaagaaaaaacaacaaggaagtaaaaccaaagacaggcagcctgacgccaggcccgaaaccaggtctgggcctgcctggcctaaacccagtagttaaaaatcaactcataacttagaaactgatgttattcatagattccagacattgtatagaagaacactgtgaaactccctgccctgttctgtttctctctgaccactggtgcatgcagcccctgtcacatacctcctgcttgctcaaatcaatcacaaccctttcatgtgaaatctttagtgttgtgagcccttaaaagggacagaaattgtgcacttggggagcttggattttaaggcagtagtgtgccgatgctcccagctgaataaagcccttccttctacaacttggtgtctgagaggttttgtctgtggctcatcctgctacatatacatttttcaaaaacagcttgactgttatgcttaaaatgtgatatattatttcatgtaatttatattcaataaaattaatctaaaaaagattaataaaaggatttagattctagatctcatgataatctgtaacacttcttttaactcaatagaagtaattcctctgttttaattttgggcaaaaaataaaagaaagagataagataacaagaagtaggaaaaggaaggtaacaagaggtagtatgcaggaattaaaattcattctcttaaattagaggacgattacatcccaggttcttcatttactgtatacgtgatcttgagcatgtgtctgagcctctgtctcctctctgtaataatttctcacaagattcaactgtctcacaaggggaggattaagtaataatatgtacataatgttcctagagcatgataaatgttcagtgaattttatctagtatttttattattaaccaaaggtggtcattttaagtgagcctaggttctctaaatcaaattatgggtggtaatcaacatggtatggcagctccagaatatttttttaatctgggcaacttgaggggctaggggtaaaagtagagaaaaaagataattgtattattatctcagaaactgtccagtagcctggaatcccaagtgctatagtttgaatgtttgtccccttcaaatctcatgttgaaatgtgatccccagtgtcagaattagggttgaatgggaggtgcttgggtcatggaggcagatccctctgaatagattaatgctctggagtggagagaatgaataagttctcactctgttagttcccaagagaactggttgttgaaaagagcctcgtatgtccccctctctattgcttcctctctcactttgtgatctctgcaaacaacagctcccctttgccttccaccatgagtggaaggagccggaggccctcaccagaagcagatgctggtgccattcttcttgtatactctacaaaatcatgagccaaataaatttattttctttataaattacccagtctcagtattcctttatagtaacataaaatggactacgatgatgggaaataatattttatcaatggaagtgatcttctattataactgagccaagagaaataaaattgaatagaatggaagttttcttttgtcttaacaaagttaccaaaatcacacattgggaggataagcagaagtctaagataatcagaaaacagagtagactgcaaaagaattgtttgaaatcatcaattaagatggaaaggaggcagggaaaacatcatagtttctagtatcaccctgaaattttgtgtgtaacaatatatgtatgtctatctacatccaaggatacaaaaccacatctgtattttaaagtaaaatatattttcttcactcaaaaaaatatataggtatctttttaatctcagtctaaatctgggaataaaattttgtggccccaaaatgtctggagaataactaagcaaactttgctagggaaagagctgtcttaaacacatctagtggctcaatttagtctgtgcaagtatgagcaggatatgatttaacaacttgtccctgcccctgccttccccactgtaccactttctttcctattctgagacagatgcattgctcacctccaataattctaggtggagctttatacaaaactgaataaagtaggtctcaggctctgagcaggcagttttttttcctagaaatagaggtgccaacatgactgttggcagcatattacgggcactcatggcctctgccttccttggtaaggacagtagctgataggctgaggacagtctaggactgggagaagacagtggggagggaagaggggatgaacaactggtcatatgtgacaaacactcaggtgtaataagaaggaagaggaaaggaaccagattctgactcctgcctttactgaagatttaacccctgccccaaaagttcttggaagctctcttacaggtcagctcaggggaccaatcttgttatttcttctcatttacgggatccagcatgtcacagagggtcattcaatcccaaccagcaatatctacgcaggagggtgagaccgtgaaactggactgtgcatacaaaactaatattgtatattacatattgtattggtacaaaaggtctcccaatgggaagattattttcctcatttatcagcaaacagatgcagaaaccaatgcgacacagggtcaatattctgtgagcttccagaaaacaactaaaactattcagcttatcatatcatcatcacagccagaagacctgcaacatatttctgttgtctcaaagagcccactgtgaagaacatgttagaagagccttacaaaaagatcggaactcaacctgaggcaattgcctattcccacattctcaggaaaaactcacaaaccttacccaggcatttgttagcagctggtggttagggtgcataagataagacccagaaaggaagtcattgagttcattccaggaagcacaccctcacaactgccttagaaaccacacaggaccacatgtaaaagccatactgctcggatgacatcacatctctatttcttcccatggagtatgccgtttaaaaaagcaacatgtgaaacatggaattttaaagcttaattgattgtacaggactttatatctgctcaaccaaatctcttgaggaaaatagtatggaagacactagggaaaaaaaacacgcatacaaaataaagatttttatggcaggatccctaaacactggccagagagatgcaatcttggtgagactatagactggagtacttttggaccatgtagaacagcagcctattctggaccagatgcatttttctatctccttggctacatttcactctaatcctgccaactccagcttggcttaccatgctttctgattctcatgttccttgcagctgggtctgctagttgggtcctccctgcagtcacatgcctatcacaagatttggttaaccacaacagagaaaggagatatgtggggagacactgctacagatgctaggatctgtagttaatcttgtagccacctaactaattcatggaaactccagaaatgagactgcagtttctaaatcccgtatttctttattcagtccccaaacccaattgtttcggtcaagcacataagactagtcttctgactctgatgagtcatttttcttccctacagattctcctaaaaatccctcctatgaatcctctgctaaggatgctaagtgaaccctatcacatgtggctgcaggcctgacacagtgcctaagccttaaccttcctcttctcttaattctgtgctctcagctaaggttttgacaacttgccaacaccaaaactggaatacacaaagtatctgccctttcttggttgttacctatttcagagcaaactggacattcctcctctaaaattttatctatctgaattcaaaataagattgccatacttggattcttactctcattggttcagtcaatcacttgttcattcaggaaatgaaaatatgtcctacgcaaagctcttcagttgcttctaattgtttcaagagaaatatccaagttctcttgtatggattaaaaattgtttctctccatattttttttattaagcccaaggtagataaaaatgtggagactgctctgtagatattcataatatccataatcgcatcttcaaaatctatgaagagcccagagaaaacccatccgaaccaaagtaaattgtaattatctaattcctcagccttgctatgtttcttgggatttctccttattgagtccaaatttactaccatgactcacaacctaactgaagccacagaataaataactcagacacttgccaattcttccatcaagcggcccaataaagactctagtctctgtgagacttttaacaattaaatataaaattctctcaacattttttgagaaaagaccttagtcttcttttaaaagaaaatggaagggaaaatggtgcagcagaagggaaaacaatgccctccttctcagactgaataggagagaggtatttcaattatgatctgtgatgtacagtgataatatgatttgcaatgcttcttatggttcagagagaatactgacaaaggtcttgcgtttctgataccaatatttcaattttagatgcaatggaagatggctagagttcccattcctgctagaaaagagtgttgcttctgcctcaataagtaaagctggataaatagaaaaattgtaactttgctttaacccatcagagacctgagattacagggcaaataagtaggctggactccaatgaggaaaacactcctccaagggagacaggcagcttatggactggcacaactgcagcagagcatagaaaaagaaatgttatctgccatacaagcaagaaaaagaaactgggtaaaagattgagtgagagctatcatcagaatatagaactgctgggagttgcagacatagaaggagtttatattcactggtagggccatttcacagatgttggaagaagtaattaggggcagggtgagacacagagagagccccagcaaaagtgtaggcttacaagacataattggcagtcactgcaggaaagcacaaatcccagcattcttgcctaaatcagcctcttgcaggaggaaaagctttaagctgttggggatggggctaaagacctgacagcgcattctgtcaccccctagagcacaggttaagatccacaacagcaaagaaaagagtcaagggaaaaaaatctctacctttgggtagagacaggaaaccattctgagctgaagaccctgtaacaataccattctaattttgctacctgtaagaaagaagcagaaaactctctcacatcacacccacagagaaacacggcagtgtttggctgccacagggaggaaaggtatgaatgctgagaaaaccctaaatccaagatccaagcacatggggccagtctaagattgaagctggaccaagacaacagagaagtccacctacccacacagtgagcctcgtaagcactaaataacaagcaacggcaaactattgctagaggagtgaggggtgaggaacagaaagagagatcctctttgtgctgaaggaattcagggacagctaaaagctgaggtagagtactctaaaaaatagagattcataaatcaatagtaattcaagaagccagcttttaagtggctcacaaagcagtaagatggttttaggaaaacttatgtatttaaggatagtattctagaccttctattttcagatccttctacttcctactttctattcctggagacaacatggttggataccactatcagagccatattaggctgactgaaccaccattgtgacttgcattatattatcttctctcaattctttatctccgtggagttttaccttaaaagatgttcattcatatacttttattcactaggtataactatgaggaagctgataaaaagggatgtttctcattagtcttttgtttatctaagatttgttgtaggttctgatacattagcagaataatataatcaatactttgatttgtttatcagatctatctaggttcatatgctacctctttgtgttcttgaacttcttcgagtctttgaggattaaatgaaagaattgatatcaaattaaaagcacagtggttggcatgtggtaggcaccaataagccactaataacagctcttgaaatacgtcatatcctttcattgctcctttacaacattgagtttataacagggaaaaaaaataaatattattgcacagactccaagagactatggactgggactcgagtgcataacattttttacttgcaatgtacattgctgaaatctagacaccccaaacttcctgcatctgcttaggcttttcaatcacggaagaccactgcactctggcaggaaaaatatccagatgcctaacttggaaaataaactaaattaggccatcttgggaaatggcatatagctctttggagggcaactttatatttaccctgtcttctgatatgttgaataaaagaagtttaaatgagacatctgctttagtatttggcatattgatataggtgagctcttacactatgaaagtatattggaaaggatatgacaaagaatatgctgctaaaatccctgaaactcgttaacacttaaaagtggttgatttcaataataaatttcaggcatctcaggaactgatttcctcaaaagtatgatttatagccatctgattgtgaaggcatgaacatcctcattctttgacattaaaggagaaacttggcaattagagggatatgcatgggcttgattctagtcagtaaatggttcaggcagagacaatgacattaatctggggctttttatattggaaaacacaagccaagaaagaaggtgcaaatatctttgccataataatgctggtgttatgatttcacaagaagtaggtgtgaatatgttttactaatgaaaaaaatgcattcattcctcagatagactacaatgattggactatcaaaggaaaattagctttttaaatactaagttgtgtgttttcatgtacacgtatacacaagtcctggctgtagctttactgatacagagaaaacaaactgaaattgaagcactgacaattttcacctaccctctacctttttcatggcagcagagctcaccgtgtcttgcaaagttgttaatagctcaagcaaacaaagaccccattgatatccaatatatgtgcaagatcccattgatatccaatatattaaaaagggactttgatctgagctttattatcctgtagaatggagtgctaatgtcttgaagtacaatggagctagtataccaaatatcatgagcttaagaaccaatagagagggaaaaaatgagacaaggaaacaaaaattttgatgtgtgatggattctattggtctatccattgaagccttgctatatcaagataccttttaaatttatactgttcagaacgcatattgaaactgtcagtaaaaaagatctctctactcttccaacagagtccattgtatatttggtacaaaaataaaacatctaaggttgtattccattcttttgaatggaagctcagattaaagtcccttttaatgtcttgcacatatattagatatcaatgggatctttctgccagccagcagataattccccaatgcagatgaaacctgttttaaatagtacttctacttcagaaactagttactaaaaatctctttgggaaaaagtcaggcacataattgtgatgtgtgatggatttccttgtctcccaattttttctctccttggttcttaaaccgatgacatttagtataccagctccatggtacttcaggaccatgtacatcaatcctctctacaggataataaagctcagattaaagtctttttaaatgtcttgcacatatatcagatatcagtgggatctttctgccagttagcagataattcctcaatgtggatgaaacctgttttaaatagcacttctacttgagcctgagaggcggaggttgcagtgagctgagatcacaccactacactccagtctgggtgacggagtgagactcagtctcaaaaaaataaaaaatatatagcactcctacttcagaaagtagttattaaaatctctttgggacaaaactaggcacactgctctgaatacttcatgaaataataatttttccaacgcctttctgagccaggtgttcctggtgttactagaatgttggtcagttctgcacaaatttacctaatttacatcctaagatgctctaccttttctttgcaatagccatcaattatgccccaattttttaaaataaatctattgataatatcatggaactggatgaggaattctaatattaagtctgcatgccaattcgtccaattactcagtagaggaaagccttccaattgaacttcattgtgtgcctgcttttgtgcttcttttatttaagcattttgaatatatgagactactttagcccttctattccattctcatttccttttcatccagttaaacttattgagagcctaaaatagaaaattcaacacaggcagtcctaaatttccaaaagaagatttgcaactaatggtagaacaaagaagcaacaaatttttttttggacagttttacattattgcctgggctggagtgcaatggcacaatcttggctcactgcaacctccacctcccgggttcaagcgattctcctgcctcagcctcccaagtagctgggattacaggcacccgccaccactcctggcttattttttgtattttttagcagagatggggtttcactatgttggccaggctggtctcaaactcctgaccttgtgatctgcccaccttggcctcccaaagtgctgggattacaggcgtgagccactgcgcgcagctggaagaaacaatctttataatgtttcttaggaacaccatctgggctgggcatggtggctcacctgtaatcccagccctttaggaggctgaggtgggtggatcacttgaggtcaggagttcgaaaccagcctggccaatatggcgaaaccccatctctactaaaaagaaaataaaaaaattagccaggtgcagtggtgcatgcctgtaatcccagctacttggcaggctgaggcaggagaatcgattgaacccgggaagtggaggttgcggtgagccaagatcatgctacttcactccatccaccctgggcaacagaccaaaactccattaaaaaaaaaacaaaacaaaacaccaccatctgtaagacatggttgaccagaaacagaataatgcaaggttggccaacatagccaaactcttctaagccatgagctctgcctctgtctcattgattggtgcctagctgctagagttcagtgataaaagtgaaatcaaaggctgtacattatttattttctttgactatgagtttatctttcctgccagatccaaaatgactaataaaatgagagatacagtcagtctagactcgaaccaggaagagtctctaaaatctaaatgagtaactctaatggtctctctgaagactctgcactgttgcttctttaaagataaacattaaaatagaaacccgcatctctaataaaatatttgtctttcccagactttcttgagagtgagtctggagtgaccattttgtggtaacagatcatcatttggggttattatttaagcaccagttccctcatatttgtgctgtcagtcacttcctcaaagcttcccattcagtatgttttaacttaagactcagaaggacacattgatgataagaagtttctcagtgggtctgaagcttagctccaacactgcttgtcttagaatagagactttatcttactaggacaccaaagaagactgttactacatggcatgaatatctgcttcttctttatttaaaaaaaaaaagtgcagaaggcatcaatggataacattctctatgttttcatttgagtctagtagttttctgttcttactttgtactgtcaggctttttttccccttatatctaccttaaaccctataaagaactactacagatcagaaactttaaatgcaagatctgtaacttaatcaccagaaatataaaccagaaatatgactttctactaatttcctacttgtgaagtaagatgttctaagggataggcagacatgccagctctccttctaaagacagaatgtgtgttatacacgtggccttggcaattagaggtctgtacacaggatggcagcacttcattttcacatgcagagaaatggaatgttcaactctgttgggcagagcatagcttgtctcctattggcttatagccaggttaagaaagagcaagaatacactgagaatagaatatgttctccttcccagatagtatagatcattgatgattctaatggcaagaagaatggaaaagtccctgggagctttattcaaattcagctgaagcgtaagtccagggcttctggaggggtccatcacaagtctggggaaggagggggattcattttagttctcccctggttttctgctgatactctgcaaagaaaacgtacattcggaaaatgacccagtaacccattttccttgtttcaacggtgatgagtggccaagaaaaggatgtgatacagagttattcaaatctaaatgtctaggagagagaaatggccgttattaatgacagttatacagatggagctttgaattatttctgttggtacaagaagaaaacggggaaggccctaatatcttaatggagattcattcaaatgtggatagaaaacaggacagaaggctcactgtactgttgaataaaaatgctaaacatgtctccctgcatattacagccacccaaccaggagactcattcctgtacttctgtgcagtgagaacacagaactcttcaggcacctgcaacctgtactcaaacctgcaactgggagtccagtcacattctttgtctttgaacgggttttgggttagaatggtttaccataatgtgcttgtttctaaattgaaatgaatgcagaaatctaataattgtgattacaaaatcattacgtttaaagtaactcaaaatgagctggtatactttgtactaactccaatgtattcgagaggagaagtagtgttgttttaaatagatatgtaaataataaagataacctcattggaatatctgaggttgtttcattgagatcctacacttccataataaaacaaggacacctaaaactcttctgggtggcaatctgctggccttcagaaaaaaaaagaagattcatttttgaaaaaattttaaaatttttaaatcatcatattttaaaatcatcacacactcattatttattataagtattttcattccaggtgtgtctgcatatgccctaattcatagcaacttaacatatcaagtatatttatcatataacatttatgtccattctcctctggacatccaccttcatagtacgggtattcagtcataaaagttacaattcaaatagccaccagaagaattcctgcaaagatttttgtcttgcaactgttctacattcagaaaatatttaccaactgcctactctgtgccagacattgttcttggtgttgaggattgagcaggatgaacagaaagacatgacaaaatttaattgtattctgcttctctcctccaatggatgtctgctcaccagaaattaactggggaaacattttgatgacagtgtatatccagggatcaatgacaccacctaggagttttaggattttgcccaaattcaccaattccttcatacctcataggtctgtatgtacagtagcaacagtgtgatctttctcttttttccaatgttccttcaagaaaggaagataatagttattttagtcaaactgttcaaaatagagaaaaaaacctaccaactccctcatgaggcaaaaaacataaacaaaatctgtagagttaagagtagtgaggctgggcactgtggctcatgcctttaatcctaccactttgggaggccgaggcgggtagatcacttgaggtcaggagttcgagaccaaacttcccaacatggtgcaaccccatctctactgaaaatataaaaattagctgggcgtagtggtgtggacctgtaatctcagctactcaggaggctgaggcaggagaatcgcttgactctggaaggcagaggttgcagtgagccgagatcctgcctctgcactccagactgggtgacagtgcaagattccatctcaaaaaaaaaaaagagaaagtatttttcatataaattattctcggatttttgaataagtaataagtatacatggtataaaataaaaattatacaaaaagatatatagtgaaaagtaacttttctctttacctctatccccactatccccaacagcctagtataaccactgttacactgaaattttctttgaacattatacatatatacatatatatgatgtgtatatatatatatgtatatataaaaatgatgtatgtatatatgcttgtgggtatatatataacatatatattaatgtagcataccatccacactgttctgttaccatgctttcttacttaaactatatcatgggaaaccatcattgtcagtacatgaagacagctaccttattatttttaatctaaattttcaaacacacacaaactaggaagaattgtataatgaactcctttgtatctttcattcagctttaacaaccatcaactggctatctccttctctttaaagtttcaaattttgccattgtgtgactataccacattttatttagtcaatctcttgttgatggacacagattgtgttcaaattattagttttgtttgtattgtagcatagtttagtaaggtacacagatctcaagagtacagttcaatgagttctgacaaatgtatatgccatacaaccatcactgaaactaaaatatagaacatttcccataatcctgaaaactctctcatgtttcccccccagacaacacttccactaaagtaagaattgttcttatttacataaaaccatagaatagttctgtttattctattttgataaattgagatataattcacatagcataaaatccatgcttttgaagtataccattcagttatttttaatatcatcacaaatctgtgcaaccatcacaactaattcctaaactttatcatcactcgccaaaaaaaaaaaaatcatacctattataagtcactctcatcccctcctcagaacatctgcccctaacaacgcctaaatctgctttctgtctctatggcctatcctagatatttcatacatatggaattgtacaatatgtgacctatcatgtcacgtattgtatgattcacatattcacatattttactggctttttcacttaccataataatttcaaggctgaacatttgtgaccaagtttttgtgtggacatacgtttttagtatttggggtattatgcataaaaatggaattgtgggtcatatggtaattttatgtttaactttctgaggaactgccaaactatttttcaatgtggcttcactactttacattactgtcagcagtaagggaggattccaatttttccacattctcatttgttattgtccgtctttttaattagacccatcttagtaggcataaagtagtatccctctgtggttttcacttgcaattccctaatgactaataaggctaagcctatcttcatgtgcttaatggccatttgtgtacctgctttagaaaatgtctgctcaagtatttgggctgtttttaattgggttgtcttcttattgttgagttgtaagaattctttatatgttctggatactagacttttatgagacatatgattggcaaatagatgctcccattctatagattatgtttttttttttgctttcttaatagtgttttttgaagcagaagtgttctaaattttaatgaagtctaatttatctattttttctttagttgctggtgctttatatgtcatatttttaaaaacattgcctaatccaaggtcacagatagttatatctatgttttctaagagtttcatagtttcagtttgtacattgaggttattgctccacttcaagttaatttttgaatatggtgagaagtagggatgaaagttcattcttttgcatgtgaataataagacatttggagtccccaaccaaaagaaagctgggtagctatactaatatcagataaaattgacattaaaccaggaattattactagagacacagagcaacacatcaaaatgattgagtacgatctacccagaacaaattctatttttatatatacctaatggcgtagcttcaaaatatatcaaacataaatcagtagagttcaccagtagaattaaattggtagaatttattgattaaaagatcaataaataattatacaaccatcatgtcaggcattaacacacatctctcagtagaaaagtattgaaattatgaccaacacaactaatatcctttacctcacatacatagattgaatactttacctcaaaagaacagattacacaaggaatatttagcaaaattgactatattctgaaacataaagtaagccttaatcaatttcaaagaacttaaatcattcagaatagtcatagtctctgaccatatggtattaagcaaaaattcaataacaaaatgattattaaactttattcctgtaccttgctagatataaggttaatttttcaaatgtattgccacagaaaacaccaagacaaaacagagatttggggtagggtagatttttcagtctctgaatagagcaatgtaacatactacttgcacactttatttcctgtttgggggcagaaacactgaacttctccagggactttgcactcaggcactcagagaagcattttgtttccaggcttgagtgaggaagcaaatttcaaccgtaagaagaaattctaccatgctctgccctggcctgctgtgggcattcgtggtcccctttggcttcagtacctatgggcggccccaaacatgggactgcagcttcctcgagagctgggctgcacaaattggaactggtggagtatcaagtaagaggtaagggaagtggggaaatgaaacactatttaattattttctttgtccttttgccataaattaatctagtcctcatgacccatctgagacatttaagggaaccaactctgttttctcctttttcccataggatccagcatggctcagaaagtaacccaagttcagaccacagtaactaggcagaaaggagtagctgtgaccttggactgcatgtttgaaaccagatagaattcgtacactttatactggtacaagcaacaagcaacctcccagtgaagagatggttttccttattcatcagggttattctaagtcaaatgcaaagcctgtgaactttgaaaaaaagaaaaagttcatcaacctcaccatcaattccttaaaactgactcagccaagtacttctgtgctctcaggaatcccacagaagtagaaatgacagtggaagataaacaaaaaccttagcactccataaaggaagccacctgctcaggagcttagggaaaatacatgaagcacagacaggaagaaggcacattagtggcacagttgagaccttataatgtaaacattcctctgtaaaaaaaaagtttccttattgagtttatatataaagcagcattctttcttgcgatttccaactattacgtttctatcttgggttaaagtaaatcacaaagtgtattagtcagggttctctagagagacagaactaataggagagttgtatgtatgaaggggagtttattaaggagtattgactcacacaatcgaaaggtgaagtctcacattaggccgtctgcaagctgaggagcaacgaagatagtcggagtcccaaaacctcaaaagtagggaagccgacagtgcagccttccatttgcggtcaaaggtccgagagctcctggcaaaccactgctgtaagcccaagagtccaaaagctgaagaacttggagcctgatgtttgagggcaagaagcatctggcatgggagaaagatgaaggatggaagacttaacccgtcaagtccttccacattcctctgcctgcttttatcctagttgagttggcaactgattagatggtgcccacccagattaagggtgggtcagcctctcccagtgcagactcaactattaatttcctttggcaacaccctcacagacacacccaggaacaatactttgcatccttcaatccaatcaagttgacactcactattaaccatcatacaaagtgctttttaaaatcgttgctgaacaataagattaaatgaacctatgtatttcatgaaattcagaagcagtttgctgattctcatcttaaactgttgaatttccagatttgaagtagcactataaaccattttatcttccaatctcatgttgattttagcagtttttataaatattatcattttatttatttatatattttatatataaacaaatttcataaatacataaatttacttttatgtattttaatatataaatacatggtttttattgtattcagatagataagaaggcaattaatgttttgaaagaaatggatgaccaaaagaagctttgactaaaacaaactatgattgttagagatagaaaataattcttgggtgcttcataagcccagcagaaggtgggctgagaaaccaatttatccaccaaggcaggcatattccttaatatgtggtcaaaggagataagagaaaaagaatattccagaggactgagccagagaatgtaaaaaacaatgggcaaaataactccctgcatagagtgcagtcagaatctcatcaaagcagggtaggggtcttcataataatccaaaatgaactaggtatgtgcagaaaataattaacagtttttgtaacacactgagattttggagttgattattgtagcaggataacctagttactcaacttatctaaatacagagaaaaaatgagaaaatgttttcccaatttattttacaaggccagcatgattttgatactaaacctgaataaagaaatatttttgaaaaaattattatgggataatctcactaaatgaacataaattcaaaaattctaaacaaactattagtaaaaagaattagcagttataaaaaagaataacatatcacaaccaagttgggttttatataatctttatataacatcttaaatgaattaaagtaataattctcattaataaaaacatgatttaataatctcaacagttacacaaaagtttttaatacaaagtaaatattcattcataataaagagataaatttatggcaaattaggaatagaaaaaaaagtcctcattctgctaaattatatgtattacaacaaaacagacataaaacttaatgaaaaatgttgaatgctttatttcaagaaagccaaaaaaacgctatccctattaaaaaagtatactgaaggtcctaaccaatatttaagaaaaataaagaaataaaagttttaataattagaaacaagactataaatattagccacagatggcatgactgtgatatatacaattccaaatcatttgcaaatatatattacattactgagtttagctatgtagtattaaaaattacattttatatgaaagcaatcagaaattttaaatgaacctttaaaaagtgtccttaaaataggtggggtgaactgggggtggagggttacgcctgtaatcccagcactttgggaggccgaggtgggtggatcacgtgaggtcaggaattcaagaccagcctggccaacatggtgaaatcccatctctactaaaattacaaaaattagccaggcatgatggcccatgactgtaattctagccactcaggaggctgaagcaggagaatctcttgaagctgggaggcggaggccacagtgagccgagattatgccactgcactccagcctgggcgacagatcgagactcgtctcaaaaaataaaaataaaaaaataggtggggatgactaatgggtacaaaaaaactgcaaagaactaataggacctatcatttgatagcacaacagcgtgtctatagttaataataatttaattgtacattttaaaatcactaaaagagtacagttagattatttgtaacacaaaagataaatgcttgaggggatggatacctcgttctccatgatgtaaacttttttttttttaagaaagtctcactgcgtcacccaggctggagtgcagtggtgcgaccttggctcactgcaacctccgcctcccagattcaagtgattctggtgcctgtctcctgagtagctgagattacaggcaagtgccaccatgcccgggtaatttttgcatttttagtagagacagggtttcgtcatgttggctagactggtcttgaactctgacctcaagtgaacctcccgcctcagcctcccaaagtgctaggattacaggcgtgagccacatgcctggcctctatgatgtaattatgcattgcatgcctgtatcaagacatctcatgtgcctcataaatatatacacctacaatctacccacaaaaattaaaaattaaaaaatgtaacatgtatatatccttaaaatagcataaaaatacaaaatacttaaaaataaattttaaaagatatttgcaaggcctcaagacaaaaggctataaaacattaaaaaacgaaattaaagatctaaagaaatgggagaattcatcatgttcatgaattagaagatttacaatgcaaaggcatcaattctcgcatatttggtaaatacattcaatgaaatccccatcagtatcaagagtgtgtgtatatacaagtagattctaaaatatatagtttttaaaagtcagtaatactcaaagcactccgagagaagaagagcaataggaggacttcctgtccctgacaataagcctatgaaatttaaaatatggtatggaggaacaggaacacactcagttacagatctcgtcagctgtgtgtgttcctttttcctctcatatccactctccacctttctcttccttgctgtttgtctcacgaggctgacctgaatgaaccgcatcaacaaggctcccgtgccctctgggttctagtggatttttgccagtgaggtgccctttgccaaaatctgaaaaaggtagcagagtaaggtcagggtgtttgttccttggttctcctcctgaggaatctcttctagtggcaaacatcatttgttcaaagatcacagctcctttcaacttggctctctccacacacccatctccattcaggttttgatattcctctctgccctctggacatagggatagtaaaactccactggcctaaagataataaaattaaaatgcagatatttctcaaaaatctcatagagaaagaagtctgaggattcaggtaaatgggaatgtggtaatggaattatctgatgcaatttaatcagatgcctgctaaccatactccctgggaatcccagaggacccttctttcaccaaggaatcaggaaattcatcattgagtgggtcaccagaattcttaaaatatttcttggaggccatccaacctctatacagtgaaggcaatggggacggggtgggcacattgccatgtaatttgctttcctggatttcagtgggtgtgactggatcctgttgcgataggtagtggagtttaacagatagagacaaagatagagtttaacagatagagaaagagtattaatcagagtcttttaacattcagagatttttggagaaagctaattaatcatagaatacctaggaaggaaagacagaatcagcttcctgaggctctactttatattatctagattttttgaggaaaaaaatatagttttagtagctataatggagattaataggcccttaatcaatcccaattgagaggcctaaaacatctgaactgagggaatggttgcatccatttgagaaagattatgccagacaatatcaagcattggcaaggatatggaacaactgaagctcttatatatttattatgttggcgctaggaatgtaaaattgtgccaccactttgaaaaatggtttagcaatttttataaagttaagcatgcatatactgtatgatctaataatttgcacccatagattgttaaccagaagaaattaaaaatatatattcacagaagtatttatgcagaatgtatttgtgaatagaaaatattcacataatattgtttatttcttttggataaatattcagaggtgctttattcattataggtcataactggaaaaaaataaataggaatgagcaatttatatatacaataacatggatgcattttaaaaacattacatggagaaaaatgtcagatgaaaagagtttatactgtttgtatccattaatttgaaactcgaggaacagcaaatttaatccatattgagagaaaacagatcagtggttgtctggattctgcagttggggaacccagacaaccactgattgacaggtagagaacacagaggaacaatttagggtgaaataattgttctgtgtcttgatttatacaacagttacatgttctataaatatttcaaaactcaccatatttcaaagcacttaaaatgggttcattttactgcatgtaattcatacctcaataatgttgatttttttaaaagaaataataaatattgctacatgccaaccaaaatgtctaaaattaaaaaagaaagacagagctaagtaatgaagagaatttgaatctactcaaacaagtaagagtgtaaattgataccaatacttaggaaaattgtttaacactaatttctcaatttgaatcataactaatgaaaattattttttaaaaagccaaagtctgggaaatcgtcctaagggcataccaaaaatggagaagcatttattcaagaaaatctactgaatctactaaatgtcagcaaacaaaaataaataagatgtgatatatatgtatacacacacacatataatagaatattattcagcctaaaaaggctgtttttatggatacaggttcctttttgggatgaggaaaatgttctaaaattgattgtggtgatggctgcacaactctgtgaatatactgaaaaacattgagttgtacactttaaatgggtgaattacatggtatgtaaattgtatcttaatgaagctgttacataaaaataaaaaagcaaagcaaaaggtaccacaatatttattgttcttttctagactcagtctggattctccataccatttgaatattgcagtaatgaacactatatgtttgacttttgtataatataactagataacatagagacatctacatttcatatttcttttcacaatcccaattttttaaacctatatatttataccagtactgaattattagtgtcatttttaatctgacacatatataacatgacacagtgaatagctgtcaaattaagtgtcactatatggctattgtgtcatatatggtcatattctaataaccagtctttatgtattatagatttgtgaatttttcttttttggaggatggagaataaggtttggtgtgctatttgaattttgctcacagatctaatctggcattttcacttttacttttagatagttttgttcaatttgttttcaaaaaaattagaagctttttgggggaacaattgcaagagtcattccatataattcctcccaataatgttatgagtaaataaaaattaatatattcacccaacaaattaagttctcaatctgtgccaaatcctatgctatacaatgagtaacatgagctttgggaactgccttcaaacatgtgaagaaccagataccacagaaaacaaaaggaatacattaattgagaaaacatcacataaataattttggggggggcttcctttattttattttattaaaaaaattttaaataggtttttggggaacaggtgctgtttggttacatgaataagttctttagtggtgatttctgagattttggtgcacccatcacccaagcagtgttcactgtacccaatgtgttgtcttttatccttcaccactcccacaccttcccccgagtcctcaaagtccaatgtaccattctcatgcctttgtgtcttagagtttagctcccacatatgagtgagaatgtacgatgcttggttttccattcctgagctacttcatgatatggtttggctgtgtccccatcaaattctcattttgaatttccatgtcttgtgggagagacctggtgggaggtaattgaatgatgcgggcagggctttcccatgctgttctcatgatagtaaataagtctcataagatctgatggttttaaaaggtgttcccctgcacaagctgtctcattttttgcctgccaccatccatgcaagatgtgacttgctcttccttgccttctgccatgattgtgagacttccccagccaggtgaaactgtaagtccaattaaacctctttcttttgtaaattgcccagtctctggtatgtctttatcagcagcatgaaaatgggctaacatagcatattggtaccagcagagtggagcattgaagaaaagatgcttgaaaatgtggaagtgaccttggaactgggtaacaggtgcaggctggaacagtttggagggctcagaagaagacaggaaaatgtgggaaagtttggagcttcctagagacttgttaaatggctttgacaaacatgctgatagtgatgtgaacaatatcatcttccaggataaggtggtctcaggtggagataaggaacttgcttggaactagagcaaaggtgactttgtcatgttttagcaaagagactgttggcattttgcccctgccctggagatttgtggaacattgaacttgagagagatgatttacagtatctggcagaagaaattcctaagcaccaaagcattcaagaggtgacctgggtgctgttaaaagcattcagttttataagggaagcagagcataaaagtttggaaaatttgcagcctgacaatgcaatagaaaaggaaatcccattttctgaggagaaattcaagccataatgaagatccaaatgttaatcctcaagacaaatggggaaaacgtctccaggttatgccagaggtcttcacagcagcccctcccatcacaggcctgaaggcctcagaggaaaacgtggtttcatgggctgggcccagggtcctcatgctgtgtgcagcttaggaacttggtgctctgcattctggctgctccagccatggctgaaaggggccaacatagagctcaggccatggcttcagagggtgcaagcctcaagccttggcagcttccacttggtggtgagcctgcaagtgcacagaagtcaagaattgaggtttgggaacctccacctagatttcagaagatgtatggaaacgcctggatgtccaggcagaagtttgctgcaggggcagggctctcgtggagaacttctgctagggcagtgttgaagggaaatgtgggattggacccccacacagagcttctactggagcactgcctagtggagcagttagaagagggccaacatcctccagaccccagaatggtacatccactgacagtttacaccacacacttagaaaagctacagatactcaatgccagcctatgaaagcagccagtagggaggctgtaccctgcaaagccacaggggtggagctgcctaagaccatgggagcccacctcttacatcagtgtgacttggatgtgagacatggagtcaagcgagatcattttggagctttatgatttgactgcaccgctggattttggactcgcatggggtctatagcccctttgttttggccaatttctcccatttggaatggctgtatttacccaatgtctgtaccctcactgtatctaggaagtaacaaacctgcttttgattttacaggctcataggtggaagggacttgccttgtctcggatgagactttagactgtggacttttgagttaatgctgaaataagttaagactttgggggactgttgggaaggtatgattagttttgaaatgcaaggaagtgatatttgggaagggtcggggtggaagtatatggtttggctgtgtccccacccaaatctcatcttgaattcctatgtgttgtgggagggacccagtgggaggtaattgaataatgcgggcaagtctttcccatgctgttctcatgatagtgaataagtctcacaagatctgatggttttaaaaagaggcattcccctgcacaagctctctctcattttttgcttgccactatccatgtaagacatgacttgctctttcttgccttacgccatgattgagaggctttcccagccatatggaactataagtccaattaaacctctttctttgtaaattgcccagtctcgggtgtgtctttatcagcaccgtgaaaacagatgaatacacttcacttagaataataatctccatttccatctacgttgctgcaaatgccattattttgttcttttttatggctgggttgtattccatggtatatatataccacattttctttattctgtcattgattgatgggcatttgggctggttccatatttttgcaattgcaagttgtgctgctgtaaacatgcatgtgcaagtatcttttttgtacaatgacttcttttcctctgggtaaatacctagtagtgggattgctggatcaaacagtagatctacttttagttctttaaggaatctccacactgtttttcatagtggttgtactagattacattcccatcaacagtgtaaaagtgttcccttttcactgcatccaaaccaatgggtatttttttaaatttttttattatgaccattattgcaggagtgaggtggtatcacattgtggttttgatttgcatttccctgataaataatgaggttgagcatttccagatgcttgtgggccattggtatatcttttctgagaattgtctagtcatgtccttagctcactttttgatgggattgtttgttttttcttgctgatttgagtcattgagttagattctcgatattagtcctttgtcagatgtatagattgtgaagattttctcccactctgtgggttgtctgtcaactctgctgattgtttcttttgctgtgcagaagctttttagtttaattaggtcccatctatatatctttgttcttgttacatttgcgtttgggttcttggtcatgaagtctttgcctaagccagtgtctagaagggtttttctgatggtatcttctagaatttttatggttttaggtcttagatttaagtccttgattcatcttgagttgatttttgcataaggtgagagatgaggatccagtttaattcttctacatgtggctagccaattatcccacaaccatttattgaatagggtgtcccttccccacattatgtttttgtttggtttgtcaaagatcagttggctgtaagaatttggcttcatttctggcttctctattctgttccattggtctaggtgcctatttttatactagtaccatgctgttttggtgactatggcattagagcatagcctgaagttgggtaatgtgatgcttccagatttgttcttttttggttagtcttgctttggcaatgtgggctcttttttgtttccttatgaattttaggaaataattctaaaaccccaaagtgactgaaaataatttgacctttcttagagaattatggtaggaagctctttgctgagccttgtcactagagggaggtagcacatccaaaataatctatctttagacctgaaacacaaaccctgaaagattgctaactgacttggttcctagttctatgtaaaggagttcacatatacagtcacaagagggagctgttacagctgcaaatccaagctccttccagggtgagcgaggttgtcattgagttgtataaggaatttatgttcattctttttgccaccttgtgctttattatctctttttgagtgtgtgcacagtttcaaagacatgggtaagccccttcccaaatgcagagcagaagtgaccctgaatgggaaaaacagagaagtgattaatacatagctcaattttaaatggtgaaatatttgttgctataatggactgacaagcttagttattgtagcagagataatgagtaattttaattttattccttcccatttctttaataaccacttttgaaaataactagaaaaaccccttcatagttacttctacctctcttatcaaatggcatcatttgatttccctctccaaacctcttcccatttcttcctttctccttcaatgtatgccactcctaggcatcatgaagatgagaaagcatatgttaaagaggagttcaagtggcatagaaataggggtcattcaagccattggctcctgtctcaaaaccagaggcacaggcaatgtctatctagaagacacttaggacattattccaggagccagtgtgggagacctgagtaccaggaaacttggcttctaacctgagttctaaatttgttctttcctttcacacttagcacagcaatattatacaattatgaaattacttttgttatatatgttgcaaataccttctttcattgtgtcatttgattttcaattttgcttatggtaattttttttaccaaaaagaagtttctaactgttgaaattaaattatatgctactgcttcttctaagacttactcgccctgaagatgtggatagaaattcccttctttcccttacagcacagggctcacatagacttcttggaataaagggctgttcttaccagctcaatgggttgtcaaactaccaattaatggtgggttttgtccttaccataataagggatgggtaatcccatttacttctttagatgtagcctacttgagtttcagccttgaaaatgatcttaatggaaactttctgaattaaagctagatttaaagaaaatattcttcccctctttttaaagttttatttttttaattaacaaataataatcgtattttatcttcttttaaaatgtatgtttaaacctgggggtgggctagacctaaccaggaagctgctctatctttagctgacgatttctggggagcactcaaattgaaacctgcctgatgtgggatgtgctgtggctgctgctttgttgcttgggacctcctctgacctaggatcagacacagagtctgagttctggggcctggaacctcaatgtgcacttgaacaatgaagttggtgacaagcattactgtactcctatctttgggtaagtgttctgggcctaagaaagcatagttttgtggctaatgacaaaagagagttatctgctgtctccatgttttctaccatgatttaccaattgcgggaaaaaatttgtttctatgtgtttcttgagggtgtctgagcgtcagtgtgaggggttggtcatatccactactcagagaagattctccaggtctcacagctctcaagctgtaaggagttttaggttcattgagctcaagggtcatggaagatgggaaatttatttttggccttgtggctctgcatagctcaggaacaaataaataccagtaatatttatcttgtcctgtgcaacacacataaaaacactcaaatatggagtagggcagggaggacagttctggagcagtggtgaacctgaccttcagatgcaccaagagctgatgatccagagctaatctgctgtttttcaaccccataggtattatgggtgatgctaagaccacacagccaaattcaatggagagtaacgaagaagagcctgttcacttgccttgtaaccactccacaatcagtggaactgattacatacattggtatcgacagcttccctcccagggtccagagtacgtgattcatggtcttacaagcaatgtgaacaacagaatggcctctctggcaatcgctgaagacagaaagtccagtaccttgatcctgcaccgtgctaccttgagagatgctgctgtgtactactgcatcctgagagaccacagtgggacagatggggctgcagctgtgcaatatctccctggtgatgaaagggaaggcatctaacgaggccactgcacaagaaggagcagaagtttaatagaggaagaagaaaatttaaagaagaaaagggaaaagaagtaaagaggaggtggtaaggaaatcaatgagaggatgagaggattaaaggaatgaagaaactgagaaagaatagctaagaagtcctgaagaaaggactgagaagcttggcgaagagatgaagaatcacaattggaattctgcagtcaggaagaaaggaaataagaattttcccggacgctttcttttaatcaactcttgctttccatgtagacctcactataaaagatgagaaccatcatctggtagtcccaaagcatttcttcatctagccccaggcaagtgcctgggctttgaatattatatcacattagtccttccaacctctcaataattgaaatgaatttcagaaattgattcatttgcccttacgaaaaatttgaaattttatttgttactcatccatagcacatactcttgggatatagatgatttctggaagggagcaagaaagtggtggatatgtgaatattgatttcattttttaaatctatgttgaaatatctctattattaaacaaaaatacacaaatcttttttcattgtaaaagattcaaactattaagtatgcgaagtaaaaccttagaggcccaaactgactgtctccatctccatcccattttctcttcaattcctacaataacccattttgacagtttggagagtgccctgatgatcatactccttttcatttatgtggatactcacataaatatctacccaattttattacataagttggaacataccatgtgtatctgtctgcaacttgcttttatttttatttaaaaatagttttttgaggtgtgttcataccgagatacatgtgtatgcatgtgtgtataaactggccttattcttttcaatatctacaaatgttcacagtatggttgtataataattttacttacctcacctatatcatctctacatatataaatatatatgacatatgtgtatgtgtgtgtgtatgtgtgtgtgtgtacatattccttatagattccgaagtggaattactggatcaaaagatatgcctattttatatttttatagatattgaaaagttgcattccaaaatggctttaacagtctaacccaagatcaggaacatggcaaaaatgtctactctcaccgtttctattcaacattatcctagagaatctaaccaatgcaatgagacaaaaagaaaaaggaaaccaggctttacctattacagatttgtgaatttttcttttttggaggatggagaatgagggttggtgtgctatttgaatttttcccacagatctaatctggcatttgcctttactttggatacttctgttcaatttgttttcaaaaaattggaagcttttttggaataatttcaagagtcgttccacataacttctcctaataatgttatgagtaaatagtaattaatatattcacccaacaaattaaatctttaatctgtgccaaatcctatgctgtacaatgaatgacatgggctttgggaactgccttcaaacatgggaagaacaagataccacggaaaacaaaaggaatataataattgagaaaacaacacagaaataattataaaagctccgaagtgactgaaaataattctgtctttcttagggaattgtggtagcaagctctttgctaagccttgttcctagagggaggtagcacatccaaaataatctatctttagacctgaaacacaaaaccctgaaagatcgctaacttgactttatggtaaaggaaaccatatttaactttttaaaacgtaactatcattttgcaaacaatagaattgtctgtgtagcaaatcctatagacaaaaaaactactgtaaccaataaatgagttagataaaattgcaagatacaagctcaatatacaaaataatgctgcttccatacagtaacactaaacaagcagaattgaaatttatatagatatgcatatgtatatttatgcatttatatatttatgcatacatatgcataaaaaacttttaacaaaattttagcagactgaatctaacaatatataaaaaggataatacataataatgaagtggggttcgtctcaagaatgcaatttatatgtatatgaatttcaattctgggccaggcacaggggctcatgcctgtaatcttggcactttgggaggctgaggcaggcagatagcttgaggccaggaattcaagactagcatggccaacatggcaaaaccctgtctcgactaaaaatgaaaaattagccaggtgtggtggcacacacctgtaatcccagctactcaggaggctgaggcacgagaatcactggaacctggggggcagaggttgcagtaagccaagattacaccactgcattccagcctgggcaacagagtgagactctgtctcaaataaataaataaataaatttcaattctggcgtgtgtgtgtgtgtgtgtgtatgaatacacttgacagaagttgtctaaggcctgtacactaaaagatataaaaaaattctgagatacatttaagatctaaataaatggaaagagttattgtgtttgcagattagaagactcattaaaattctctccaaattgacctacagattcaatgtcattcaaatcaaaatcccaacagaaattttcatagaaattgacaagtgggtctaagatttatatgaaaatgccaagggactacaacaaaaaaattctttttaaaaaacacaaattgaggaacttacactactgatatgaatacttttatagttacaataatcaagagactatgatattgatataaagatagacaagtagaacattggaacacaataaaggatccaataataggccagcatgtacatagttgattttcaacaaaaataccacaacaatttgttatgaactgaatatttgtgatctcccctgcaaattcatgtgttgaaatcctaacccccagtgtgatggtattaggaagtaggtctttgaggaagtgattaggtcataaaagtgtagccatcttgaatgggattagttccattcagtgaaaccctagagaactttcttgttctttctgtcatgtgaggacaccacaagaagactgccatctatgaaccaggaagcaggccctcaccagacatgagatcttccagcccctcgatcttagacttcccagccttcagaaccatgagaaataaatttccattgttttagtcacacagtctatggtattttgttatggcagcccaagctaacaaacacaatctcaaaataaatatgctgaaagaaaccggacgacagaaagcagatacggtatgattctgtttacataaaactctagaaaatctatagtaagagaaggcagactagagattgcctggggttgaataggcattgggatgatatattggaaaggtatacagaaaggattaacaaggaacacaaggaatagagacacaaggaaactttggggagtggtgcatatgttctttatcttgattgtgatgatgatttcacatttgtatgaccatgtcaaaaattatcatattggaccttgtaaacatatgtaatttgttatatgcaaagtgtacctcagaaaagtagtttttaagaaggctcaaaacaaaagtagacagagataaatattgaaaaataatcactctgtactatagagaacagaattttttactttctcttaattatggagggtaaactttctcaagcatgcaagggtaacatatgttatgagattatattttctttatctcataagtggcatattttaatgcaataaatagatctatgtcatatataaattaactccagaaaacctgtccattattcagcatttctcagtctggccaaagagtggcagtgttaaaaaagtatttgagtaagattgtacagtgctgaacaaacaggaatccaggtatggcttctgattggtgcaatctcctgcaccaatgagcaaagtaacttctgctggggaagctcattcagtaaaatctgatttaactgtgttttctaaatagctaagggatggagactgttctgcaagtactcctagggatattggggttccaagcagcctgtgagtatgtggttagtctgggagaattgcgagatggtgacagcatcctgagggcaagagtcgagtcatcttctgttctgggaaggcccgtttgagagccagatatgtgttgggaaaaaaaatgacaatactttgttttaatgtgacaattctgctgcctaggggaagtggggagggggagaaaaacatcatccctaccatgaccatgaaaatcttatgagggtcttctgtattttctttacattgtctttttgaacaggggtcagtagccaagaactggagcagagtcctcagtccttgatcgtccaagagggaaagaatctcaccataaactgcacgtcatcaaagacgttatatggcttatactggtataagcaaaagtatggtgaaggtcttatcttcttgatgatgctacagaaaggtggggaagagaaaagtcatgaaaagataactgccaagttggatgagaaaaagcagcaaagttccctgcatatcacagcctcccagcccagccatgcaggcatctacctctgtggagcagacacacagcgatcttcaggcctctatcagctgtctccaaacctgcagctgggccacatatgctcttctgacatggggctcctgagatgtggctgggacctttgccaagacatgaagtctcagaacgttgcaattgtcttattggaaaaatggggaggagagtaggaatgatacaagggggagctatatcactaatcccaaatttaatttgactttattgtctggtagttatgttactttttagtagatggaacatcaaattcgaatgagaatagcatgaatttcagtgatttatgcaagaactatgcacgaatattatgtccctgttgtgccaaggaacttctttccctttgctatttacccaccttgttaataaaaagaaattgtgcattgtttgtcagattctttgtcacagattaacattgtaccaagagtgttagaatatccatactgaggagtcatgggcaatagttttttctaagtttgtagtatagatatagaaaaagacaaatgtttagacagataaataggtgatagatagattataggaagctagattattagatagatgataggtagatagatagataataggtagattagatagagtgagctagagagaggggaatatattaataaatatctaatgcagtcttagactggcctccacttctcttctcattgtgctttcattcatattctagtctcagtattcttctggccactccaaattatcagcttaaagaattgtttcccagttgtctcagtatgaagtggagaagatgttaccttcatcctccactccacatcagaatagtgctggcctacagtgggtgtttacaagtattaaactgatactgaataactgataagatcataggttagagagaaataattcacatgtttcttaaaagctatgtgatgttgaccaacaactttaactttacaagtctttattttccctctgtaaagatgatacaatcatattattttattcatatgttcttgttaggatgaagtaaggttatagattacatacattaagtatctggtgtattgcaagccctcaatatttgagatagtatttttactattaatcaaacaatgacaatttcaagcaagtcaaaattctcacataaaagtagggaagttgatcaacatgatatggcttcaacctaactaggagatgttctattctttaaatttagaaaagaaaggaggaatataatggtctcctgtcatcagaaactgcctagtgacctggtttcaaaagaaattgcatgtaaaatgggaatgatcatttatgttggccaaagtcagggaagatttttaaaaatcaagtcgaattagattattttctgttttaaagaaatgttacctataccacccactgggagaaaagtttgctaaaataaacaggaaagagagaaaagagagaagcccatgaaagaaaatgtttggcaacgtgataagaggaaaagcaagcaggaaataagaacataagtttctgattttcatgaaatgttccgagtaaagtgacacttacctatgtgtgtaaatatgcatatacatatacaaatctcaaactaaagagtgtacatatttgcattttaacctaaaatcaaatttttctaattggaaaataatataaagatattgtctccagtagaatgctgggaatattaagggttgaaagtatgaagataagtagtcataaggatgtttagagattaacctgccatgtcccacaaggctggtaaatcaatgttatcaggagaaagaaactgttaaattcacatcagcgtcttaggtcagcctaagcaaataggttatatgacatgcaacttacccttctcctctttttttctcccccatcaaaagccaatttcctattctgagaaaataattcaccttctccagtgattctgcctcagaatgtccagcaaactgaacaaggctgagctccagacattggttttgattctgggcagcagaaatttccctatgggagaagatgccagcatgacttttcctagtgtgcaatgagcagcgaccagctctgtctacctccttagggatagcccctgataggaatgctggggttgagcaagaggaagagtgagtgattagaagaaagaaggcaggaaccaagtttcttttcctcctgccttgagtgcaaggtttagttccttttctaacagctcttggcaattccattataaatcaggtgaaagaattagtctgatttttgtttgtttgtagggcctagcatgtcatagaaagccactaaattctaatcagcaatatctggacagtaagggagattgtgaacttagttttcttacaggacataggtattataattattattgtggtaaaaatttcctcctagcaggaagataatttttttgtgtgctttgggaatcacccaaaagttttccactgcaaaaatcaatggaataaggaactgatattttctaaaccttcagtaagtggctaaatctatcaggcttatctattcatccccatagtgagaattccttgcaatatgtgtttgtggcattcttatagataccacagtcagaaaaaaaggggatggattaaaataagcagaaaaatttgctacattctgtgctaactttaaccccatataaatgctgtcttataagtagatctattaaatagggccatccatagccacagcctttcatattttaagtaaatatcacaacataatattttcatcagaaaacttgtctccaatttctagagccttttgttactcctggcactatcttagtaggactttagtgtgccagatatgagcctgctagatttaagtcaaataatgatttattcttatgccctcttctcaactgtgttgatcaaattcataaaacaaatgttagccttaaattccttacttcacttccttgtcttcacttcctctgggacatagtcttgtcttgtctagtctagtcttatgctgcagccttgacaacttgccaagataaaaagttgagagttacgatagtagaaagaagagctacagagaataaacagaatgagaaagtataaaatatgattaaatggagttccagaaagaggagagaggtgaatgaggcagaaacaatatatgaagagataatggatgaacagtttttaaaaaatggatgaaagacatcaattcacaattcaagaagacaaaaacattcctgggcaatttatataaaaagaagtgtagtgtgtgtgcatgcatgcgtgcatgtgtgtgtgtgtgtgttcagagtaaaacagcagaaaatcttaaatcaagaagaaaatcttaaaaatcaaaggggagggtgaaaaagactgttttcaaagaagtaaactgacagctgacttctcaaaaataacaatggaaaccaactgagatttgaattatttttcaatgttcagagagaaaataactaacatcaaattttgtataaagcagagcaattcttaaaataagaaataaaagcatttaaagaaaatctgcagaatttaacggtatattttctctaaaggaaactccacaagtagatggaaaggatgagggcctggattatactgcacctgccacctgtgtggttgtgctcaaagaacagaacctctttgggatggtttctaaatttcaaaataaagatgaggtattctcagctagtctcactgtattttattaattgaaacaccatatgtgaaacagaagactctaatgcaaacgtaaagagatttgttactaaaaccttaggccaagctttggatgttcttaaaagggcaatggcaggaatgagaatggggaaaatgatctatcctcagtgagttgtaggacttagagaaagcctcaagggctgtcatgtgttttatcatgtcctgagaaacaggtttacaaatattagcacctccttactgtgctggataattctattcggtttcctccagcagtttgtgataccccctatgtgtagagtgggtatgtagggggcaaacaaaggactcatctgttcttgctgccggcaagctgtagccacatccagttggctctcacctcccaaatagcttcaaagagaagcaaatcatattcaacagtttttgtggcagaactcatcctgcagaatttttaaaaaacttgttttatcttatggcctttgataaaagttctgaacccagggccagttgtagcagaatatggacatatgaaaaatctgcctttagtctcttgccattccttcaccattgcctcccacctattctactgctcctgctttttacccagcccctagtagtattctatgatgttttaatactgttagcctgcccaaagcctgatatttctagtcactgaattgctcttcagaatcttctcctacactattgagtagatatatatctctctccactcaatctctaaaataaagtggtttatagcctaacttactctcaatgtaatgttctaggttaggtctccctggactgtttgtatttgaaaaagagatgtagaggagattccaagaaagtctcctcaaagatacattctcagttacggtggcagttggatagaaaagatgtttttattgtaaaatactctttcccacacttctcagccatagtgtaggctgccagtgtttggtcagttcccatcagcaggaacacaggcaacatactgttagcaattttttttttttttttttttttttttgagaaggagtctcgctctgtcgccaggctggagtgcagtggtgccatctcagctcactgcaatctctgcctcctgggttcaagccattctcctgcatcagcctcctgagtagctgagattacaggcatgtgccaccacacccagctaatttttgtatttttagtagagacagggtttcaccatattggccaggatggtctcgatctctttgtcagcagtttttaaaacatatgtttttattccaattattttagaaagataacataattcagaggaaaaaattaaagattctattgcttgaaaatacatagaacaatattctatttaactacaccttgtctatgtttagatacacaaagactcaccattgttacaattacctagagtattcagtacaataacatcctgtgcaggtttgtagcccatagcctatcgtgtagcaggctataccatctagaccagtacgctcttataatgtttgcacaatggcaaaattgcctaatgatggatttctcagaacgcctgtagttgagcaaggcatgactatatcagtaaaacttctacatgaaagaataggcaggggaactagtttgtctaagaaaacatatgaaaatttaactgtttcagaggcagcacagtcaaaaaagtaaaggtttgtaatcttagatatcactcaaatactagtcctcctacttccaaaccagataaccttgggcatgtgactgaatctttctgaacttagattcatctgaaaaatgaataccatctatttcctagagtggtaaagagtcccatatgctacgggacttaggattgcttaggattgctaaggatagctttggctattcaagctcttttttggtcccatgttaattttagaattgttttttcaaattctgtaaaaatgaagttggagatatatgagataaacaatacacattacctgccacatattaactaatatatataacaaacattatgtaaatgacaaagagtactaggtactcccaggaccttttatgatcctcagaatatttttttgaggtaggtattattatcttgcttttattgatgagtaaactgattttcagagaagttaagtaacttgttcaaagtcatgcaattaagaagtggcagagatgtggtagtttttgtgatagaattcttttcctttccctgcctgttgaacggtctgcatttagacatttctttaaattattttcagtttctttcccttcgtccccacaaagagcactaaaggtcatggtaaggtaggatcatttgaatcatgttatgatcttcctaacatgaatgactcctggcttttccagttaacaggtagtggtccattatgctgtggttatattttctgcatgtatgatgatataacgtaactggccaggcacagtggctcatgcctataatcccagcacttttggaggctgaggcaggcagatcacctgaggtctggagttcaagaccagcctgaacaacatggagaaatgccatctctcctaaaaatacaaaattagctgggtgtggtggcacatgcctgtaatcccagctacttaggaggctgaggcaggagaattacttgaacccagcaggtggaggttgtgctgagccaagatcataccatttcactccagcctgggcaacaagagcaaaactctgtctcaaaaaaaaaaaaaagaaagaaagtaaccaaaagactgtcacttacttgccccatgacccctgttacatagcctttgaacctcagtttgtcatagaaaaatgaagaaaatagtctctcccatcctattgctttttactgtattaaatgtaaatgtatatggttctttaaatgttatgtattattcagatttattacaataattgttatgtaaatgacatctatctgataatagaatgaggtctggagttcaagaccagcttgaccaacacggagaaatgccatctctactaaaaatacaaaattagctgggtgtggtggtgcatgcctgtaatcccagctacttgggaggctgaggaaggagaatcacttgaacccaggaggtggaggttgtagtgagccgagattgcaccatttcactcctgcctgggcaacaagagcaaaactctgtctcaaaaaaaaaaaaaaagaaagtaaccaaaagactgtcacttatttgccccatgacccctgttacatagcctttgaacctcagtttctcatagaaaaatgaagaatatagtatcttccatcctattgctttttactgtattaaatgttaatgtatatggttctttaaatgttatatattgtttacatttattacaataattgttatgtaaatgacatctatctgataatagacacagcatattactctattaactgcatatacagtaaaaacacagtatagaagattttaagataatctgtgtctatttttgtatcagtgacatgctgtttgggttactatagccttgtagtatagtttggagtcaggtaatgtgatggctttgttctttttgcttatgattgctttggctatttgtgctttttttgtcccatattaattttagaattgtttttttcaaattctgtaaaaatgatgctggtaatttgataggaattacattgtatctgtatattgctttgggtagtaattttaattatattgattgttccaatcagtgagcatgaaacatttttttatttgttgtatcatctatgattcctttcatcagttctttgtagttctccttgtagacatctttcatctctttggttaaaatgtattttctaagtattttattatttgtatgtgtgtatatcataaatggaattgagttcttgatttttttccttagcttggttgttattggtgtatagaaatgctactaatttttgtatgttgattttgtatcctgaaagtttactgaagtcatttatcaagtctaggcatctttcagaagactgtttagggtttcctagatataagatcatgtcatcagtgaatagagataattttagtttctcttttttaatttggatgccttttacttctttctcttgcttgattgctctgcctaggacttctggcactatgttgaatagaagtggtgagagtgggacatccttgtcttgttcctgttcttagagggaatgctttcaaattttcctcattgggtatgttgtcatggatgacccttatttgtcatagttttttttattattttgaggtatgttcctttgatgcctagtttgttgagggtttctatcataaaaggatgttgggttttattgaatgctttttctgtatctattgagatgatcacatggtctttgtttttaattctgtttacatggtgaatcacatttattgatttgcatattttgaacgtagaccaatggaacaaaatagagaacccagaaataaaaccatatacctacaaccaactgatctttgacaaagtcaacaaaaatacacaatgaggaaaggacatccaattcaataaatggtgctggaaaaactggatagccatacacagaagaataaaactgaatgcatatctctcaccatattcaaaaattaagtccagataaaataaagacttacatggaagacctgaaactacaaaaatcctggaagaaaaactaggaaaaactcttctagacattgaactaggcaaaaaaatttatgacaagatctcaaaagcaaatgcaacagaagcaaaaatagacaagcagtacttaattaaactaaatagcttctatactgcaaaagaaataatcaacagcgtaaatagacaacctacaggatgagagaaaatgttttcaaactatcaaccaacaaaggactaatatcctgaatctataaaaaaactcagacaactcaacaagaaaaaaacaaccccattaaaaaatgggcaagggacatgaacagatatttctcataagaagacatacaagcaaccagcaaacatgtgagaaaatgctcaacatcactaatcatcagagaaatgtacatcaaaaccacaatgagataccttctcacaccagtaaaaatggctattattaaaaagtcaaaacacaaacagatgttggcaagaatataggaaaaaaaagaatgcttatacactcttggtgggaatgtaaattagtacatctatggaaaacaatatggagatttctcaagggattacaaatagaactactattcgacccagcaacaccactgctacccaaaggactacaaatagagctaccattcaacccagcaacagcactactacccaaaggaaacaaaattgttatgtcagaaagacacctgctcttgtgtatttatcacagcactatttacaatagtaaagtcatgaaatcaacctaagtgtccatcaatgtattattgtataaagaaaatgtggtatatatacactgtggactactacacagccataaaaaagaataaaaccatatcttttgcagcaacatggatttagcttgaggccattatcctaagtggaatcactcagaaacagaaaataacgtactgcatggtctcacttataactgggagctaaacaatgggcactcatgggcatatagagggaaataatagacagtggagattccaaaagggggaatgatgggagggttgaaaaattacctattcagtacaatgttcaccattcgggtgatgggtacactagaagcccagacctcaccattatgcaatatatccatataacaaacctgcacacaaatgacctgcatcgtagtaacagtaataataaatatcaaaattatatgcttgtctagggcacttacaatgaatggggcttgcaggactggaaggtgctctgtgtaattcagcaagtgagtaagaggtcagtgaatgtaaaagcctaggacaatattatacactgctgtagactttataaacactatatacttaggctacagtaaatttgtttaacaataatttcattttctcaagaataagttaaccttaccttactgtagctttttttactttataaacttttaatttttttaactttttgtctctttcataatagcttgaaacacaaacacattgtatagctatacaaaacaattttcttttttatatccttatttatatccttttttatatccttattcttttttaatttttttttctattatttaaacttctgtactaaaaactaagacacaaacacacatattagcctaggcctacacagagtcaggatcatcagtattgatgtcttccacctgcacatcttgtcccactggaaggtcttcaggggcaataacatgcatcagctgtcatcttctatgatagcaatgtctttttctggaatacctcctgaaggacctacctgaggctgttttacagttcagttctttataagtagaaggaatatactctaaaataactattaaaagtatagtatggtaaacacacaaacaggtattaccgtttattactatcatcaagtactatgaactgcacataattgtatgtactatacttttatatgattagcagtgcagtaggtttgtttacaccaacaacaccacaaacatgtgagtaatgcatttgtgctacgattttacaatggctataatgtcactaggtgatagcaatttttcagctccattataatattatgggagcactgtcataaattgttgatggaaataccattatatggtgcgtgactgtataataaaacctgttccagtttgaaccattggccagagacaccaacagacacaatgtaatcaagatgtagaccccaatgtcagccttctagacacaaatgaaacaacacccaacttagctcaagaacactttctaaaagcaggaggctccagttccccaatctgtgggaacaaggagaaccacagtaagtgaagaggaaaatcattatctctgaacttgtcagaagaaaaatcccatcaaggaatgcttttgagaacttgaattctagggaagcccactggaggccacagccactacagaaatatagaggccacagcttcctgacatgcggtgaggccacatctccactcacttcctgtcagtaggtgtcacttgaacaaattttctcatgtcctggccagtcacctggagcctggaggcatgtcttactttgcatacacctctgtcaaaatgcgtatcagacaattatgttataaattgaatgtcttaggtgttacagagtaggtgttgtggaatgaatatttgtgtatcctccaaagcgcactctctctttctctcacacacacacacatacataccccaaggaaaggccatgtgatatcttgattttaaacttccagcctccagaactgtgagataacaaatttctcttcgttaagccactcagtgagtggtatattgttatggcagcccaagtagactaatacattaggttattctgctactgacccaccttactgagctagacctactttggtccccacatgtctccccagggacactgtacgaagcctggagctatgtcagtttttctgtactcaaaagtagtgccctcctatatttacctcttgtttgttttattggagttcctggcaggtatctcccttctctttgaactgtaaatagaaataatccttctttttgaagtaggattttctttctgaacaagcttataatttcctaccattgatcttcttgcatggcaatttcaattaaaaaatcatttgaataattatgttagaatacacagcaactatatttcttaggttagtgtagtttgcaaacaaaaggcatatatgttttcctagtaaccgcaatgtgtgtgtgtgtgtgtgtgtgtgtgtgtgtgttttaatttccctacaaatcactgctaacagccaaggaaagcgaggctatattctggaaggcctgggagatatagtcccctgtatgtgtatgaaatctgtttggaatctcatgtactatatttaaaattcatttgttactttctattatgtaatatattctcatttgtttcaacatacaaaaaatactttaaatcgattatttaaatgtatgtcatgttcatcccagagcttaatgtcacccttcatacattcatacactactacttggcttattcttcttgaggagagagaaatgtattgccagtattctcaataggtacactttcaaggctgagacagcagggctcatgaagaactggaacaatataaaccattgccgagactgcaacagcaaccatgatgatctcaaggaggcgacagatctaatggtaatgggaaaacacacccttgaggaatcagtgagcccctgcagctccctgtcatctctgtgcctcccacattccattaagagaatatagaaggaatgcatttttcatctgaattaaggtgttttgctttctgtttattgtttctttattttccaaaaatatgtttttcaataaaatctggcagtgattaaaaagaaaaaaagcaacataagattgtatttttatttggtggaaagcagcaattcattttaggtaacatgccaccacataacaggaatagagaaggtaagaaaggtaaatatacatacagaagtaagtcatgggcaaacctaaacaactaagaaaaaattagcaatgaaattaaaaggagaaaaatgcccagggaggcagaaatagattttcctgctctcctacgtctaaagagcacaatgagatacaaaacacaaatgccagtagatggcagaagctatttacctaaatcaggattgaggctatgaggcatagcttagacactcagtccagatcctaggcatttgaaactccaagttgcagaatcaattttgatcttaaaaaccaaacttcttcaaaattcccttctgtaaaagtgaggtttgctactattcaaagttttatttgcttcttaaagaatagccagaatgttcctaccactgtgttgataagcaaaggtaacattgcctctatcaggggctttttctcttttatttaagtctctgccttttatgtcaagggattcttttaatgtctaatgatcctgggatgctcattcatacttagtaggatacaaatctgagattcaagcaaagaaaaatggctccagttcctgtttttaaatacttcttcacttcactctcaactaagcctgatagcccagaatttcatgttatttattcaatatcttcagaaaaatagtcttttttccacaaaagtggttggaaaggagtggacacctgactattccaggtcaaatgggaaatctgagagtataactgcaatttattcaattttactttgcattttctctataaagtctcctacccctaccctctctctgattttctgaggtaccaggtatcctactcactaagacttctggtgcacctgaatttttgttggcatttgcttctgtgggaccttagaatttgcctttcttcagttcatttaagtcagttaccacttgttcattcacctgcattttccaaaacatctcacatgctgttatcctttgcctgttctatgtgtcctttggggttcataacttttaaaaacatttttactctcatttcaccaggtactcagaaaggaatagagaagtatgtttccaattcaccatacttaattatcagtctagccttcactgatatttcagagcaattataaggtgcccaggggcagagtttccatctgtcttgttcatgtctccatatttctctaatatatagtgaatactcattaagtgtgttcatcaagtgaaacggagaaatagaagaaactgaaaaagtggcatgaaaggacaaaaatttagcatttcaccatatgggggcagtgtctctattcatagctaaccttcaaggttagctcaaaaccctgggaaaacatctggtaagagatccgattggctgatatctggaacagagatttaaatttcgtggtagtgtttttagtgtcactctaagcccaagagagtttcttgaagcaaaaaaaaaaaaaaaaaaacccattcaggaaataattctttgctgataaggatgctccttgaacatttattaataatcttgtggatgcagctgacatgtgagtcttgagagtttctgactcttccatagcgaattctaaagggaaggaaattctgtgagggcaggaggtgaggctttatcagagactatgaaaagaggaaaacagaaggaaaaaagctagagaaggagggaggaaaggaaagacacagatgcaaggctgggaagtttggtgatatagtgtccaacacagctctgaaaaaggtgatctaaagataaccttaaccaccttcttttctctttctaaacaggggtcagtggtcaacagctgaatcagagtcctcaatctatgtttatccaggaaggagaagatgtctccatgaactgcacttcttcaagcatatttaacacctggctatggtacaagcaggaacctggggaaggtcctgtcctcttgatagccttatataaggctggtgaattgacctcaaatggaagactgactgctcagtttggtataaccagaaaggacagcttcctgaatatctcagcatccatacctagtgatgtaggcatctacttctgtgctgggcagcacagtgctccccaaacacctgcagcctgtactcaaacttgcagctggaactctagtctctatgctgccttcagctcttagtcctcttggcatgaaatgtgattatgcatgccacctttgccactgccattctgtcaccacaaactctcctttatccaaggatttgtcctccaaagattgtgctctttgcttgatgaacttgcccctctcaattcatttttagtcgtatgtaatagattttcttagttatttctgccacgatatgaggagaattgatcaacacacagttacagtagaagattttaataagtatctcttttaaaatggatgatatcaataaagtaaaaatgagagtccagaaataaatccataaatctatagccaatttattccaacaagatcattcaatgggaaaagaatagtcttttcgacaagtggtgctgggaccactggatagccacagttggatctctacttcacatatgtacaaaagttaactcaaatggattaaagacctaaatgtaagatctagaagtacaaacacttagatgaaaacatagttgtaaatcttggccaccttggactatgcaacaatctcttatatacaacatcaaaaaaagcaactgaagggaaaatagataaattgggcattatcagaatttaaatctttgtgcatcaaaattcgcaaaatattccacaaaggaaaatgaaaagataacccacataatagaagaatatatttgcaagtcatgtttatctgataaggatctaatatcaagaatatatattttaaactcttacaatttaacactaagacaaatgccaattttaaaacggtcaaatgatttaaaccatcattgctccaaagaagacacacaaatggccaaaaagcatgaaaaaaaagatgctcaacattattattcattgggaaaatgcaaattaaaccacaatgagctgccacatcacacccactaggatgttcataatttttcaaaaaggaagaataagaaagagaaatgtaaaattctaagtgttggtaaggacgtggggaaattggaatcctcatccaccactggtaggaatgtaaaatagtacagacacattagaaaatagtttggcaatttctcaaatgactaaacacagagttaccatttgacccagcaataatagtcctaaatatctacttaagaggtcgaacatgtgatttatttcattggccagaaccacatcatatggccagtactaattgcaagggaggtagagaaagggagcatttaatttgtctagcctctaaaaaagacatgagcatgaaagatgtcaattgcagataaaagtgttggtttaactatccaaaaacatctgccacatcatactaggtcctcattccccagaagagactctgatgatacatcttgatattcttattactgttattaccctaacagcatgtgccaaaggaagctgaagtctgttaagagctctacagagctcttcaaatgtagtattgtttttgctccaaaaaatatactgtaggttttcttccttgcaactgtcctgtgggaaatcaatatctctcaagaggcatcagctgatgtttcagaggaatgatggtccactgcccctgatactgatatgcgcagttccaggcagttcttaaagctagtcgctttaacgcctcacagagatcatcatgttcttaaacatcgatacggaattcacttccgtctccctgagaagcagtcccttgaagacccagcacaatatttccgtgggtcccacatgtgcatatgacataaccctcaaaatcctagggatgttttaattgaggtaatacttttacagctatttataggatctctagcacaattcttttctcaggaacttaaaaaatgggtattagctaaccatgagtaaccatgtttccttctcccttccccattcccattcagctgtatgtaggcaaatctaccatcccaactttctcgatgttgaagctatgatttattttatagcaggctttctattttattttatttttaaacttttattttaggttcaggagtacatatgcaagtttgttatgtaggtaacctgcatgccacgggggtttggtgtacggattatttcatcacccaggtaataagcatattacctgacatgtttttcaatactcaccttcctcccacccttcatcctcaagaaagcctgggtgtctgttgttcccttcttcgtgtccatgtgtactcaatgtttagctcccacatagaagtgagaacatgtgatatttggttttctttcccgtgttaatttgtttagaataatggccttcagctccatccatgttgctgcaaaggatgtgatctcattctttcttatggctgtgtagcattccatggtgtatatgtatcacattttctttatccagtctaccattgttgggcatttaggttgactccatgtcttcgttagtgtgaatagtgctgtgatgaacataggtgtgcatatgtctttatggtagaaaaatttatattcctttaggtatatacccaacaatgagattgctgggtcaaataataattctatagaaggctttttaaagtgtgggctagtattgaaggtaaagattgccttattcagttctgtatgctcctctgttcctggcacaaagaagacagtcaattaaaaatgtttacatgagaggccgggcacagtggctcatgcctgtaatcccagcactttgggaggccgaggcgggcagatcacaaggtcaggagttcaagaccatcctggccaacatggtgaaaccccgtctctactaaaaatataaaaaaaaaattagctgggagtgatgatgcgcacctatagtcccagctacttgggagactgaggcaggagaatcacttgaatccaggaggcagaggttgcagtgagccgagatcacaccactgcactccagcctggtgacagagcaagactctgtctcaaaaaaaaaaaaagttacatcattaaggggcaagatgctaattaattctcatatctgtgcctctgtgccacccagaaatgcagaaggaagcttataaacaaaaaacagtgggttaaattatctgaccttcatggggacagtacaaactatattcataagcagtaatagaacatggcattatttactttattgtggtgttgtcacatcatcagtctcttacttcatgtttctgggttttgtttcttgcttaagatctagagaattaggccactttatcattgtcacaaaaaaagtagtcttggaaaccaagcgatccatcacttcctctcaactgggcaattcagcttttctggaatgcaaatatgtttgtcttcaccttgagatttgaactttctaattagtaattctttttcttagtgatcataaagatcaagcaagaaagtactagtcttcctagacttgaacactacctacatacattatatgtattttactaaaaatagacattcctagacgatgacaagaaaactatgtaataacatttatggaatggaatgcaaccaaagctatactccaagtatactagcgaaggccaaactattctaacaaatatatgccaaacgttcagaggcttaatgaacaaagtttgtctttcttgtgaaaatctggagcagatattccaggtcagcagatgactctgccttacatgatctttgaggaactgaggttattctcatttggggactctgctatttctcagagacttaccatcatatgcagggtcatggcctggctatgccaggtttcacttagcaaggagatgaacgagtgggtatggagcaggcatgaccattcccttaagaatcatggacaagaaataatagaattactgactcctaagattatggacagctttgggtagcctgtccttcaatggtaagacaattttagaagtatctaccatctttcataaaacgtgtggacactagttttcagctattctgcaccagctcacaagatggcggtgttctattttgaatgacttccatgggtgattgagtgggagggatttgaatttaaatagaaccaaatgacactttttttaatggttggctgaattgccaaattgctatttccctttttctgagtgtgtgtctgtgtccgtgtgtgtgcatgtgtgtgtgcacgcacgcgcacacaggcagacgctaggggtagagtgtgatggttcaaaaagaaaaggaaacgcttaaaggtagtgaatcacgttttgcccaggaaaacacacttgataactgaaggatgatgaagtgtccacaggctttactagctatcttttggcttctactgagctgtaagtagggttactacaaagggtcaggggcaaccaggaaacctgaggattgatcctcagaacactaaaagggtaaagtagacttcgttctgacttattgtctgggagccctgtggttccaacggtgaataattatcacatttttctacacaggggtgagcagtgaagacaaggtggtacaaagccctctatctctggttgtccacgagggagacaccgtaactctcaattgcagttatgaagtgactaactttcgaagcctactatggtacaagcaggaaaagaaagctcccacatttctatttatgctaacttcaagtggaattgaaaagaagtcaggaagactaagtagcatattagataagaaagaactttccagcatcctgaacatcacagccacccagaccggagactcggccatctacctctgtgctgtggaggcacagtgctccctagtcacctgcagcctgtactcaaattctacagctgaggctctgcaactgtaagatggggaacttgctacattgagcaagccctcaaaaataaactatacggaaaagcagttattggtcaaaatccttgtgcctatgttgacaattacttttgcagtttactgaatcctaactcagagtcatatcgctgcattcactactttctctgtgagttttctatgggattcagcatagctaatatttctagagggtcactcaggatactaactccattgccacaccattatgctctgtggtagaaagcaagcccttttatcaggattgtacaggcaactgatatgtgcactacacattagggaatctacctaacagctatggatgttttagcttctttcccaggacaggcacatttataggtaaagttctgcctataacatttttttctggacctactagcaaagaacaaagggtaggaacaagcaggtatcattacctgattaaaacaaaaggttttcattctcagttgcattattcttacttactatcttcattttaggattgttgcctatgctaggtacttcattaaagtggtgatagaatttttcaagatattacacattaatttgtgtacttagaaccttaagcagcctacgaaaagaaaggagttagttgaagtaagttatgtgaagctaacataaacttagcctacttatgttgtgatacactctttcaatgaattatgtaatcatatgtatggtatttacaaagagcttgcaatggaagctaccatttattgaaagcaagtattatgtaccttgtattttgcaaatatcatctcattgaattctcaaaatcactttgataaatcatcaatattactttctgttaacatattaggaaatgcagactcagaaagattaagcccccttccccacctcctaccccagacaaataactataacagaatctgaaatcaggtctatgactccaaactatactttgtctattacatgccctgatgttaaacatcactgaggagaaaatttacccacagtgtgaccacaattatgtgtaaaaaatgtacacaaaatacgaaaataatgtgttcaacatgtaaataaaataacatttgcaataatatgtgaataaaataactccaaaagtttgcaacagtattagttatctttgaatactgaacttaatactgttcattgttttactcctttataatattctttatttttcaaattatctactatgaactcaatactattattatttcagaaagaaaaatatacattttaaaataccaaaatccaagtaggctgaactgcattatatgataattatctgacactcacagtagcttaattacaatgaggaatagacatgactatacatagccaaatgatacagcattaaaacaagatttttgattgctagctcttcaaatcactgtagactagtgctctcttcaattgggaatgttttaaaattacaagaagacctatttctcctgagaatttatttgaatgactgtcctatgggtagaatgctttaatatcccatctctgtgtaggagaggacaggcagtaaaggccacccgtgcttgtgagttcattagacaattcattgcaaattgggcatggtttaggtttcactgtctgggaaatggggagatagcctgagaaaagggcaggtaaacattcaaagaggaggggaagaaacagtataaaaattaatagaatgtatcctgccatttttagcctgcacagtcttctgtccattttcctttctcctttctatctacatcaaaacccagaaatcacacagtggatataagaggaaactctgacagtcatttatttaagactgaaaaatagagcgggaaaccctatgcaagatgcccagtgtgtctggctctgcggtgtgaagagtttatgatttagaagccagagatttagctgtctttgatgggaatgtgcagttggaagggggaagtttcttttttcactctttattgtttcctatcctaatgagaaccaaacaatttacatctcaaaagatcaacctgtcaccaaaataacatgtcttttaatgctaagactaaatatccatttgttataaaagaaaaaacaaattaaaaaaatttataacctcaacctacagacattaccactattaactatttagcattttgctttccatttcacctgtatcaatgaacatgaaaaaataagtctgtagagatgtggggaattcaacttatttcaaacaaagagtgtttctcaaagtcactgcaaaaataggtgtttctgttccttaaaaaaatctacatggttaagatcctcccacttttgacctgtgagttgtgataaaaagcttccagaaaactcatctcagtgacttgattatgaaatgctaccagtttgaagcagtcactgaaaaacataaggtcataaatcaggaatccagaagaaacaatgaatagcaactttatcttcacttcacttctaacactggctctccaaggtaacagccctatcctgtacccagagtggcccttctggagaaggtggctggtttgacctatgactgttgagtgttttacattacagggtctgggagagcagactggatcaagccccaggagacagaagtatctggaacagaagggaagactgtgaacctactttgtaactatggtacatcatcggggagctatcttgatctctgctggttttgacagtatccgagccaggcatcagaatacattctctacagagggtggggatattctggaaaaggagatgccagttttgccataggaaagtttattcaaagagtacagcaaatgcaataaatgtgtacattagaaatctggttcctgcagacactgccttatattactgagatgcacaaaaagaacactttctaggggtgtcatacaaaaacaccagcgcacaggaggaaggagagcatttgttataaccacactgatttttttttttttttttgcaaaggcgtcattgtaagtggaagacactggatcaggagaattctgctttaataatagctatatatagtaatttgtaggcaaatagcttgagcttttagagtttccatttcctgaaattagatagcaattctaatttgtaagcttttatgagacatggttttaacacttggattaagtgcctagcatgtcctacatgctcagcaaatggcaaatatcttttcttgctctccctctctgtctaactactttgacctcaaaggacccttctttcactatctgagaatcttctatatactcctactggtaaaataacaacaacaataacaataataataataataaccctaaaaacatacatgcaagacctagatagagaaggcttctttgcccagggatcaatggtcattgtgccaggattttaaaagtgtatgctcagcaaatccaacaatcagaggacaaaaggaccccgagacactagctcctgagttcatagaccagggcagttgggcatttatcgtgatctgaacaagaacaggagagagttcctcacaagactaaagagaagagaaagacatttagcattaggtgggtggtgggagagaagagagaaattcttgggaagactacagccatgttctggtgtcagatctgacctccctagatggagaagagaggccaagtgaggcagtgggtcctcagcccacctggtagaggaagagggcacctgccacttcctgcactggttcaaactacactcctaacagaatcctatcatttaatctggatgtgagcaaagcctagcatctttgtttggactggtgatagatgaaaggtaaaagaggaaggaagatttaatttagagccttattcaatagtctgcagcagcactagcaccttactgcttgcaggccggaaacctcaaggtctagcagttcacagtgaagcctgcaccacactggctgctgagtaactgccccagtcactaggagggcttggaaatcagacagcaaatgacaccttaaaaaatatgtataaggccattcttgcactgttataaagaaatacctgagactgtgtaatttataaagaaaagaggtttaattggctcatggttctgcaggttttacaggaagcatggtgctggcatctggttggcttctcagaaggccccaggaagcttataatcatggtggaaggcaaagggggagcaggcatgtcacatggccagagcaggagcaaatgagagagagtgagggggaagatgcaacacactttatttaaaccagatcttgtgagaactcactcactaaagcaaagacagcaccaagccataagggatcccacctccatgatacaaacacctccccccaggccccacctctagcactgaggaatacaattcaacatgatttggatggggacaaatatccaaactatatcattccactcttgatccctcctaagtctcatctccttctcacattgcaaaacacaatcataccttcccaatagtcctccaaagttttaacaaattccagaattaactcaaaagtcccaagtctcatctgagacaagtcaagcttttccaccaatgagtctgtaaagtcaaaaacaagttatttactcccaagatataatgtgagtatacacattgggtgaacattcccatttcgaaagggagaaattggccaaaagaaggggccacaggtctcatacaagttcaaaacccagcaaggcagccattaaatcttaaagctccaagataatctccttagactccatgtctcacatccaggacacactggttcaagaggtgggctcccaaggcgttgggcaactccacctctgtggctttgcagggtgccacccccacagcttctctcataggttgttgagtgtctggcttttccagacacagggtgcaagctgccagtggatgtactattctgggatctggaagatggtgacccctttcccacagctctactaggcagtgcttcagtgaggattctgtgtggggcctccaactcctatttcccctccacactgccctagtagaggttatttgtgggggctctccccatgcagcagtcttctgccttggcacccaggctttctcatacatcctttgaatctaggtggaggctgccaagcctctttcactcttacattgtgtgtgcctgcaggcttaacaccacatggaagctgcccagagttatggcttgcaccctccaaagtggcagcctgagatgtacctcggcccctttgggtcatagccagagtggccaggatgtggggagcagtgtcttgaggctgtgcagggcagcagagtcctggacctggcccctgaaaccattctctcctcctaggcctcaaggcctgtgatgggaggggctgctgcaaacatctctgaaatgcctttgaagccttttccccattgtcttggctatctggctgtcttttagttatgcaaatatctctggcaagcagttgctttgaggcttgcttgaattcctttcctgaaaaatctttttctttctctcccacatggctaggctacaaattttccaaacttttacactctgctttttaaaatacaagttctagctttaagccatttctttgctactgcatctgagcataggttattagaagcagccaggtcacctcttgaatgcttcactgcttagaaattgcttccaccagatatactaaattatcactctgaagttcaaacttccacaaatccctagggcaggggcacaatgcagccaagtttgttgctaaggaatagcatgggtgacattcactccaattgccaataagttcctcatttccatctgaaatttcatcagcctggccttcattgcccatatcactatcagcattttggtcacaatcatttaaccagtctctaagaggttccaaattttcgctcatcttcctgtcttctgagccctccaaatttctcagacctctgcctgttacctggttccaaagctgcttccacattttcaggtatctttatagtaatgccccacttctcagtaccaatttgctttattaggcctttcatgcaccactataaagaaatacctgaaacttggtaatttattaaaaaaaaaggtttaattggcttatggctcttcaggctttacaggaagcatggtgctggcatctggggaggcctaaggaagctttcaatcatgacagaaggcaaaaggggagcaggcatgtcacatggccagaacagacacaagacagagagagtgagggggaggagccacacacttttaaatgactagatcttgtgagaactcactcactattgcaaagacagcaccaagtcatgagggatctgccctcatgatccacatatttccccccaggccccacctccaccattggggattataattcaacataagatgtgggttgggacaaatatgcaaataatatcacaataatttcttttataaaaaagtgaaaaatacttttattagagaataattttcaaagatctgtttaaaactaacttttaaaaacaatgaactatgggaaacattcactaatgcataaaataaaatatgtaatctttttcattttcagtttgtgcaaagttattttcacaccctgctggtagcaacacaatatattggtacaatcttttacacagtgaattacttggaaagggattttgagattcattaaacagttcatgcctttgaactgtttgaaactgaatgaacacctttgatccatttctcagaatttatattaaagattgattttaagtagaaaaaaccctctaggcaagaaaatagtaaaaatttctcaaccagttagaggaatttggatggcaacttgactgaatactttacaactatttaatgagttaataatactaaaaacatagtaatgctcttgacatacagttagagaaaacatagagttcctataataaccatatgctcacactaatatcgaatgaatgaagcacatagataaaaactggaagttttgatgcaaaactgaaagtatgaaattatttagtgtatgtacttgcaatattttaatttttattttttcatggaataactgtgaacttgtgcctacaataaataacattttaaaaattctcttgactccaaatgttgtagctagtggaaaaacaaacaaacaaggatctcaaccccagctctgtgcctcagctgtttctcctttcttcaactctggggcatcaattttctggttcccttcccttaactaagtcctcttcttcattattccccaagacctgctgacagaaactctgctgaaatattatttgtgtctcaaacctatctttgatatgggcaaataaggaaaaaactattttcagttcttttctattttctctgcagtagactcagtagctagaagattgagctgattgtaccaaaaattaagaattcttcattgacatcacatgggaaaaccatctccggttttccaagaaggaagattaggtaaggctatataccttgtcattttttttaagttggaacattaaagataaagcttaagtcctctctgctcatgttttcatctgttctcttttcccagagctaaatgttgctctgggtttgtgaaaggaaattaaatcttgggaccccaaactcattgagccaaagggaaaagttaagctgcgaactgggccatgcaaacctgccttgccctttcagttcctacataagatggctacaagatgaaaagctacatgactccaccatattttgcccacaaggaaattcctagtgagctgcaagatctttaccctatagtgtctctgttaaaatttcaccttggaaggccgggtgcggtggctcatgcctgtaatcccagcactttgggaggccgaggtgggtggatcacgaggtcaggagactgagaccatcctggctaatgtggtgaaaccccatctctactggaaatacaaaaaattagccaggcatgtggtgggcgcctgtagtcccagctactcgggggctgaggcaggagaatggtgtgaacctgggaggcggagcttgcagtgagccaagatcgtgccactgcactccagcctgggcaacagagtgagactctatctcaaaaaaaacaaaaaacaaaaaaaaatttcgccttggcaatgtaaactgatagcttattatctttacaggtgcagtcaacccctgtccaccagacataaatacacatctgattgttcccctgccccattttgcctatgttatcttgtgtaaaaatgcaaattccctgcattttttctctgccccatttatctatgtcatcttatacaaaaaaaaaaaagcagattcactaagccagacaaaggcatgaataactatttttccctacccttctcttacctaaaaattgtatacttctcaatatcccaccctttcccctttaaatctggagccctcaaaatcatcttcggagaaagtcatagacctgtctcctgggcacacatccttaactttggcaaacaaacctaaaatgattgagacttgtctcaccatttttctcaattgacacgtttataatttacattttaaattctttatctttattaatatgcacatataaatgtacatactcatgggaaatataaactatgattttatggcatttttaactaaatgttacatatgatatgtttttctccacaatttcctttcattttactcaacaaaatagacttgaagactagccaggttgatagagatcatctcatttccttttaattcatgtaaagtaaatcattctatcaatatgctatatttaataatactgatagtaataatattatttctccacaaagtagacaactaaggttcagaaagattaatttgccaaggtcacataattagtaagtggcagaatgaaagacaaatcaaatcttctgactttagaaagttcttctgtctttctcatttccaacatgtttagtggcaagagaaaggttttcttcacagaaacctaatatcccaagcaaatttgtatgtaggatttctcttgaaaattacctctcacttggctctgttcttatggctattaggcaataaatactaataataaaaataaaaataacaaaaacccctctctcccatattttggaaatttttcaatgcaacacaatggtcaatgttgttcattttttccctcatttctttgtctccaaccaaagaagcatatctctattttaattactcaacagtggggaatcaaactgattgggatataaacctaggcatttgagctggcaatggctaccctctttgggtcccctccctttgtatgggtgctctgttttcactctatttcactctattaaatcttgcaactgcactcttctggtccatgcttgttatggctcgagctgagctttcgctcaccatccaccactgctgtttgccaccatcgcagacctgctgctgacttccatccctccagatctggcagggtgtctgctgtgctcctgatccagcaaggcgcccattgccactcccaattgggctaaaggcttgccattgttcctgcacagctaagtgtctggcttcatcctaatcgagctgaagagtagtcactgggttccacagttctcttccatgacccatggcttctaatagagctataacactcaccgcatggcccaagattccattccttggaatctgtgagaccaagaaccccaggtcagagaacacgaggcttgccaccatcttggaagtggcctgccgccactttggaagtggcccaccaccatcttgggagctctagaagcaaggacccccggtaacattttggtgaccatgaagggacctccaaagtagtggtaatattggaccactttcactcactattctgtcctatccttccttagaattggaggaaaatactgggcacctgtctgccagttaaaaatggttagcgtggccaccggacttaagattcaggtgtgaggctatctggggaagagctttctaacaacccccaacccttctgggttggggacgttggtctgcctggagccagctcccactttcaactttcttggggaagtggagggctgactagaggcagaaagctctcatccagaactcccagcagtagccggttgagaccatggcgcagccagaagtctctagtcaacagtcgcccatacctcctgggtcccgaccacaactttcttgaaagtgtagccccaaaattctccttacctctgaatctacttcctctgatccctgcctcctaggtactaatggttcagactttcatttcctctagcaagttgtatctccaaagggatctaaggaagctctacactgtgtccttaggcacttaggctataacccagggagtcttatccctggtgtccctcccaatttaggtatacggctctcaacatgggctgttatgtgggacacattccccaccacccttgtcagggccccaagtttgtaatggctaagagagagagacagagagaagacagagagagagagagatggagagagagagagacaaagatggagagagagacaaagagggagtcaaagagaaaaagatagaaatagaaaaagaaaagtgtgccctgttcctttaaaagccagggtaaatttaaaacctgtaattgataattgaaggtcttgtccatgaccctataacactccaatacttttttatttacactttgttgtcagtgtaaataagggcttagcccgaaagcactgaggccactgacaacctgtagctttcctatcaaaaatccttaacccagtaacccacggatgggccaaatgcattcagtcagtaccggcaactgctttgctaaaagcagaaaagtaacttttagaggaaacctcattgtgagcacacctcaccagttcagaattattctaagtcaaaaaagcaaaaaggtagcttactaactcaaaaatcttaaagtatggggctattctgttagaaaagggtaatgtaactccaacctctgataattcccttaacctagcagatttcctaacaggggatttaaatcttaattaccatacaaaggtccgaccagacctaggaagaactcccttcaggacaggatgatagatggttcctcccaagtgactgaggaaaaaaccacaatgggtattcagtaattgataaggagactcttgcggaagcagagttagaaaaattgcccaatagttggtctcctcaaatgtgcgagctgtttgcactcagccaagccttaaagtaattacagaatcaaaagactatctcaatcctgactcaaaaggttacctacaccctctctgaaatgaatttgcataagaactgttgtttatgggaatgcatcttgatggggcagctgggttgttatgaaatactcaggaaactagcccagatctaggactcacccctgagagcaaaggcaatgttgggcatgctggtaaaggaccgctagaatccagcagccaggaccactttctttgtggtcaagaaaggtgggaaaacaggtgcaggactgctacactggtaagcataactaatccgataagcagaggtccatgggtggttacgcaccctggaaaggaataagcattaggactatagaggacactctaggactaatgctcatcggaaaatgactaggggtactggcatccctatgttcttttttcagatgggaaatgttccccccaaggcagaaatgcccctaagatgtattctggagaaatgggaccaatctgaccatcagacactaagaaagaaatgacttatattcttctgcagtaccacctggccacaatatcttcttcaaggggcagaaacctggcctcctgagggaagtataaattataacaccatcttacagctagacctcttttgtagaaaagaaggcaaatggagtgaagtgccatatgtacaaactttcttttcattaagagataactcccaattatgtaaaaagtgtgatttatgccctacaggaagccctcagagtctacctcccgaccccagcaagaccccaactccttctccaactaataaggaccccccttcaacccaaatggtccaaaaggagatagacaaaggggtaaacaatgaaccaaagagtgccaatattacacgattatactcgctccaagcagtgggaggagaatttggcccagccagcgtgcatgtacctttttctctctcagatttaaagcaaattaaaatagacctaggtaaattctcagataaccctgatggctatattgatgttttacaagggttaggacaatcctttgatctgacatggagagatataatgttactgctaaatcagacactaaccccaaatgaaaaaagtgctgccataacagcagcctgagagtttggcgaactctggtatctcagtcaggtcaatgataggatgacaacagatgaaagagaatgattccccacaggccagcaggcagttcccagtgtagaccctcattaggacacagaatcagaacttggagattggtgccacagacatttgctaacttgcgtgctagaaggactaaggaaaactaggaagaagcccatgaattattcaatgatgtcccctataacacagggaaaggaagaaaatcctactgcctttctggagagactaagggaaggattgaggaagcatacctccctgtcacctgactctattaaaggccaactaatcttaaaggataagtttatcactcagtcagctgcagagattaagaaaaaacttcaaaagtatgccttaggcccagagcaaaacttagaaaccctactgaacttggcaacctcagttttttataatagagatcaggaagagcaggggaatgggacaaatgggataaaaaaaaaaaaaaaaggtgactgctttagtcgtggccctcaggcaaatggactttggaggctccagaaaagggaaaagctgagcaaattgaatgcctaacagggcttgcttctagtgtggtctacaaggacactttaaaaaagattgtccaagtagaaacaagctgcccccttgtccatgccccttatgtcaagggaatcactggaaggcccactgccccaggagatgaaggtcctctgagtcagaagccactaaccagataatccagcagcaggactgaggatgcccagggcaagcgccagcccatgccatcaccctcacagagccttgggtatgcttgaccattgagggccaggaggttcactgtctcttggacactggtatggccttctcagtcttactctcctgtcctggacaactgtccttcagatctgtcactatccgaggggtcctaggacagccagtcactagatacttctcccagccactgagttgtgactggggaactttactcttttcacatgcttttctaattatgcgtgaaagccccactcccttgttagggagagacattctagcaaaagcatgggccattatacacctgaacatagcagaaggaacacccatttgttgtcccctgcttgagaaaggaattaatcctgaagtctaagcaacagaaggacaatatagacgagcaaagaatgcccatcctgttcaagttaaactaaaggattccgcctcctttccctaccaaaggcagtacccccttagacccaaggcccaacaaggactccaaaaaactgttaaggacctaaaagcccaaggcctagtaaaaccatgcagtagcccctgcaatactccaactgtaggagtacagaaacccaacggacagtggaggttagtgcaaaatctcaggattatcaatgagactgttgttcctctatacccagctgaacctaacccttatactctgctttcccaaataccagaggaagcagagtggtatatagtcctggaccttaaggatgccttcttctgcatccctgtacatcctgattcccaattcctgtttgcctttgaagatccttcaaactcaacgtctcaactcacctggactgttttacgccaagggttcagggatagcccccatctatttggccaggcattagcccaagatttgagccaattctcatacctggacactcttgtcctttggtatgtggatgatttacttttagccacctgttcagaaaccttgtgccatcaagccacccaagtgctcttaaatttcctcaccacctgtggctacaaggtttccaaaccaaaggctcagctctgctcacagcaggttaaatacttagggctaaaattatccaaaggcttgagggccctcagtgaggaacacatccagcctatactggcttatcctcttcccaaaaccctaaagcaactaagagggttccttggcataacaggtttctaccgaatgtggattcccaggtacagcaaaataggcagatcattatatacactaattaaagaaactcagaaagccaatacccatttagtaagatggacacctgaagcagaagcagctttccaggccctaaagagggccctaacccaagccccagtgttaagcttgccaaggggcaagacttttctttatatgtcacagaaaaaacaggaatagctctaggagccatcacacaagtctgagggactagcttgcaacccgtggcatacctgagtaaagaaattgatgtagtagcaaaggattggcttcattgtttacaggtagtggtggcagtagcagtcttagtgtctgaagtggttaaaatgatacagggaagagatcttactgtgtggacatctcatgatgtgaatgccatactcactgctaaaggagacttgtggctgtcagacaaccgtttacttaaatatcaggctctattacttgaagggccagtgctgcaactgcgcacttgtgtaactcttaacccagtcacatttcttccagacaatgaagaaaagatagaacataactgccaacaagtaattgctcaaacctatgccgctcgaggggactttttagaggttcccttgactgatccccacctcaacttgtatactgatggaagttcctttgtagaaaaaggacttcaaaaagtggggtatgcagtggtcagtgataatggaatacttgaaagtaatcccctcactccaggaactagtgctcagctggcagaactaatagccctcactcgggtactagaatcaggagaaggaaaaagggtaaatatatatacagactctaagtgtgcttacctagtcctccatgcccatgcagcaatatggagagaaagggaattcctaacttccgagggaacacctatcaaacatcaggaagccattaggaaattattattggctgtacagaaacctaaagaggtggcagttttacactgccggggtcatcagaaaggaaaggaaagggaaatacaagggagccaccaagttgatattgaagtcaaaagagccacaaggctggaccctccattagaaatgcttataggaggacccctagtatggggtaatcccctccgggaagccaagccccagtactcagcaggagaaatagaatagggaacttcatgaggacatacttccctcccctccagatggctagccaccaataaaggaaaaatacttttgcctgcagctaaccaatagaaattacttaaaacccttcatcaaaccttccacttaggcattgatagcacccatgagatggccaaattattatttactggaccaggccttttcaaaactatcaagcagatagtcagggcctgtaaagtctgccaaagaaataatcccctgcactgcaggccatacatttcaatccctgtatctttaacctccttcttaaatttgtctcttccagaatcaaagctgtaaaattacaaatagttcttcaaatggagccacagatgcagtccatgactaagatccaccacagacccctggaccagcctgctagcccatgctccaatgttaatgacatcgaaggcaccccctcctgaggaaatctcaactgcacaacccctactacgccccaattcagcagaaagcagttagagtggtcatcagccaacctccccaacagcacttgggttttcctgttgagaggcgggactgagagacaggactagctggatttcctagactgactaacaatccctaagcctagctgggaaggtgaccgcttccacctttaaacacgggacttgcaacttagctcacacctgaccaatcaggtaggaaagagagctcactaaaatgctaattaggctaaaacaggaggtaaagaaacagccaatcatctatcacctgagaacacaatgggagggacaatgatcaggatataaacccaggtattcgagctggcaacggctaccctctttgggtcccctccctttgtatgggagctctgtttttactctatttcactctattaaatcttgcaactgcactcttctggtccatgtttgttacggctggagctgagctttcgctcaccatccaccactgctgtttgctgccgtcgcagacctgccgctgacttccatccctccagatccggcagggtgtctgctgtgctcctgatccagtgaggcacccgttgctactcccgatcgggctaaaggcttgccattgttcctgcatggctaagtgcctgggttcatcctaatcgagctgaacagtagtcactgggttccacagttctcttccatgacccatggcttctaatagagctataacactcaccacatggcccaagattccattccttggaatccgtgaggccaagaaccccaggtcagagaacacgaggcttaccaccatcttggaagtggcccaccgccattttggaagtggcttgccaccatcttaggagctctgggagcaaggaacccctggtaacaaaacctgatgtttgttctctactaaggaataaaacaggcatacatgtgagataactataaagagtcaggacatgatagaggtctgcacactatatcagaagccctgtttccagctctgtggctgcagcatcgcacaactccagtgctctgcctgaggctggctgtgcatgcagagctgagccctaggttttggcaggacaagacatgttttattcagggagatgagaaggcctgtcaacatgtactgccccacctgctgcggccaactgtggcctccatcttccccagtaggcagggatggactgagggaggaaagacacctgcggcacatctgaaagatgctttgggccggggacaaaaaagaagtgatagaaaccaggctgtgctttttattgctgtcaggacaattttcttaggacatgggggtttcttttttttttcttttttttttttttgagacggagtctcacactgtcgcccaggctgcagtgcagtggcgtgatctcagctaactgcaagctccacctcctgggttcacgccattctcctggcttagcctcccgagtagctgggactacaggcgcccaccaccatgcccggctaattttttgtattttttagtagagatggggtttcactgtgttagccaggatggtctcgatctcctgacctcatgatccgccaacctcggcctcccaaagtgctgggattacaggcatgagccaccgcgcccggacaggacatgggggtttctaaacaaggctcttcagtatcagctcattgtgagtcacagatcagatctgcccagttctcttttgctgttgacattgttgtttcctctgcaggattcagcagtactgaaagggttattcagtcccaacatgggatctttacacaagaaggggagcttgtgaaatgcaagtactttgcaaatagctcaacttattttctttcttgttttgggcagcattccagtgaggaaatatttcacctgatttctcagagtttaggagcatccaggaacgcaaggaataaaaaatgttctgtgaacctgcaaatagctgccaacactgtcattctcaccatttcagttatgagaccaaaagactcaggaaacagtttctgtgcactcaagacatctacagtaagaggaacaataaaagttgtagttaaaaaaaacaaaaaacaaaatactcagagcttgtaccccagactcatctgccacagggactgggagagatccacgggccctaaactgaaaaaatgtgagcctgtggacagcattcatgaagtatggacaggaaacaggtaactgttgcaagaaaaaccctctcaaactgcattcattgagcagtgctttcaatccacagtccttaaattgactttctccttcaaattttagcaggtaacaaaacagtactttattttaatctaattatttttcttttttctttaactttttatttgatatatttcaaaatataaaataatactgcttattgtaatagatgaagtaataaaaagttttataaagaaaaagttaattctcactcatctgctccctactgaagtaaataatattaataacctgataagtgtcctttcccactattctttctgcttatataaatataggcaaaaatccctcctagtggaacaaatctgtttggggttttttttgttttgttttggtttggttttctgagacggagtctcgctctgttgcccaggctggagcgcagtggcatgatcttggctcactgcaacctctgcctcctgggttcccaccattctcctgcctcagcctcccaagtagctgggactacaggtgcccgtcaccacgctcagctaattttttgtagttttagtagagacggggtttcaccgtgttagccaggatggtcttgatctcctgacctcgtgatccgcccgccttggcctcccaaagtgctgggattacaggcatgagccaccactcctggccacaaatctgttaataaatgtgtgaccaattggaatttttcctctgaatcgccttttacatctttgtccatttttcttttaggttatatatttctcacttaaaaatgcatgctagagatgtcaaaaattttttttatttctccagtctattgtttgtcttctgattttgtttatagcacgtagcatggtatcctttgcctctaaatatactctaaactgtatatagttaaatatgcctgtcttctttatatcttctgcatttctaccatacttaaaaatagtacaggtttatataaatattcccagattcttagacaacagttttatcattttgctttttacaataaaatctttcaaccatctggaaactgtttttatatatgaaatctattttccactattgaaatgtctttgtcatattttatgtttcttaaacataatcaaattatatacatccatattaagaactttaccagtatccaaacattacagaataatgtaagaatcacagtggaactgggtgctggtgaaaataatcactgaattctccagtgccagtttgaaaggagaaattattagccattccactggggtgagaaaggccaatgagtttgactgatgttaaccaaagagagattaaaggatggactaaaagtataaaggggtgacatcttggggaaatgcaagtcttgtgcagagagaggaagatgtttaacttatcctactcaactcctttcctatatgaccggaggtgcctagtccagcttccacccactccactaagttgaggaatagctatcatcacatgtctggaagataatcagcttctgaactggcagagcgtctctggttcttgtggcaaagacataaaatgtgggagaaagtagagaaaaagaaagtgtggtagcctgcattcccaccttttattgaggcaatttttcatgtactagtggttttaatgaatctgtataggtctgaaccaacttgaacctgaacctaccctgcctccaaacagctgtcacttaggggaaggctctagcacaggaggctgtggattgacccatgtgtgaactggaggaggaggaggaggttgagcttgagaacgatcaccactccaggaaatcacgcagatgaagggccctgtagccccctgaagaaaacactagcacaccgttgtgagaaagcacacatttggatttctgccaccaagagggaatccatggccaggaagagataagaaccaacaggaaggagaaggaacctctccatcagaaccctgagaaattcacataaggaaacagcatctgagcaaccaagaagacaaggcccctcagcccaggagaggctgaaaagagagtcctttatttctcccaccactctgcccaacagctgagggttgacatggggtgaagtctgaaagaatagcacatctacctgtcagtggagctcccagagtcttcctgctgggtgtgggtggagggtagagctttgactctaaaatactaattaagttcaaaatgaatacacacatagttggaacaaaactgctttagtaactaaaagagaaaggataacctgtttcccagtggaaaagagatgattgataagtgaaaaaaaaatgaaaacaatttcacactcacatttatctcatgacttgaaatgctctagtcagcacagtaatatctggatctctttgggtattttctattaaatgttccgcttattggcttaatccttcacttatatcatattgttttgtttagagtagtttagagtaagtttttatgtcataaaaaaactgatcttaatattccttttcaagaatgcagttgaaagttcctagatatttgttctctcttatgcatttcatcttgttcaaacaaatggcattctgactgtaactactttggaaagtttaacattttaggacattatatttttccacaaaagaaaaatccatctatttaggtcttattttaaaagtaaattttgcatgtttgtttgtttcttacataccttccactttctttttttttgagacaggatcttgctctgcagcctaggctggagtgcagtggtacaatcatggctcactgcagcacagacctcccaggctcaaatgatcctcccacttcagcctctaaagtagctgggattataggcatccaccatgcctgactaattttgttttttagagatggcgtctcactgtgttgcccaggctggtcttgaactcctggcctcaagcaattctcctgccttgaccttccaaagtgcagggattacaggtgtgagccactgcacctggccagatttctgcttttcttattaaatcaattgctaaatattgtatcatctgtgttgcattattactgaaatttttcttcatttagagaaatttattccatataaggaaaaattactaatttttaatatttgcttaatagccaacaatttttgttacttgttgatttttagcagtactatgaccaaagtggcacatgtacatgtttattttttaaattcctgaatagtacagaaaagtctgtattacaaatctggtttcttatttctctccaactttcaatccttgtccataaatatttacacttttaagtctggatcttctagcagtgagctccatatttctaaataatatgttttaactacttcttgcaacatacattttattcttttattttatttacttatttttttagatggagtctcacactgtcaccctggctggagtgcaatggcatgatctgggctcactgcaatctctgcctccggggttcaagcgattctcctgtctcagcctcccgagtagctgggattataggcatgtgccaccacatccagctaatttttgtacttttagtagagacggggtttctcctcgatggccaggtttgtctcgaactcctagccccaactgatccacccgccttggctgcccagagtgttgggattacaggcatgagccaacgtgcctggctgcaacatgaattataggtgttacctgttgactttcgttttgttttttaaatagacttaattttttaaagcaattttaggttcacggaaaaattaagcagaaagtagagagtttcccatatacttccaggcctcacatatccacaggctcccatgctatggacatcttccaccagagtgataacatttgttccactgatgaagctacattgacgtattattattacccacagtccatagattacattagggttctctagtggtgttgtacgttacatgggtctggacaaatatataatgacgtgtagccgccattacagtctcatacaggttgtttcactgccccaaaatcctctgtgctctgcccgttcactcctccctccccccagctcctgacaaccactgatcttgttactgtttccatggtgttgactattccaaaatgtcatatacttagagtcataacagtatatagcctttttagattggcgtctttcacttagcaataggcatttcagatttttccatgtgtttcatggcttgatacctcatgtcttttgagtgctaaataatattctgttgtctggatgtaccacagtttatttacctattgaaggacatcttggccacttccaagtttgggcaattatgaaggaagctgctataaattcatgcacattttgaactcatttgcttaaataagaaagagcataatttctggatcatatgcaaagaatatgtttagctttgtgagaaactgccagttttcttccaaaatggctgtaccattttgcattcccaccagcaaggaaggagaattcctgttgctccacaccctcactggcatttggtatcgtccgtgttttggatttttgccattctatctggtgtggagaggtcgctcattgttgtaatttgcaattccctagtgacatttgcatggagggtatcttttcatgtgcttatttgtcatttatgtacatttttaatacgtttcactttgggggtcatttagccttcacctggcaaaacaaacaaatgaaaatttacacataattctgtgaattaatttttaaaaacttcataaacctcacctttatccacttttattcttacttatatttacctagtcagacttttcagaactttttccaagttgtcagaacatatttaaaataataaaattaaaataggaggaatttttgcctgtcacctttgctcttctctcttttccctcatccactcccacaccttttcttctttagtttccttccccaaccattccaaacactcattatgcccaagcctctttggacacttcgatcaaaattttctcctctatatcatccggaggaaatgcaccgtttgctcagggacacttagctcacctgcttcccacgttttctctcggtctccacttgtgtctggactgagtgttgctgaccaccacagcatcaaagagcctgtgagaccactggatgcagtctgggggtcagtgacctcagaggaaataccttcagtgtcccacgggctctgcaggtcagtgcactcagagtgagcttcctcacactttgctggggaaagtgtccagtagcttcaataatctcatgaccaaaagactgaagagaggggagaagacatccgagttcacattttcaggcaatagtagctgacatttcctgaatgatccttgtgtgtcaggcaccttaggtccgttcatgacttaccacatgtttctgtatgacagcaccatggggaagcttctgtaattaattcctattggataggttgctgctgatggaagtggggtctccaaatcctctatcccagagtctgtgctgttctgcagactgaatatgctttctccccaccccttcctcaggctttggcaaaggagacctctgaaaaatggcacttagtatattattgacttttgttttttaattggcttttggactaatgaggtcagtataatgtgtgaaaccaaactagaaggcagtgctggtaagtttgttgagtctctgacaaatatttggattctgagcaattcaaacatccaggcaactttaaaaggtcttcttcctctgagactcatagtgacttatacaaataaaaataaaagattagtaataatagtagttcatcaaacactgcatttacttatattttctcaaatactattttcttttttttgaggcagagtcactctgttgcccaggctggattgcagtgatgcaatcttgactcactgcaacctctgcctcttgggttcaagcgattctcctgcctcaatctcctgagtagctgggattataggcatctgccaccaggcctggctaatttttgtatttttagtagagacagggtttcaccctgttgtccaggctggtcttgaactcctgtgatcacccacctcggcctcccaaagtgctcaagtgatcacccacctcggcctcccaaagtgctgggatttcaggtgtgagccaccatgcccagcttcgaatactattttctaccataccatttaaatgtcattcaaatttaatattttcaacaaattttgaaagaaggcaatcaggcaaatttcatctcagtcaaataatccctaaagttacacatgctgtggctgtacctttctcaactttgtttcccttcatccagttaagacttggttgtgcagagttaggggctccgcaggtgatgacatgatcaaaggccctgacccttgtcacaagagtactcactaagaataaaagtgtttgacatcctctcagcaactctgatgtgtaatcccaccagcaattagtgtttttctttctccgcgttgattacagatagtttgcttttccctgtatgactgcaaaggtgtgtatatttgaatgtatgtctgtatgttgtttgggttgcagggaaggaaggagtagaaaaaggaataagaggtggctgtgattggctggtcgctctgaatgcaaataactctatgcttttcacctttagtgaatatataaatgtctcaggataggagcgataataaataatgccaaagatcttccttagtggtcctgtggcttcattgaaggcatacattgaaatgtttctagccaggtgcagtggcttacacctgtaatcccagcactttgggaggccgaggcaggtggatcacaaggtcaggagttcaagaccagcctggccaagatggtgaaaccccaactctactaaaaatacaaaaaattagccgggcaaggtggcacgtgcctgtaattccagatactccagaggctgagacagagaattgcttaaacctggagaggcggaggttgcagtgagccgagatcgtgccactgcactccagcctgggtgacagagcgagactccgtctcaaaaaaaaaaaaagaaagaaagaaagaaagaaatgtttctgaacaggggaaaagccaaatgcaatgggcattcccgaaagactgaagaaagaatacgtgcaagttgattcttctggggtttccaggaaagttgggaaaagaaaatgaatcatttaaaaagtggagagctgatgcctggccctctgtacttgtttctctcagggaagaaaggcagcagaaagtagagcagtgtcccagtccacacgtgtccagggaagagaggcttctatttttaactgcagttacacaagactgttggcttttatgtttcagacgcagtgctgtgaaagaccatgtccttgtagttttcattatttcagaggtaaaatggaaagcaggagtaagagccccaatcattaagaacacggcttagctctctgcagatcacagactcagccaccaactcctgccctgtaaccatggagatgcccccacttcagtctgtacacaaccccacaagaggaaccacttactcgcttccttttctaatcagcatgaaataatatttttcataattattatctgaggcttttctatttcctcctctctatctactttgacaacataaaaatatattagggcctggtcgtggtggctcacacctgcaatcccatcactttaggaggctgaggtgggaggatcacttgagcccaggaggtcgaggctgcagtgagtcatgatcatgccaatgcactcagcctgggcaacagagtgagaccctgtctcaaaaatatatatatatacacatatgtattaggcattatgctgtacacaaagagcttattatctaatacacatgataatatctgtcactagatgtaagctttatagagataccaatttttttatccaataaccactaaccaaacaatgatcaaataaataaatggcaggttatatgtataccgatgtgtaaaggcaaatttatggccaatggttaaaatttactgaaaacaaatttcagctcgctataaaaaagaactagcaatcagagttttcccaaaaagaaacagacagctttaaggcataaaatattcctttctacaggaaatattcaaagaaaagtagaatgcccatttccagtgatgttgcagaattacaaaatgatatgattttgtgcaaaactaaaacatgtaagttttgtatgggggaaaatagcatcgaagaacagaacaaccaaacagcttgtaaaatgcatcgtgaataaaaaaagctacttccagcttaatggaaattggattttggatttgtatttgaagcatgtgtaggatttaaaatgagagagatggtaagagaatacatgccaggcaggataatcttatcaagggcaatgatcaagaaataacagagagaaaggtttaggaaattagaagtttccaaatatgactgaaagaaccaatttttattggaaaatgctgtgagataagagggaatcttggcttgagacaattgttagtgtaagaggactgcacacagcccagaactgggtttctttccagacaaagagaaaatggtatgagattatccatccttaccataaacaacattaaggaatatcttgaaattgtttttcagaaagagctaatattaacctaaatttaaactgttaaataacatcaaagatttactttacaagcacatttctaaatgtactgaaaaactatatttccataataattgattcaatggacagataaatttccttttccctgagtagttctatcatcaactaatagcccttattgcaggaaacgaaaaatctaaacacttttccgaaagtgtcgcgattccccgatcactttccagcgtgaattttcttaggggtgaggatgggaacactaatagtttctctgcactcaggaacctcataaaggacaaactttcaaatcaaataatacagaccaaataaataaaacagagctacatcttgctttgctttacacttcgttctcttccttgtctgtctgcaaaaacctttgcatgattttcattgaaaataactcctgaattgatgcgagattttacttaccctgggacctacccaggcctggtttagatatgttcccatagtcttccctgctcttccgggtactgagttaccataaggataaaccaggcagacagttcttagacattagggctaatttctaatttacccccctgtgtctttcttttatcatcacaaacatgtttggtgtctaatttggtttactcttaggaaaggatggtttggagtacataaaacagaatggttcctcaggcagcaatatgctacagttttagagatcttgtagctctatttttctattaattgatgcaggttttgagaatcaacaagcacattaaaaatagacatcaacactatagtaaaattaaaacagttattctgtcttttgttgttgtttccacattattcagaaagagaaaagtactctttaaaattagaaatggagaacaacaaggaagagaaatctattttgttgaaaaacagcttttggtaatattattcagtgaaagatgaagtgacagacgtggaaacttctagtcaaagtttgcagcttttatttgcattgaatatctatccaagatgaatcatcctagaaaagcagccagtggacttggaataatctcgctcaccatggtttctgccaaggaaggatttctttggcgcagaatgttgggtatttatttggggtcttgaatgggtgaaagagacaaagaacaatttacgagaaagaaaggagaagaaggaatggatccatggacagaaaagatttgtcctcaagggtacatccaagatttgctttaatctgtcatataatggaaatttgaaacagttattagcacaggttcacagcttctcaaaactaaaaaccattgtggaaaagaggctaagcacaaagatgtaagcactaaatgagtataactgctttgcagacagtttcatgtcagtggacatgtgccatttttcttctttttttttttttttctgcccagtgcagctgccacatattattcaatgcacaactttacagggcatcattcacatcttagtaagacatggagaaagacaatgctgagataaagaaaagcagatttccgagagcatcatcagagcctacaaattcagctctgcctggagctgcaaaagtcaaaatattctttttggggatcaagccagcatgaattgagattctgtcatttacagccaatggattcataattctcatagccaaaagggagagggatacttttggttctctgctattttatgagctgaatttatggtccacagaagcattttctactcaaaataactagagttatgtaaagacaaataatcattggtctactctcattatgggaaataagagccataataaccctatgtgtgttttatgaatttcaaatgggaaaaattttgaaaactactaaaaattcataactctacattataaacataagaactcttactttttctatttttactttttaatttccacttttgttactatttttacttattttccttgtttacatttttgcacatgaggaaatcatattgtaagaataattttatgaaattttattctcatttttagaattaaaaatgccttggatttatagtttgaattggctactatttcacaccgtagatatacaatactttataattttcctgattggggatatttttattatttatttccaatttttattattttaaatagcattgtggtaaacatctttaaatatacattttattttatttatatatatatttttattatactttaagttctagggtacatgtgcacacgtgcaggtttgttacatatgtgtacatgtgccatgttgttgtgatgcacccattaactcatcatttacattaggtatatctcctaatgctatccctcccccctccccccaccccacaacaggccgtggtgtgtgaacttccccttcctgtgtccaagtgttctcattgttcaattcccacctatgagtgagaacatgcggtctttgggttttttgtccttgtgatagtttgctgagaatgatggtttccagcttcatccatgctacaaaggacatgaactcatcattttttatggctgcatagtattccatggtgtatatgtgccacattttcttaatccagtctatcattgacggacatttgggttggttccaagtctttgctattgtgaatagtgccacaataaacatacgtgtgcatgtgtctttatagcagcatgatttataatcctttgggtacctacccagtaataggatggctgggtcaaatggtgttgctagttctagatccctgaggagttgccacactgtcttccacaatggttgaactagtttacagtcccaccaacagtgtaaaagtgttcctatttctccacatcctctccagcatctattgtttcctgactttttaatgatcgccattctaactggtgtgagatggcatctcattgtggttttcatttgcatttctctgatggccagtgatgattagcatttaattttcatgtgtctgttggctgcatgaatgtcttcttttgagaagtgtctgttcatatccttcgcccactttttgatggggttctttgtttttttcttgtaaatttgtttgagttctttgtagattctggatattagccctttgtcagatgagtagattgcaaaaattttctccaattctgtaggttgcctgttcactctgatggtagtttcttttgctgtgcagaagctcttgagtttaattagatcccatttgtcaattttggcttttgttgtcattgcttttggtgttttagacatgaagtccttgctcatgcctatgtcctgaatagtattgcctaggttttcttctagggtttttatgattttaggtctaacatttaagtctttaatccatcttgaattaatttttgtataaggtgtaaggaagggatccagtttcagctttctacatatggctagccagttttcccagcaccatttattaaatagggaatcatttccccattgcttgtttttgtcaggtttgtcaaagatcagatggttgtagatgtgtggtattatttctgagggctctgttctgttcaattggtctatatctctgttttggtaccagtaccatgctgttttggttactgtagccttgtagtatagtttgaatacaggtagaatgatgcctccagctttgttcttttggtttaggattgacttggcaatgtgggctcttttttggttccatatgaactttaaagtagagttttccaattctgtgaagaaagtcattggtagcttgatggagatggcattaaatctataaattaccttgggcagtatggccattttcatgatattgattattcctatccatgagcatggaatgttcttccatttgtttgtatcctcttttatttccttgagcagtggtttgtagttctccttgcagaggtccttcacatcccttataagttggattcctaggtattttattctctttgaagcaattgtgaatgggagttcactcatgatttggttctctgtttgtctgttattggtgtataggaatgcttgtgatttttgcacattgattttgtatcctgagactttgctgaagttgcttatgagcttaaggagattttgggctgagacaatggggttttctagatatacaatcatgtcatctgcaaacagggacaatttgactttcccttttcctaattgaataccctttatttctttctcctgcctgattgtcctggccagaacttccaacactatgttgaataggaatggtgagagagggcatccctgtcttgtgccagttttcaaagggaatgcttccagtttttgcccattcagtatgatattggctgtgggtttgtcatagatagctcttattattttgagatatgtcccattgatacctaatttattgagagtttttagcatgaagggttgttgaattttgtcaaaggccttttcggcatctattgaggtagtcattggtttttgtctttggttctgtttatatgttggattatgtttaatgatttgcgtatattgaaccagccttgcatcccagggatgaagcccacttgatcatggtgcataagctttcggatgtgctgctggattcggtttgccagtattttattgaggatttttgcattgatgttcatcagggatattggactaagattctcttttttttgttgtgtctctgccaggctttggtatcaggatgatgctggcctcataaaatgagttagtgaggattccctctttttctatttattggaatagcttcagaaggaatggtacaagttcctccttgtacctctggtagaattcggctgtgaatcatctcgtcctggacttttttcggttggtaagctattaattattgcctcaatttcggagcctgttattggtctattcagggattcaacttcttcctggtttagtcttgggagggtgtatgtgtcgaggaatttaaccatttcttctagattttctagtttatttgcgtagaggtgtttataatattctctgatggtagtttgtatttctgtgggatcggtggtgagatcccctttatcattttttattgcgtctatttgattcttctctcttttcttctttattagtcttgctagtggtctatccattttgttgatcttttcaaaaaaccagctcctggattcgttcattttttgaagggttttttgtgtctctatctccttcagttctgctctgatcttagttacttcttgccttctgctagcttttgaatgtgttttcccttgcttctctagttcttttaattgtgatgtcagggtgtcaattttaaatctttcctgctttctcttgtgggcatttagtgctataaatttccctctacacactgctttaaatgtgtcccagagattctggtatgttgtgtctttgttctcgttggtttcaaagaacatctttatttctgccttcatttcattatgtacccagtagtcattcaggagcaggttgttcagtttccatgtagctgagcagtttggaatgagtttcttaatcctgagttctagtttgattgctctgtggcctaagagaaagtttgttataatttctgttcttttacatttgctgaggagtgctttacttccaactatgtggtcaattttggaataagtgcaatgtgttgctgagaagaatgtatattctgttgatttggggtggagagttctgtagatatcaattaggtctgcttggtgcagagctgaattcagttcctggatatcattgttaactttctgtctcattgatctgtctattgttgacagtggggtgttaaagtctcccattattattgtgtgggagtctaagtctctttgtaggtctctaaggacttgctttatgaatctgggtgctcctgtattgggtgcatatatatttaggataggagaattgatccctttaccattatgtaatggccatctttgtctcttttgatctttgttggtttaaagtctgttttatcggagactaggattgcaacccctgcctttttttgttttccatttacttggtagatcttcctccatccctttattttgagcctatgtgtgtctctgcacgtgacatgggtttcctgaatacagcatactgatgggtcttgtctctttgtccaatttggcagtctatgtcttttaattggagcatttagcccatttacatttaaggttaatattgttatgtgtgaatttgatcctgtcattatgatgttagctggttattttgctcgttagttgatgcagtttcttcctagcatcaatggtctttacaatttggcatgtttttgccacggctggtgctggttgttcctttccctgtttagtgcttccttcaggagctcttttagggcaggcctggtggtgacaaaatctttcagcatttgcttgtctgtaaaggattttatttctccttcacttatgaagcttagtttggctgaatatgaaattctgggttgaaaattcttttctttaagaatgttgaatattggcccctactctcttctggcttgtagagtttctgccgagagatccactgttagtctgatgggcttccctctgtgggtaacccgacctttttctctggctgcccttaacattttttccttcatttcaactttggtgaatctgacagttatgtgtcttgtccactccagaccctgtttgcctgggtatcagcagcagaggctgcagaacagtgaatattgctgaacagcaaatgttgctgcctgatcattcctctggaagtttcatctcagagggatacctggccgtgtgaggtgtcagtctgcccctactggggtttgcctcccagttaggctacttggggtcagggacccacttgaggaggcagtctgtccattctcagatctcaaactctgtgctgggagaaccactattctcttcaaagctgtcagacagggacatttaagtctgcagaggtttctgctgccttttgttcagctaggccctgcctcccaaggtggagtctacagaggcaggcaggcctccttgaccttcggtgggctccacccagttcgagcttcccggctactttgtttacctactcaagcctcagcaatggtgggtgcccttcccccagcctcgctgccgccttgcagttccatctcagactgctgtgctggcaatgagcgaggctccgtgggtgtgggtccctccaagccaggcacaggatataacctcctggtatgccctttgctaagaccattggaaaagtgcagtattagggtggaagtgtcccgattttccaggtgccatctgacacagctttgcttggctaggaaagggaatttgctgacctcttgcacttcccggatgaggcgatgcctcgccctgcttcacctcatgctcagtgcgctgcacctactgtcctgcacccactgtccaacaagccccagtgagatgaacccagtacctcagctggaaatgcagaaatcacccatcttccgcgtcgctcatgctgggatctgtagactggagctgttcctatttggccatcttggatccacccctaaatatacattttaatttaactttttatcgtttcattaagacagcatcctcgaactggaattagtggttcaatgggcaaaacagctttatagcctgttggttccttgtctgtcttaatagcataacaccttttaaaagctttctaaattccttatctctactccctaacccctttcttactcaaaacccagtccaggcagatttttatccctatccttgtatcagaatcactttgttaaggtcacaatgggtttcatagcctcaaatccaatgatccattaccatgttttatcttactgaatttctcagaataatttgacaatttggttattctctccttgaaacattatctttgcttgagtttggggattccacactttcctggtttgctttcaacctcacaagccactccttttctagctcaccttcctcttgctgacctctagatactgtgttgtctcaggactcagtcctcaaacatatatgccgtctacatgcactctctaagtgatttcatccaggaatatggctttaattaccatccatacattgatgactcccaggtttatacctccatccaacccctctctgttgaaagccaggctcatatatactataatctatataacatctttgccagatgtctgtctggcatctaaaatctaagatatccacaacataccttattccctcccttacgctcatccctcactcttccccatctcaagaaaacagtgatataattcacccactcgctatagccaaaaatactggaatcttctttaattcttctctttcccccataccccacattgtcaacaaactggccacataagatgtgttttctgtcagaaaaaaaagcctgacttcattttttaattcaaataagaatgttacatgatgggttccaatgacaacccagtcatttcataattctaattctaaagtaggtagatgaatatggtaaggaaccttgcattgtggctgtcgccagttgaaatatattcctgttttgcaatatttcttgcttagcttttaagggctctcccgcagattccagaagctaataaattgtctctttatttggcagcttgggaattttttttttagcaccctggaccaatgcaccattccggatggttgagatatatactttttctttaaggggtaggaggtaagggtgatgttggaaagagaaatgggaaagaagcagcagcttaacatttggaccctgaagcatgttctagagcaggctggttttaagaaagtcctcatttgcctcaaggtacgtgaccccagtttaatgactataggcctaaatgggacaggatcacaatcacatttgtcaccagcagactcatatctaggaggcatacaagttattcctgttagaacagtgacttactggaaagtcatttcccaccactgatttgagtcgctgttattatcgtacatgaatttccatatacaattaggccatattacagatttgctattccatttaactaacctgtctgcctacccttaattttcacttaagaattttctttctctttcttttcacttctgtgcaatagaaaatatactcttttcttctacattttcttctgttttttttgttttggcataagaatgacaggaattttttaaatgtttaattgtagccaatcctttgctagtggtctttgtcctcttttaggttttctgatgtacagtcattttatctacttacatgcagatgatgttttatctcttcctttccaattcttatgcttcttattgtttctctgggctgactgcattagcaagtagcttcaacacaatcttagatagcagtagtggtaatgaacatctttttccttcacctactttaataggaaagcctctagcactttcccataagttggtgctggtttgggattacggtgtatgcaagttttatgtgatatgttaaagaattagttattagtttttatttttcaatgttttaacatgaatctgtgttgtattttgtcaaattccttttctgcatcaataaagataatcatatgattttttttcttggctcttgtatcagttattaagctactaactcttacctacaattgcttagctcctatacctcgcttctagagtagtaactgctgatgtcaatcatacactggcccctagagctagttgactttttaggtgtgtttttcttctctctccaactggataattagcatattctattttgtacattttattaaatgtctccacagggttaagtgaatttgttgaggtagtgacactcaacatttattgtttacctgccacaacccctgtccatcattgctcagtaaaatcgttaatcatctatagctagacatatacctgctagtacctacctagaatgttgaaatcacatacctgagataagagagaagaaaaattccaaggagaactctcatgtaaatgctacttcctccaagcatctaaaacagctcctctattctttctaggaaaaaaaatcccttctttgaggacattcctggtaagtatcctcataaatagaaaaaaaattttacaaagagaactaaagttttgctagcatttctgtggtttcagacttaatgtgatgtggggatgctctgattgggaaaaagaaagatcataaggtttctagggaagtgtaccagtttacaaatagccagattctccagtgaccacctcatgtgtctattgtttttttctcaagcagaaatgtgaaaacaggagaaggtagagtccagtcttacccaaaccctgcatgtccaggagaaagctaactctagtctaagctacaaaaaacgaaaaaaaaaaaaattctccttgttttacataatttcatacacaaaaaagaatggaagagtaatatccacaattaacatcaaagatcctcttattcttcatagactcagtgtagaggctcagacacttatgtcatgaccacagaaagaaatgaaggaagaaaagaatgaggatagatttgctagggccagggctttacccaagaaatatagctgagaaaatgtgggagggtaataggtaggcacctatgctccacaggatgagacctggatgcaaagaacagatgagagctttcttccctatcctctcctcatcttgagtccctagtcattgctgcaagtacaggaaaccataaaacagagtttcagaaaactaatatgtaaaacatgagaaattaccagtgtgcacaggtgcccagagctaaatataaagcacttggatatttgcaaaagcactagcatgctcagagttagccagttactagactgctttctcacacctgaaaacatcctaaaagaaaggatactacattttcctcctttgtctttttaacgagaatttggaaaaggtctaactcttttaacttatttaaagctgctgagattgagacatataatacagctctggtagaaaaataatcaattaagggaaataatcagatcttctctcaacctattcctacccccctcagaatgtactacagtgccatagaggcaaaaagcctgcataattctttaaaggtgaggggagtgagggagtttcaggtgtaaaggattttcagacagtcataactggagaaactttccttttaacactgtttgctttctttcttttttgtttgctcctcacctctctgtatgttccgtctacctttcatttcaacataacgagttactttatattaagggggaaatgaaaaaacaatttttttgagttcagaccacctgggggcagtgcttcctttgacagaggcactgccagaaactagaacaaggggaagggaacagcaggaggagggcattcaatgatgtgtgtgatgtaacagtgaggttttgattatccgtaaaaacaatgaagattccccaaaggctacccaaccaacagaaccagaagactctagaacagtgaactaggcccagtgaacacggccaaatctaggtctccaaactgaatccacagaggctccaggaaaaggaaagaatggaaactccactgagcactctgctgctgctcctctgtgtgcagctgacctgtgagtcaggcgagtcatgaggaggggaggaatcaagtaggggcggccagggcattgaaatttagaaagatcccggggacaatcttgggtctagtctcaggaatgtaaaacaaataatgaaactgatgaacaaacacactatatatatgaaaatgtttcattcctcctaagcagggtcaaatggacaactgccagtggaacagaatgctccttccctgaaagtcaaggaaggtgacagcgtcacactgaactgcagttacagagacagcccttcagatttcttcagtggttcaggcaggatcctgaggaaggcctcatttccctgatacaaatgctatcaactgtgagagagaagatcagtggaagattcacagccaggcttaaaaaaggagaccagcacatttccctgcacatacaggattcccagctccatgactcaaccacattcttctgcgcagcaagcacacagtgcccacagtcacctgcacccggtacctaaagcttgctgaggggcctgggcacacctccttttataagggccctggggcactgactataactctgctgcatacaaagggaaatatgagggactgttttataacataatatcaaacatttcatttgaagaccatgtgaggaaggatagtgttttcaaataccatctaaagtactttgtttctcagtgtgaggcccttcctttgtgaaaactagcccaaaaactagaggctaaatatcaaaaaggagagagcactaaagaacaaagaaagaacagggtaaaattcttgtctttgagcttctttgtagacttttacaaagatatagaaaatacaaaatcttgaaagccatgaccatcaaattcagtagtgaaaggaaaaatattttgacatgccaaaaagattggcttagaagatcaagtaccaaaatctgagggaaaattgtacaaagcatttaaaggaaaagagaacacaacatggtagaaaagctgtcttctccttaaaagggataaaatgccaaccagctagctagaaaggaagtcaatgatgtgaggagaggtcataaacagtgagtccagcatcctgctcttttctagggtcagagctctgagcaggtagggtgggaggagggtgagtcacatttagcaatgactctgaactgaaggaacagtgaattttggaaaaaactgttttgatcattgtgtcttatatcaatactcacaagaaaacgcccattacagaggaagcattcaacaaccatgtggacaagacggtcggtccaaagcatgtcagccagccagagaatgtctgtgcttgtcaatttcttgaacaatagacccatgaatagattagctgaggtgacagattgagtttctttataagcccagaagcatgggttttctcccaccaagacagattcagctacttctgctgctgtcacaggacttttccttagttcaaagacagggttcttttcccatgggcacgaaaattcaggctcgcaaacaatttgaatggtgagtaagacacggttttattgggtgaagaggaagaaaagggggaaacagggactcttacaaggccagagtccctgctagagcacttcccaccccgcagttcgaatcccaggttccacacaggaagaggaggagcctggctcctccccactgcaaaggatgccaacttctgcggctccaccccagtgcacaggctgcttggaatttctctagggaccccctcccacctggctgtctcactaccaaatgtccaccctgtcagcagtaaatacaacactgagccttcgatgtggaatcatccttcaaaggaaccagccacacactagttggcaagttgattacattggaccacttccaacctggaggtattaggaattttttttcttcttaatacatattctgggtgtgaatctgtggtctcctccaaagtgccacacatagttgcatgaactgatggctcagagtgtctcattgatcattctgatcatcaaaggatttcacatcccttgcatcaacagacccactttatatcaagggcgtgtgacagtagtcatgtcatatagcatatagcttcatcatacagcattagccatgaaccactagcctgatagaactttggaatgaccacttaagggcccagctaaagcaccagcttagggacagcaccctgaggggctgaaaagctattctttgagatagtgttgtgtccctgttacataaaatacatggacctgggtagcaagggatggaagtaggactatcaccccatcaaccaccactttcagtaacccacttttgtgcttcctgttcttataactataggttctgctggactagggattctgtttccctttgagggggaaaagggaggatgctgcttctacgagggaaataggtttttaccaaacccaagataatatatactacctcataatttggggatcttcatgccagtcctggaggccaagaaaggagttactactgtcatggacaagttgatcctgattatcatgaagctaaaccccatagcggaactggggatatatgtctacaactcagggaattcactgtgatgacttttagcactttcatgtcagtgattatcgtaaataggcaactgtagcaactacagcctgacaagagcagactaaccaggggcttatacccctcggtgatgaaggtctaggttacctccctggaaaagaaatctagagcagtagaaaaaaatgctagccgaaggtggggagaatcaagaataagtagtatagaaggtagatggaggagataataaatatgagttgcagtcatgcaactaactataacaaacgtaacttgtcccagtaaccctcttgttgtcaaaacaacatcaacaacaaaaactagtgatctatatgaatttaacacacagcacaagtggatctgagcaaggcaaggagtgaactgtatagatactgttggttccctacctatatctcctaggcagtcacgccaacatgctggacaccactcgctgaaaatcccagcaaccctgaagatgactttgactttctggccatgaatgtggaggctgtggaggacaagccagaaatgcaaaagagttaatgccccaaaagcagttcttaatcagtgatagacagggagtttaggcatgattactccagtttcttcatgactcatttggcatagctccaaagagtatgctatgctgtctcttagagttattgtgacaggtagttagacaggcatgaatggggcacaagagagctctcccctccacccaccaggagtcatcaggcgattgttcggcagttatcacattacctctctaaaaatgataattggcagcaaattatcactggcaacttccccaacagataaagacacttaagattggtaatcagcttccaataaaatctcaggaattggtgagtgaacccagcatgtacattaagagacaaaacagcagagtatgaccttctgtgggcactccaccagaaaaaggaagaaagcctcagatgtgcatgagtacaacttcctaaacacactgctcatgcccacgtcccaagcaggaaggagggcactgcacatgcgggcagcccatcctaagggaagaatcatgggaaaggggcacaagatgctggaggtaggtcagtgtataaaatcttaggattaaggttaaaggctgcacttgtccttccagttgtccgcttgggtctcttccaagtgtactttcctttctctcctgctctaaagctttttaataaaattccactcctgttctgaaatttgccttggtctttcattctgccttatttccctcagtcaaattctttctgctaaagagacaagaattgaggttgctgcagacccatatggattcaccaccagtaactcagaaccttctacctctaacattatccagctgcagaaagctgcaattgcccatcgtggtaactgccttgatggcacattctgtattggcttccttccttccctgatttacctcttacccatgttttgccaacaaaaaagagttaaactctgtaaaatagttaaagaggttgattctgagccaaatatgagtgaccatggcccatgacacagccctcaggaggttccgagaacatgtgcccaaggtggtcgcagtgcagcttggcttatacattttagggaggcatgggacttcaatcaaatacatttaaaaaatacattggtttgatccaggaaggtgggacaactcaaagcaaggggcaagggggtcagtgggagtgaggagcttccagcttataagtagatttaatatttttctggttgacaattggttgagtttatctaaagacctggaattaataggaaacgtctgtattgcgataagaggttataaagaccagagtttgatcaggcagatgaagcttccaagtagcaggtttcagagagaatggattgtaaatgcttcttatcagacttcaggtctgtgttgatgttaatgccagagaggtatgatgaagcatgtctgacccccacttcccattctggcctgaaccaatctctcaagttgaattttaagagagccctggccaagaaggaagtccactcagatggttgcggggggctggggggccttagaattttatttttgatctacagtttcctagaatcacctataataaactatttacacacaaattattgtgtcgaagctgacttttagggatccaaaaccaagatacaggaattcaaatcatgagacaagggtgaagattatccagaagaaatgttggtgccccttctcttattgctaccaagctgagctttgcagcacaagggattttagcagtctcattcaggatgggccccagtgcttacaaactccttaagcatctctctgagaggggacactcagccacctacctctgtgacagagaactcatgctcctcacacagcacccagtacataacagggcccccattcataatgcccagtttggggaccccaactcaggaattacataaggatccctgatgctccctctggaaatgcaaaattctaaagaatcagagtaaggtatttaaaaagagtttttttcacaatattttttcaaaatggaatgaaaatgataagagcaattcttgatataaatataaattaagctgaggcaatttagtgctgatgagaacttctgcaatagttatttcagagcttcttgatatagcataaacaaggtggttttgtttatttgtttgtttgcgtttgttttttgagatggagtttcactcttgtcgcccaggctggagtgtggtggcacaaactcagctcactgcaacctttgcctctcaggttcaagcgattctctgacctcagcctcctaagtagctgggattacaggcatgtactaccatgcccagctaatttttgtatttttaatagagatggagtttaaccatgttgcccgggatggtctcgaactcctgacctcaagtgatctgcccacctcggcctcccaaagtgctgggattacaggtgtgagccaccatgcctggccaacaagattatttttttaatccatgtaaaatgtgaacacaattacacactacatattctgcttttacttatctctgaatttagtcgatgctcttttcagccacaagcatatatcttttttctcattctttattttgagaaattataaaaatgtaaaaaaattgaatataaataggcatattcttatcactcaaaattaagtgtccttatttcataagatttgctttgtaattttttttaataagaagaaaaataaaatcacagtttgccatttgttgtgaatggagtcagaggcttctgctcaccattctggatcacgctctcctctccaagattaggtcgtattaaaaacaaatttgccagctccattttctctttatttttcttctaggctaactaaaagcactccagaaacattttttattttcatttgaaattataaccagaggcctattttctgagagaccaaaaagtattcagaaatgtttccctccttgaaacctagtcacccacccacctatcatagcatttcctgccctgaaggagaattctcaccaagcacagaggagaacccatcagagcaggagacttttcactctgcaggggagcgctgtcagcatgacacgagttagcttgctgtgggcagtcgtggtctccacctgtcttggtaaggaagatgtggttctttctttataaaggcatctaatggggctgtgaagcaggagggattaacagaacagcaactgcattgcctcttagagcccagctacctggaggcagaaatatgctgcctgaggctagaatcacaaagaaaggtgtgtgggaatggggaatgggaatcagcttgtgagtctgtttctcactcacacgtgatatcccagtgaagtcctttctctcctattttccacagaatccggcatggcccagacagtcactcagtctcaaccagagatgtctgtgcaggaggcagagactgtgaccctgagttgcacatatgacaccagtgagaataattattatttgttctggtacaagcagcctcccagcaggcagatgattctcgttattcgccaagaagcttataagcaacagaatgcaacggagaatcgtttctctgtgaacttccagaaagcagccaaatccttcagtctcaagatctcagactcacagctgggggacactgcgatgtatttctgtgctttcatgaagcacacaatgagatgagcagcagggagaggcttacagaaacctcagacctcagcatctgtgcaaaggtcacagggtgagagggaagtggtagggtaataggtatagaaaatcattgacttctcttggaaatgaaagcttctcctatttcttctcctgtaagaaactcagagagatggctgtctgcaagcttcaatccttaaagttacataaagataatgacgtgtgcagtgcattccagttttacaaggtgccttcactaaggtacttattacaggtcagatttcctaagcattttctctgtccagaaaatttttataatttgcctgggcattcttacctccaggaattttaaaccttttccatttgttaattgttgcttgtccttttatttgtccatctggtccaaaactgcatctcctccgaataaggtacccattttagaacacaacaggtgtgacaacggtggcataaccacgaaggggacttgctgggcccaccagactcaagagatgacctaggtccactgcagtagaacctagaagaatgatgaaaaggctttaaaatgctccgctgaagggccagctcgtgggcaacacctcagtggttggaatgctatgcttcagaaaatgataatattcgttaaaccactggctgattcatggtgtcgtggcaaaagtttagaaaccaagaaatagacatagaatagagtcttctcctatcactccctataagtcattttcagaattcgtgtttccctttcccacaaccctaggttctgctagattagaggtcctagttcccaaagaaggatgctcccttcggggattcagtaacctgcagctatggctgccacttttaggtcactctgaactctctgtgccaatagcccagcaggcaaagagaggagctattagaccagaaggggtcattgaccctgactgtcatggagcaccaggttgttgtgacacaaggagggtgaggaggaatgtggctataatgtaagtatttcacattggtgtctcctgatgtttccgtgcccaatacaaacagcaagcggcagttcttgtagcagcaaggcctgaaaagggcaacgtgaccaagaactgagactcttcagcaatgaagttttcaagaacagaagctcatgtcatgcaaccttcctgtattaagggcgttgaagagattgcagtcagaggcaaccttgaagacacagtgacacagtggaaataatatagggcaagcatgcatctgagtagtgcaaagaaaggactgtaactgatatatgcgccctgttgccccatccgaatgtctgtctgattttagctggagttatagtagacaatcacactcacgtcatgctggtaacatccagcgttaagcacactctgtgttttgttatgttatgttttgttttgttttgttgctttctatcccaaagtcttctctaatgtctcaggagatcccttagtttaagggcaagcacagcctgaaattatagggaaactaccacccctgttggcaaacaccaaccaatggggaaaaagagccagggaataaacgcactagctttgcgtcccttaaatagacaattctgagcggcaacctgtgtgcttcttgggagatcctaccagaaccgagtcccacttgagtcagttattgctcgacccactttcttcttttataacttatttttatagatcaagggagtacaagtgccacttttgatacatggatatattgtgtagtggtgaagtatgggttttcagtgtaaccatcacctgaatagtgtacattgtactcattaggtacttttcattcctcattctcctcccacactcccaccttttcaagtctcaatgtctgttatctttgtccatgtctatgcattatttagctcccatttataagtaagaaatgtagtatttgaatttctgtttctgagttacttcacttaagataatggcctccagttccatccatgttgctataaaagacatgagtttattctttttatggctgagtagtattccatggtgtgtgtgtgtgacattttctttatttaatcatccatccattgatggacacttaggttgattccatatcttttctattgtgaatagtgctgtgataaacataacagtgaagttatatttttgatataataatttctttttgtgggggtagatacccagtagtgagatgctgggttgaagagtagttctatttttagttctttgagaaatccctatactgttttccacacaggttgtactgatttacattcccaccaacagtgtatatgtgttaccaaacatctgttgttttctgacttcttattaatagccattctaactgatgtgagatggtatctcattgtgcttttaatttgcatttatctgatgattagtcgtgttgagcattttctcatgtttgctgaccatttgtacgtcttctttgagaaatgtctgttcatgtcctttgcacacttttcaatgggcttatttgtttcttgcttgttgagttgtgtgagttccttgtagattctggatattagtcctttgttggatgcatggtttgcaaatgttttctctcattctgtaggttgtctctttactctcttgattatatattgtgtggtacagaagctatttagtttaattaagtcccattagtctattttttgtttcgttgcatttgttttaagatctcagtcataaattctttgcctaagccaagatccagaagagtttttcccaggttttcttacagaatttttatagtttcaggttttatatttaagtctttaatccatcttgactttatagtaagagaaatggatccagtttcattcttctgtgtatggctaactaattttcccagcactatttattgaatagggtgtcctttccccagtgtatgtctttgtctactttgtcaaagatcagttagttgtaggtatgtggctttatttctgggttccatattctgttccattgatctgtgtgtctatttttcatacaagtaccatgctatattgatactatagccttgtagtatcatttgaagtcaggtgatatgatgcatcaagatttttctctttgcttaggattgctttggcattcaggctgtttttttgtttcatattgattttagcattttttcctaattctgtgaaaagtaatattggtattttgataggcattgcattgaatctacatattgctttgggcaatatggtcattttaataatattgctttttccagtttataagcatgagaggttttttcatttatttgggttatccacaatttctttcatcagtgttttgtagttttcctagtagagatcgtttacctttttgtttaagtgtatttctaggtattattttgtggctattataaatgggattatttattttgtggctattataaatttagtttgtagcttggttgttactgatgtatagaaatattactgatttcatacattgattttgtatcttgaaactttactcttaag

SEQ ID NO: 80 - DNA, 138821 bp, Homo sapiens
aagcttgtttcattgaggctgtcaataaaaacacagggctccttagtaagagacaaaggatttttattacttatggcacaacaaacagcatgaacattgatatatttccatcagtttctcctgcctttaagtcctcaaaagatgatgtaatgggtagtaagggatgctacccatgaagtggtattatgtcacaggtgaggaactctgagcttaggaagttcattgcttttataacaagcactcagccagcttgctctttgtctcagagggagacattacctcatctcccaaggttgcttgctggcataactctgagaagtgatccaggtagaatgctcatgtcattacactgttggcacactcatcaagtcacgtttgagtacaagagactcatggtggactgcctttcaataatatccactccatggtcttacactgggttagttgctagaaatttattttatgagtatgccagtttgtcagtcattctgatttgtgtaactgagagatgtcatgactaaatgcattacatttgtctcaagtagcatttaattaaggctactatcagcagaactctaagaagcagaatgagaccaacatgcagtattaaccttaattatgcttgatccagccaaatgtgagtaagttccaaagtacagacagctagcatgtagtattttatctattataacccatacatgaaagttcagactgaaatgttggtctttctttgaattaccacaaagaaaaaaccctaccattcccaatatagagatgttatatggtccctttcccccgggcataacccaaaatgcacaagttaatcaaatttgggatttattattaaacttgatttggataagcattgcatcactttggttaaactacgtgagcagtgtcagtgagtatttgcaatatttgcaacctctgtagccattcatgacataacccaactgtcaagatatcaggggaagcatatacatttgtgtcagtcaatttgagacaaggttgtgctgattcttgtgtttgtatacttatgaagatggggaatctatattggaaagctgccactgataaaatagtctgggagccacattcacaagagttttcctgttttcttgggatgtgggaggagataacaaaccaatagcaggacacagagttgctgcttggctccagaagacaatatgtttgtttttctatacttgttctagcatacaaagagagcattagaccctcacttctccccactggccagggtctaagagtttctcttgctatgtgctcatcatcactaatcatcagagagatatccatcaaaaccacagtgagatatcatctcacaccagtcagaatggctattattaaaaaattataaaacaacagatactgttgagactgcagagaaaagggaacacttatatgctattgatgggaatgtaaattagttcagtgcctgtggatagcagtttggagatgccccaaagaacataaaacgaagctatcattttacccagcattcccattgttggatatatatgcaaaggaaaatagattgttgtaccaaaaggatacatggcttcttattattattgccatggtattcacaatagcaaatatgtggaataaaactctgtgcccattgatggtggattggataaagaaaatgtggtacatatataccatggaatactatgttgccacagaaaagaatgaaataatttctttgcagcaacatgaatggatctggaggccattatactaagtgaattaatgcagaaatgttaaaccaaatatcacatgttcttacttataagtgggagccaaacacagaacctacgtaaacatggcaacaactatggattaccaaagggagcaggaactggggggtgcattaaatagtacctatcgagtactatgctcaccacctgggtgtaatatacacatgtaacaaacctgcacatgtacctcttgtacctaaaatataaactaaaatatttaaaaatagactcaaaattagcaccattttcagaagcgtttattttaagataaattgcttttaaatgaaatcttgttttgcaatactctgaggttcacaagacatatctagaaaatgtactattgcggaaggtgaagacggtgtaaaaccagtgggggagaggtcagtggtttttcttattggttgattatcagaacactgtcctttggggatatgaaagagttttatatattctttagacataattagacaaacaatggtccatagggcaggtttgatgctgtacaaagtctgtcattttgctagcactgatatggttcttgggtccaccacagcattagatctgttgatgcatttatattatgctttgttacaaatcttgaaaagaggggtgcttcttacagactttgcttcagatattagattttgttttagtaaattttccaagactgtagtggctgccagcttgtgttactttcacttttcctctggtttttgtatttaccgagaaatggtcatggtttctgtcaagtgcaatgtacccttggagaaaggaatttcaatattagcatctattccctcattctatttcctaggtagttgttggtgggaatgggaaaggttagcctcagccatctttggtgaataccgattacatggctcttgagtggaaaaaagcctgcttcattgttggcctcttcaaggacatgaaacacgttgtggaacagaagagaacagtagttgtctgtccttgtttatctatagactcaattgagtttcttgcatagatagctccctgatagatttggtttgctggttatgtcaggatgaacaaaacctataacttttagagattgattcctaggtatcagctttatacaagaaaggcaataagagggacaggacaaatgaacaggcacattgggttttattgacagtctaggtactaaaggcaggttcatctcaattgcaccaacccaagcaagagctgttttggcacagatgcatcattggtgcaaaatggaatgacaaagtccaagctcctccagttcctggccttgttaaaaaatattgcttaggctatgggctgcaaccatgtttgttttgttcagctagattttaggccatttcatcttggaagacttattttgagttataagaaatttctttaaaagttgtatataacagagtagtataggaatatgtggcctgacattaagaagagctatacagtgtgaaattctccctgaattgcaagaatctcactcagatttctataatagaatctgttatgtctgattttttagttcaggaaagtggctattagaaataagtggtcttactgacccaagagttgccatttgatggaaactcatacacacatatatacccctctgcctttctcacacatacattgactttgacttttaatatagcttaaaagctttattaaaagtttttatttttaattgattcataatatttgtacatatttatgtggtccatgtgatattttgttaggtgcatagaatatacaataatcaaggcagggtgtttagaatatctattaccaagagcacttatcatttctgtattgagaatatttcaagtcctcacttctagctattttgaaagtacaatgtgttgttgttaactttagtcattctactctgctattgaaaattagaacttattccttctgtttctacccactaaccaacctccttttattcccccaaccacatccatttccttcccagtctctgataaccatcattctagtctctgtctccctgagatcaactctttttttttagcttccacctatgagtgaattcatgcaatatttatcttcttgtgcctggcttatttcatttaacataatgacttccagttccatccatgttgctgcaaaggacacgatttcatttatttttatacctgaatagtattccattgtgtaactatacaacattttctttatccattcaccagtagatagacactttgttgatttaatatctttactattgagaatagtgctacaataaacatgaggaggcaggtatgccttcaaaacacttctttcctttggataaatactcagtagttggattgctggattgtatggtagttctattactagatttttgagaaatttccctactgttttccagagtggctgtactaatttacattcctaccaacaatgtttgagagttccattttctatgaatcctcatcacatctattattttctatatttttaataatagcgattctaactgggataggatgatatctcattgtggttttgattcgcatttccttgatgattagtgatgttgagcatgttttaaatacctattggctatttgtcttcttttgagaaatgtcaatttagatcttctgcccatttttaaatgggattgtttgactttttttttttgctgttgagttgtttgagttccttgtatattctgaatttaactaaagtgtcatattttcacttttagcagttcacataacacaggtctgtagttggaatacatctttgatcactttcatgagtcctcaagatggcagtgtcttctcagggaccttggggcaagctctcatgtgctcctgcggtggggaggggaggggatgcatgtgcacttgcaagtgcacacacacacatgaataagagcaagacagagggagagatgagggaggagcttaatgatggagcagaggtgttaaaaagaacatcctttttctaattggtaggacagatttcttttatgattcctacagcagaaaaatgagaaacgtttgttattatttttttttcgtgtttaaggtttgaatcctcagtgaaccagggcagaaaagaatgatgaaatccttgagagttttactggtgatcctgtggcttcagttaagctgtgagttttgggcatctctgtagaaacataatgtatattgtttgcaattattgtgtattctaggcctgtgggtagaaacatgagtggttttttctctaacaaagggagactggggagagtggggggcccatgaaaagatgatttaaattctgggtacgaagtgtcccctacccaatctgtcttctctgtctgactgctgtcttttttcacaggggtttggagccaacagaaggaggtggagcaggatcctggaccactcagtgttccagagggagccattgtttctctcaactgcacttacagcaacagtgcttttcaatacttcatgtggtacagacagtattccagaaaaggccctgagttgctgatgtacacatactccagtggtaacaaagaagatggaaggtttacagcacaggtcgataaatccagcaagtatatctccttgttcatcagagactcacagcccagtgattcagccacctacctctgtgcaatgagcgcacagtgctccccagacacttgcagtctgtacccaaacctgctgggccccaggaatgcctgatgtagagcttagactgcaaggcaatgaagttctatttgttctctagatgcaaatgaaaactaaaagcagtagtattgaaggtttgattaatttgggacatattttcataattctgaaaattattgagaccccaaaggaaaataaaagacaccatttggtctacttgaaatattttctagtcttctctttccactttagttttgaaattttttttttgctgactttgtggctcatgtctgtaatctcaacacttctggaggcatagggaagaggatcacttaaacccaagaatttgagactagcctgggcaacacagggagaccttgtctcaaaaaaagaaaaaaaatcgccaagagtggtgacatgcacctgtagtcccagcaacttgggagggaagaggtgggaggatttcttgagtcggagaggtggaggctgcaatgagctgtgatcacaggactgcactccagcctggacaatggagtgataccctgtctcaaaaaacaaacaaaaacaaaacacaaaacaacaacaaaacacaaataaaatatttttattgaggtgttattgacacacaaaaaggtgcacatattcactttatacagacaatataatcgtgccataaacatatgtaccatttctaaaaatttgcttcctccctggtttctttttattaagttattattgctatacaaaaaggtacatttatttaatccatgcccagtctacttttatgccacatctttactttatgagattggttttatgattctttttatcaaagacaagaaaatatttccatacaataacagatatgctctcatggttcctaagacattttgctctttccccaaggcatttgatagacattgctttaagaatgaaacagcaaagcagaaatgcaaagagaagaaaaatcataagcagactaatttgaaaatccggtaagtcataaattttttaagttacagaaccctaactccatctccagcctcaactacaacatcactcctgagttatataagggtacacctgatggacagctggaagaactagagtgagagagtgagaactggttgagaaaaagcctaattagttgcacaaactaaagattagagagggtctatgttgccattttggggtaaagttttaatcaaattcaaaactcccagcttgagcctgatgggatagttttttgattcctatgtacttgagtgtggcctggagatgggaaggagcattggctgtagttatagagtgcctcatctccccagcagggcatgacagcacagaaggacttaaaatttttttgagaagggtctctaagtatcttaaagagatccagacaccaaggtcctttgttatgatgagtaaagacctgtatgaataagataccaaagaccgtatggaattgagaatgcttcaggaaatgtttgtctggagagttggaaacactaaacatcatatgaatatctccatcccctgactacaaggcaccacagatttgccctgcagtgtatgtcaagtatggggaaagcatttgtggcctgacgaaataaggccttttagtagacattactttgaattacaggcaaaatatttgagaatcatatttactgtaaaaatgaagttgtggtctgataggcataacattatttatgtagcccagaaggtgggaaaagcttggaaatgaagaataaatgtttctgtccagttttattgacagtcactgatgaaaatgatgaagccaagtcagaatttgctgcaacttcttactctgcagaagtgaagactctgaacaaatatttcccagtcatagaagaaagatttaaaaagcaaggaggaagagcaaacagttgtgctggaatcaaggtacttaaatttttattccacttttatgatttgccttctggcatcatggcactctggaaagaactcaggctgtggtgctggtttgaacatcgattatattacttatggcctttttcatattaagctctacaattatatatatttcaggactggtttcaggattccgtgagacaaaatattgtcttgggatgagttccttaaaagcagagactgcatttggaattctctgtctgtaatttatttgggaaaccaggttgagatgggggaaaggctggacatgagggggaaaggttgagatgctggacatggtccagcagaggtcttgatccagcctgacctcatggggagctctggagcttgaactgtatcacagggttgattcctcccaccctgaggcaaggaggccagactgctcggacctattgtgggtaagaataaagtcatcattggttgtggtgtttcttggggtagaggtatatgctactggacaatggtgactctcattggctaaggtcaattttctagggaaagaggcaactgtgagccaagagtagccaacattcacagtagctggggatggctacactgtcctaggaaaggggatctagcttggggaccagcagtgctcattattaacatggaacttgcctggtatgtgggtagcatttgagaaataatagactttgagcagaataaatgatatcagagattgaagatcaacttactgaaataaggtgtgaagacaagattagagaaaaaagaatgaaaaggaacgaacaatgtctccaagatatatgggactctgtgaaaagaccaaacctacgtttgattggtgtacctgaaagtgacaggaagaacagaaccaagttggaaaacacacttcaggatattattcaggagaacgtccccaacttagcaagacaggccaatattcaaatttaggaaatacagagaacaccattaagacactcctcaagaagagcaaccccaagacacataatcgtcaggttctccaagattgaaatgaaggaaaaaatgttaagggcagtgaaacagaaaggtcaggttacctacaaagggaagcccatcagactaacagcggatctctctgcagataccctacaagccagaagatagtgagggccaatattcgacattcataaagaaaagaatttttgacacagaatttcacatccagccaaactacgcttcataagtgagggagaaataaaatcctttacacagaagtaaatgctgagggattttgtctccaccaggcctgccttgcaagagcttctggaggaagcactaaatacggaaaggaaaaactggtaccaaccactgcaaaaacacaccaaaatataaagaccaatgacactatgaagaaactgcatcaactaatgtgcaaaataaccacctagcatcatgatgacaggatcaaattcacacataacaatattaaccttaagtgtaaatgggctaaatgccccaagtaagagtcacagactggcaaattggatagagtcaagacccatcggtgtgctgtattcagcagacccatctcatgtgcaaagacacacataggctcaaaataaagggatgaaggaatatttaccaaacaaatggaaatattttttaaaaagcaggggttgcaatcctagtttctgataaaacagactttaaaccaacaaagatcaaaaaagacaaagaagggcattacataatggtaaagggatcaatgcaacaagaagagcgaagtatcctaaatatatatgcaaccaatacaggagtacccagattcataaagcaagttcttagagacctacaaagagacttagactcccacacaataatagtggcagactttaacaccccactgtcaatattagacagaccaagaagacagaaaattaacaagtatattagggacttgaactcagctctagaccaagtggacctaatagacatttacagaactctccaccccacatcaacattcttctcagcaccacatagcatgtattctaaaatcaaccacataatgggaagtaaaccactcctcagcaagtgcaaaagaacagaaatcataacaaacagtctttcaggccacagtgcaatcaaattagaactcaggattaagaaactcactcaaaaccacacaactacatggaaattgaacaacctgctcctgaatgactactgggtaaataacaaaattaaggcaaaaataaataagttctttgaaactaatgagaacaaggagacaatataccagaatctctgggacacagctaaaacagtggtgagagggaaatttatagcagtaaatgcccacatcaggaagtgggaaagatctaaaatcgacactctaacatcgcaattaagataactagagaagcaagagcaaacaaattcaaaagctagcagaagacaagaaataactaagatcagagcagaaatgaagtagatagggacccaaaaaacccttcaaaaaatcaatgaatccaggagctgtttttttttgtaaagatcaacaaaataggtggatgactagccagactaataaagaagaaaagagagaagaatcaaatagacataacatgaaatgataaaggggatatcaccactgatcccacagaaatacaaactaccatcagagaatactatgaacacttctacacacaaaacaataggaaatctagaagaaatggataaatgtgtggacacatataccctccgaagactaaaccaggaagaagtagaccaataacacattctgaaattgaggcagtaattaatagcctactaaccaaaaaaagcctatgaccacatggattcacagccaaattctaccagaggtacaaagaagagctggtaccattccttctgaaagtattccaaacaatagaaaaagagggaatactcccaaactcattttatgaggccagcatcattctgatatcaaaacctgacagagacacaacaaaaaaagaaattttcaggccaatatccctgatgaacatccatgcaaacatcttcaataaaatattggcaaactgaatccaacggcccatcaaaaagcttatccactacgatcaagttggctttatccctgggatgcaaggctggttcaacatacacaaatcaataaacgtaatccatcacataaacagaaccaatgacaaaaaccacatgattatctcaatagatgcagaaaagacctttgataaaattcaacatcccttcatgctaaaaactctcaataagctaggtattaatggaacatatctcaaaataataagagctatttatagcaaacccatagccaatatcatactgaatgggtgaaacctggaagcattccctttgaaaaccggcacaagacaaggatggcctctcttaccactcctattcaatatagtattggaagttctggccagagcaatcaggaaagagaaagaaatagagagtattcaaataggaagagaggaagtcaaattgtctctatttgcagatgacatgattgtatatttagaaaaccccatagtctcagtcccaaaactccttgagctgataagcaacttcagcaaagtctcaggatacaaaatcaatgtgcaaaaatcacaagcattcctgtatactaacaatagacaagcagagagccaaagcatgagtgaactcccattcacaattgctacaaagggaataaaatatctaggaatacaacttacaagggatgtgaaggatctcttcaaggagaactacaaaccactgctcaaggaaataagagagggcacacacacacaaaaagaaaaaaactccatgttcatggataggaagaatcaatatcattaaaatggccatagtgtccaaagtaatttatagattcaatgctattccatgaagttaccagtgactttctttactgaattagaaaaaactactttaaatttcatacagaaccaaaaaagagcccgtatagtcaagacaatcctaagcaaaatgaatgaagctggaggcatcatgctacttgacttcaaactatgctacaagtctacagtaaccaaaacagcacggtactggtaccaaaacagatatatagaccaatagaacagaacagagacctcagaaagaacaccacacatctacaaccatctggtttttgacaaagctgacaaaaacaagcaatatgaaaaggggaaagaattacctatttaataaatcgtgttgggaaaactagctagccatatgcagaaaacagaaaccggatcccttccttataccttatacaaaaattaactcaagatggattaaagactaaaatgtaaaaccccaaaccataaaacctctagcagaatacttaggcaataccattcaggacataggcattggcaaagtcttcatgactaaaacactaaaagcaattgcaacaaaagccaaaatagacaaatgggatctaataaaactaaaaagcttctgcacagcaaaagaaactatcatcagaatcaacaggcaacctacagaatgggagaaaatttctgcaatctatccatctgtcaaaggtttaatatccagaatctacaaggaacttaaacaaatttacaagaaaaaaaaccaaacaaccccatcaaaaagtgggagaaagatatggacacttctcaaaagaagacatgtatgtgaccaaaaaacatatgaaaaaaagctcgtcatcactggtcattagagaaaggcaaatcaaaaccacagcgagataccatctcatgccagttagaatggcgattattaaaaagccaggaaacaacagacgccggtgaggatgtagagaaataggaacacttttacactgttggtgggagtgtaaattagttcaaccattgtggaagacagtgtggtgattcctcaaggatctagaaccagaaataccatttgatccagcgaacccattactggatatatactcaaaggattataaatcattctactataaagacacatgcacacgtatgtttattgaagcactatttataatagcaatagcctaccgtagtaaatagcaatagcctaccctagtaaagtttaatattttgaatgaaatatattatgttgtcttacatatgaaaagaaaatctacaggcagaatcaaggaataggtcagaagtgcaagggagaactgatttcccactggcatgagtcaacagagtacacagaaaggaaggagtttgttttgacctttgaaaagaattcttgttagccggttcttatttcacctgagtttttttctttatttgattttttcaattttaggatccaatgatctctatgctaaaataagttgggtgaggaagtcttttcattcaagaatttcatcttcttaggccatagagttgactgctctggttcaatgcatcctgtctcccacccacaggggactgcttcttgcctagctctgttgagtatcactgtcaacctatcctaagtcttctatacctcccattttcttggtcatctcatttcttgtctgctggttgcactcctcccagctttactgagttcacgtaggcttacttttctttctgtatctttaattcttcccataattacttatttatatgttatattttattaccttcattattctgctcaaatttctccataaatgggcttctgttgatgttctttttaaggcgagataccataatttggcataatgtatcagtctattctgagcgttgataattcaaatgggacttttctctaagttttttctcctagccttacaaacatcaaacttgatttgaaaccaagaagtctttttcacaatttctgcttcacaaagaaaattattacctattagtttgcattgactaattagctaatgacacgtgatccaggctgattttaagtatgagtctctagtcatttttttttcctttagcacctaataaaagagaaatctcttccatccactctaatgctcatgtgaatccactagcacagtgccacacgaagcttagctaagcctgaggcaattgatcttctcccctctccttgatgagtgcctctaaaaaataacatagagcatcttaatggtattccaaaatctggaatattgccttctgtgactaatttctcagtgaagtaaattacttttctagttttacataactccaatttcttgtctattttttgaggggaaaaacatttttattttctaatttttaaattttatttctttcaactgttattttagaatcaggagtacatgtgcaggtttgtaacagaggcatattgcatgatgctgaagtttggactatgaatgcattgtcgctcaggttgtgagcatagttcctaatagttttcagtccttttctccttccctctcttcccactctagtagtacccagtgtctattgtgactatctttatgttcatgtgtagctagtgtttagcccccacctataagtgagaacatgcagtatttagttttctgcttctgcattaattcctttcagataatggcctctagctgcatacttgttgctgcaaaggacaggatttcatttttctatggttgcatagaagtccatggtgtatatgtgccacattttcttcatccaatccaccaccgattggcacctgagttgattccatttctttgctattgtgaataatgctgtgatgaatgtatgggtgaatgtgtctttttggtagaaaattttatttgcctttgggtatatacccagtaatgggattgctgggttgaatgttagctctgttttaagttctttgagaaatctcaaaactaatctccacagtagctggactaatttatatttccaccaacagtatgtaagtgttcccttttctacacagcctagccaacatctattattctttgactttttaaaaaaagccattctgattggtgtgagatggtatctcattgtggttttgatttacatttctctgatgttaagtgatgatgagcattttttcatgtttgttggctgtatgtatgtcttcttttaagaagtctctgttcatgtcctttgcctacattttaatgcggttgctttttgcttgtcgatttgttgaagttacttttgtttctttctttttttggaaagacagggtctcactctgttgcccagactggagtgcagtagcatgatcctagctcactctatccttaactccagggctcaagggatcctcctgctttagctgggactacaggcacatgccactatggccagctgatgtttttcttttccttccttccttcctcccttccttccttccttccttcttccctccctccctcccttccttcctctctttctctcctcctctttctctttccttccttccttctttccttccttccttccttccttccttccttccttccttccttccttccttccttccttccttccttccttcctttcttccttctttccttctttccttctttctctcactttttttttttgagtcagattcttgctatgctgcccgggctggtcttgaacccctggcttcaagcaatcttccagcttcagccacacaaagtgtggggattacaggtatgagccgtcgcacccagcctgttacttatagattctggatataagacttttgtcagatacatagtttgcaaataatttcacccattctgtaggttgtctgtttactatattgatagtttattttcctgtgcacaaactacgtaggtcacacttttcaagttttgttttggttgcaattgctttccaggacttaaccataaattctttgccaatgccgatggcaaaagggtatttttctgtttttttccccctaagatttttatagttttgggtattacaattaagtctttaatccatctggaattaatttttgtgtatagtgatgggttggggtccagcttcattcacatacactggtatgtggctagccagttatccccagcaccatttattgactagagagtttttcccaatttcttatttttgttgactttgtcaaagatcagatggttgtaggtgtgttactttatttcagaatttgctattctgttccattggtttatgtgcccatttttataccagtactatgctgttttggttactgtagacttgtagtgtagcttgaagttgggtagtgtgatgcctccggctttgtgcttgttgcttagattgctttcactatttaggctcttttggttccatatgaattttagaatagttttttcctaattctgtgaaaaatggcattagtagtttgataggaatagcgttgaatctgtaaattgctttgagtagtatggacattttaaagatatggattctcctaatccagggtatgcaatgtttttccttttttgtgtgccatctctgatttctctcagcagtgttttgtagttctctttgtagagatctttcacatccttggttagctgtattcctaggtatctattctttttgtgtctattgcaaatgcaattttgttctttagtctttaggaccctgctcaaggtcctgcagcattgccactgctgagccatgctcctgctgctcggcccagcactccagtgtcccagctgtcagcttgaacagacagctcgaacattattggtgtatagcaatgctactgatttttgcaaatttgttttgcatcctgaaacttcactgaaatcttttatcaagtctaggagcctttcggcagaaccttgagggtttttctagatatcaaatcatactgtcagcaaagacggataatttgactgcttctttccctgtttgggtacactttatttttttctctttcttgagtgctctggctaggacttccaatactatactgaataggagtactgagagtatacattattttcttgttccagttctcaaggggaatggttccagctttttcccattgagtatgatgttggctgtttgtcataggtggctcttattattttgtggtatattccttccatgcttagtttgttgagggtttttatcataaagtgatgttggactttattgaaagctgactgcatctattgacatgatcatatggttttgcttttaattctgtttctgtggtgaatcacatttattgattcatctatgttgaacaaaccttgcaccccaggaatgaagcctacttgaccttgaattaactttttgatgtactgctggattcagtttgctagtatttttgttgaggatttttacgtttaagtttgtcagggatattgactgatattttcttttttcattgtgtctctgctggattttactatcagaatgatgcagactacattgaatgagttaggaaggaacccttctcctcaatgttttgggaatagcttcagtaggattggtaccagttcttctttgtacaactggctgaattctgttgtgaatccatccagtccaggggttatttttggttggcaggttttaaaaaattattattactaactcatttccagaactcattattagtctgttcaggttttcaatttcttcttggttgaatatatagaggttattttcttccaggaatttattcgttttctccaggttttctaatttttatgaatagtggtgttcctagtattctcttagggtcttttgtatttctatgggatcaattgtaacgtctcctttgtcatttctgattgtgcttatttggaacttctctcttattttcttcattaacctacttagtggtgtatcaatcttgtttattcttcctgaaagacaacttttggttttattgatcctctgtatggattttcaagtctcaattttgttcagttcttttctgattttgtttatttattttcttctgctagcttttggctttgtttgttcttctttttctagtccttctaattgtgatgctagaatgttcacttgagatctttctaatttcttgatataagtatttagcagtataaactttcctattaacacctttagctgcaaaccaaagactctggaattttgtctttctgttttcattaatttttgctctactttgttgtttacccaaaagtcattgaggagcaagttgtttaatttccgtgtaactgtgtggttttgagagatctccttggtaatgatttccatttttattacactgtggtccaagattatgcttggtatgatttcggtatttttgaatttattgcaatttgctttatggcttcaatttctcaataattttgagattaatatcatgtactatacagaaggtaacatcatcacagattcaggaggaaagaaacgctttctgttgaagttttgatatcatgtctgaaatgagaaggaaacagcttgctcccttggatccgtggttccgcctgttgcctctagagggcgatgttgcatcaagtaggcatctgttttcatcgcagaccatcctcatccattgagcctcctccctgtagctggctgatgtagctcgttgatatctgtgtggatagggagctgtgacgagagcaagaggtcagaacacatccaggctccttaagggaaagcctctttctgtttctgaaacttttcaaagccagggacttgtccaatccaacctcctcacagttcctagctcctgaggctcagcgcccttggcttctgtccgcccagctcaaggtcctgcagcattgccactgctcagccatgctcctgctgctcgtcccagcgttccaggtgatttttaccctgggtgagtaacattccattctttttccttccacagaagtgactgtgttgtaactgaatctaaattgagacacattttttactcaaacagcattgatgttgcaggaggaaccagagcccagtctgtgacccagcttgacagccaagtccctgtctttgaagaagcccctgtggagctgaggtgcaactactcatcgtctgtttcagtgtatctcttctggtatgtgcaataccccaaccaaggactccagcttctcctgaagtatttatcaggatccaccctggttaaaggcatcaacggttttgaggctgaatttaacaagagtcaaacttccttccacttgaggaaaccctcagtccatataagcgacacggctgagtacttctgtgctgtgagtgacacagtgcctgagactgcaggagagctgaacacaaacctcctgagatgctgagactttctgtgactcaagaactcaacctgtggagctttcaagagggtcccttttttctgtgcccgttttgaaggcacatagggcagggtgggctgagcccttggtagggtttgtctccggaataattgctccaatgtcaatgtcatgccacattcagatatgctttgtcccacatggaggtttcctgatgaatttcttcagtggggacctcctccacactctgaagaaagcacatcataaggtgtcagagctccgaaataaaaggcaacaacatttttatacaaaattatttctagcaaccattatgattagtattgcctcaggtgttaacttgtgaataaccgatgtaattgattagaatgttagctaaaagctgtgcaggatggattctcaattagggtaacccatacagcacagattctcaatcagtgtgctgtagattctcaacctagatttgaagcttaacttctagcacatacataatatcccactgtgtggtattgacatatttaaagtaaattagacataatatcaagatttttaatcttgtgagcattatgcaaaacaggaaattaaacataaatcttaatacaatattgaaaaactaagctgtcaagttgtgatcttttttaaaacagctattccagtgatttccaagttacaaacttgagggataaaaatgtaaccaatataaagatatcaaataccctagattcaactactttaaaaactactttaaaactccgaggcattttattttaagagattacacagatttattatataaaattacacaacaaaaaattccagttgcattatcagagagtatatgaattctaatgggcatatccaagaccagggtaccctattacttactctgaaataattatatcgaaaaaccaacatgtttaagatattttatgtacatgattattactccaaatttttatttgtagtttgatcacatggtagaattaaaaaatgcctctcaaagtattataaaatgttcacacatacagaagttgtcttccttaattcaacattttgtaatttttgatgacaaaaattatgaaaggaatcatctcacttcttaaaaatatttacaattgcctaaatctcctcttttaaaatgagatgaagttgtattcttcccttattataaaacatgtgtttaaagtagtttaaaaatattcctatgaattgagctaaaagagggtagagggtttataataaaaaatatttagacttggcttcttctcttgcaccaaagactcaggttcttgcttatggtttctttggctgctgacattctttagttacttcttagcgtgccacctcttccagttttactttcgtcctcatttcattttcgtttgtagtttttcttacagatttgtcttttcattgtgccttttatggcctgttattttgattatgttcaaattttacaggccaagaacacttaacatgatgtctattttaacaaatttttgaagtgtacaactcagttaactattggcccaatgttgaatagcagatctctagtaattcttcatcttatctgatagaaactttgtaccccttcatcaacacctccccacttcttcttcccccagccccaagaatggtaaccaccattctactctctacttctattagtttgacagttttaggtatctcatgcaggccttctatgactggcttatttcacttagcataatgtccttagggttcatccatgtttttgcatgtggcagaatctccttttttaaaagttgaagaatattccattttatgcatatatcacattttcttcattcatccatcagtagatatttaggttgttcccatatcttggctaatgtgaataatgcggcagtgaccatgggagagaaaatgtttcttcaatatcctgaatttaatttttttgataaataaccagtagtgggattgctgaatcatatggtacatttttaattccagggggaaactctttactgtttttcataattgctgcaccattttgcagcaagggttccaacttctccacattcttatcaacattgttgttgttgttttataatagccaacctaaaaggtgagaggtaataactcattgcgatatctaatttctctggtgattaatgatgttgagcagattttcatataacttcagccatttgtatgtcttctctggagaaatatctactcaaatcctttgccaatgttttaatcaagttattaaaacattgatagttataggagttccctatatattttgaagattagccccttatcagacatatagtttgcaaatatttctttcactctacatgttggctttttttcctattgattattttctttgatgggcagaatcttttaaattttataaagtcctgcttatctacgtttggttttgttgccattgcctgtggtgtcacatacaagaattggctgttgcttagaccacatgtcatggagagtttcccatatatttttccaatagttttacagttttgggttttacgtttttaattaatattgagttgatttatatgtattatgttagctagaagtccaatttcattctcttgcaagtggatattcagtttccacagcacaatttgttgaagaactactctttccccattatgtatccttgatgcccttgtcaaccatcagctgagtgcgtatgtgtgggtctatttttcagctctctattctgttccattggttcgtatgtttgtctttatgatagaactatgatgttttaattactgtagctttgtaatatattctgaaaccaagaagtggggtgcttttagcattgtttttctttctcaggattgtttgagctattctgggccttttgtgtttccagagaaattttagaattaaaattttagttttttctatttccataaaaatttcattgggattttgatagggatagcattgtagattgctttgggttgtataaacaccttaacaatattaaatcttccaattcatgaacatagactatctttcatttatttgtgccttctttaatttttcttatgaatgttttgttgttttctgtgtacaagcctttagactaattagttaagtttacttctaaacattttaatcttttgtagctataataaatggattgttttctggattttttttcagatagtttattgttaatgtgtagaaatggcactgatgggcctggtgtggtggcttatgcctgtaatcccagcactttgggaggccaaggcaggcgaatcaggagatcaggagttggagaccagcctggccaacatggtgaaaccctgtcactactaaaatgtaaaaaattagctgggcatggtggcaggaacctataatcccagctactcgggaggctgaggcaggagaatcacttaaactcgggaagcggaggttgcagtgagccgagattgcgccactgctctccagcccaggcgacagtgtgagactctgtctcaaaaaaaaaaaaaaaagaaacggcactaatttttatgtgttgatttttataccctacaactttactggattcatttattatttctaataggcttttttggtagcgtcttcagggtttttaatgaatttatgtcatctacgaacagaaataattttacttcttttctgatttgagtacttttaatttctttttcctgtctatttactctggctaggatttctagtattatcctgaatggaagtggtgagggtggttacccttatcttgttctgatcttagaggaaaagcttttttgtgtttcacacaccactgagtgtgatgttagctgtgggctttttatatatggcctttattatgttgggggtaatttcccaatttgttgaatatttttatcataaaatgtgaagcaggttcactgtgtactggttaccaagttgtctgagtccagtgagacagaatacacatgcatacaacaaggtacatgaaacaggtttattaattacagataagcaagggacaacagaagcttaggtttcattgcaaacaggtcccccagggctcaggaaagctgtctagggtggatagggtgtcatctgcatgtggcccagttgtaccacacctgagggaccccagaaattagcatgccctaggttttagacccctgggtaatatgataccctgggccaaaaagtactgaaggacactgtttctagggggtatctgaaatacagccagcctgttccagccatttcattcctgtctgaagatgttacattcccagtacattctatagttattcttatttatttatttatttatttttgagacagagtctcgctctgtcgtccaggctggagtgcagtggcgcgatctcggctcactgcaagctccgcctcccgggttcacaccattctcctgcctcagcctccccagtagctgggactacaggcgcccgccaccacacccggctaattttttttgtattttctagtggagacgggacttcaccgtgttagccaggatggtctggatctcctgacctcgtgatccacccgcctcggcctcccaaagtgctggaattacaggcatgagccaccgcgcccagcccattctacagttattcttgagaaccacaaacaagaaagtggagagaactgggttggtccaagaccacccagagaaccatcctgcatgaaaggatgttgaatgttgtcagattctttttctgcatctattgagatgatcatgtaatttttatccctcattgtgttatgtagtgtgtcacattcattcatttttatatgttaaaacatccttgcatcccagggataacttccacttggttattgtatgtgatcctattagtgagctattgaatttggtttgctagtatttcactgaggatttttgcatctatgttcatcgggaatattggtctgtataccttcttgtagtgtctttgtctggctttgatatcagggtaataatggcttcataaaataagtttagaggtattcccctttgaattttttggaagaatttaagaaggattagagttaattcttctttaaatggttgatagaactctctaatgaagctgtcaggtcttttgtcttctttgttaggaggttttggattactgaatcaatttccttaccagttataaatctgtttagatttttttatttcttcatgattcagtcttggtaggttatatgtttgtataaatttatgcatttcttctaggttttccaatttgttggtgtataattgtttgtaatagtctcttaagattcttcttatttctgtggcatccattgtaatgtcttctcttacatttttggtttatttgaatcttctctcttctttttcagtctaattaaaagattgtcaatttagcttatgttttcaaaacttagttttgcttatttttatgttattttctactctatgttttatttatttctgctctaatatttattatttccttctttctactaaatttggacttcacttgttctttttttctagttctttgagatgtaaagttatgttttttgtttgagatctttcttttgaattcaggtatttattgctataaacttccctattagtactgcttttgctccctctataaattttgatatgttgtgtttttgtgtttgtatctcaaaacattttctaatgtgccttttgatttctttgaccaatttgttgctcaagaatatgatgtttaatttccatatattttggaattttctagttttgcatctgctatttatttctagtgttattccattctcattagaaaaaatacgtggtatgatttcactttcttaaatttgttgagacttgttttgcggctgggcatggtggctcccacctgtaatctcagcactttaggaggctgaggtgggaatgcttgaggccaagagtttgagaccagtctgggtaacagtgagactccttctacacaaaaaatagaaatattgacctagtggggtagtgtgcagatacctgtagtctcagctactcaggaggctgagatgggatgatcacttgagtccaggagtttgaggctgcagtgagtcatgatgctgtcattgcactccagcttggacaacacagtgacatcctgcctcaaaaaatgaaacaacgaaaactgccctctttgttttcagtgaccctatgcatcaggaatacactgggtcctatcagtgctccttgacaggtgtgatggaagccagtctctcaggcagcctgtggcaaagctagaatgttggatgtaatgtccaagtctttccctccccagggagaggctgaaactggggctttcctcttatttatgggacacagtactgggggtaggaaaatgtcagaaaccctcctgtcatctttgatgtggttggttgcttgctcattcaaggtactggagactctgaactagttactggatttttcacaagtgaattgatttatttattgctattgaattggtgtgtccattggggaaaagagggtccagggatttcttttctgccatctttctgatgttacacctttcacggacagaattcttcctgttctcatgggcttctttatttgcccttcaccagaactgacctcctcttgggcatctagttgaatgtggttttcactgtgggcatggtggtcctgcctgagtgccagcaggccaccctgcaatgagagctccatcatacactttaaactttccttgatatttcttttagctgtgcctcttaagcagtagaaggctggatatgaaaaccattcagataatttctatatcttaatagaaaaatttagccttttaaacttatatatgcatgcatttatggctacaactaatatttttgacttatcttacatggcatagtgacatttgacattgtagaacacttccttcctggaatgctttctttattggtttttagaaatcccactcttttttccctctgcttcagtattgtcagttgttccttctcagtcttttttgctgttttttccccacatttaactaatctttaaacattggcaagcctcagaaatttatccttgaaaatctttttcctctataaatactttattcacagctggttttattcagtctcttggctttaaatcccatttaaatatccaaacttataactgaatcccagataactcatctggattctggattcgagtatcaaataatctatttgacatcttctttttgacatcctccacttaatatatctgaaaatagtctgctgaatttgacctctatactcactaagccttccttacatcccactcgcttcttgtgaacatttcttcattttggtaaaagacaactccatttaccaaatcttctaatccccttagccaaaaactttgaaatcatcattgtcttatcacttttctcacatccccacttgatccactaggaattcctatcagccatttcttcaaaatatccccataatcaatcagttctcatgacctttactgctaccactctgatccaagccacagtaatctcttgcctagttgattgaaagaaacctaactgaacttctttcttttgccattgttcctcttctgtctgttctccatgcagcaggagaagcaatctctttaaaacataattcagataatttcatttctgtgctcacaactatgaaatgtcttaccatctcactcaaaggaaaaccaaatgctttactataatatacaagtccatttagctccctgccatatctttgacatttgacatcagctaccaccttcctacttactcccactctccagcctcaatgcacttattgttgctctaacataccaattattttcctgcctcaaggtctttgcagctgctcatttctctgccttgtgtactagtactccaggtaaccacatggcttatttctacactttattccaccaaatagccatgcacaaaatatttactgcagattatttttgtaatagtgaaaattaaaacacaagatgtttctcagagaatggctacagaaactgtaataaatctttactatggaatattaggaagcaaacatgttaacatcaataggttatcaggacatataattgggtaccaaacacattgcaaactgctgtgtgcttgaaagttatagtcagacaaaaatttaaactgtatatatattgagtatgtattcatccatgtgttctgcaataattttaaattaataataaaaaataggctccaatttctttctacatctttgtagaaaaaggctccaactccaatttctttctacatctttgtccatttgctcttctttcattttcatttagtaagggcctctattcaactcacaagcttatttagcttcttgattgcattctgttttatcttttctaggaacagacaacaatgatcatattcttaaatctttgtctaaccatcctttgttttaagaaatggctccttatttctgggttcattttgtactttttgaggtgttacttgatatatatgaaaacacacacatgtgcatgtttgtctttcccactaaactgcaatgtcttgtgagtagagaaaatgtcttactaattttttaatttcgtaagacctagcacaagatctagcttacagtagacctcaataaattactaaagacttactttgaaataaattggagaaatcacattaaaccttgaggaagcaatttgataaaatattttaatatggtaatctcttgtacatggaatttggaggaagaaaccagtttcctttttttaaaaaaaaaaaatcaccataagcctgacagtttttttgctcttgacaatctgggtggttcctcaggaaagaattgggatgaaggctctgggactccacagatgagttagtgggcctgatggtttcagaccactaggaggctctctaggctttactctaaatgaggaaattttccctcaagttctgagatagctgactcagcgaaaaactgagagttagcatcagttagcaaagcatctgaactagtcatatatgaaacggacagggggagtctccatttattcatctgcaaagatgttctgtggctgtgatgggtgtcacagagacggtctcccaagaagactgatcttagaaatcaacaagggaaatgataaagctggaagccttacagctttaatttttatgactaaaacttctaaaatatgagtctccattctgactttgaaattatttcaataatttccaccttcttttatacctcctttgaaactagaaaaacaagaaaaaggaaatgagaagaaatgagaaaaaaataatgaaaatattcagagagaggataaaagagagtaaaagaaataagaggttgggggaaaaaaagatgacacatttaactgaatttcaaaatgtggtctatgcctcatatagtttctgtgttgcaaggttaaaaagttctagagatctgatgcacgacaatgtgaagatacttaccactactgaattgtacatgttaaaatagtcaagatggtaaatttaatgttatgtgtttttttaccacaataaaaaatgtgacctctacctcttgttcacagagcagaattgaccaggtggggctgcaaagtgaatggagaagtgttggatagaagaagagagatggaaataagctggggtggccatcatatacacgtgctatttctctatcaaccaaagtctcactggagacattttatatgttcatgatgactatatgtcctatgttaacagaattctcttaatttaattgtattgtatttactcctttaagggtgattaaataaacgatgcattcgatgagatattctttctttgtgagagctttcttataaataaaatcacaatcacttttcaaatcacatgtcctgattttttggctaaggaaattgggccactgaccctgataattttttcaggctgtacttgatccagatgaggctcccatttgtctctgagatatcttttccctttcttcactcccctcctgacttgtccgattactgggtactttaagtggaggcaatcctgagagcataaaaacctagacatttctgtgtctctagtcagcagtgcggcactcagcagggtactgacgtcagcaattacgcccgtacactgcaggaaaactagaggaaaatctctttgctccctgatctcattgtattccacctcatttaagtaacagcatatctcttacttttttctcagctatttggaggccagaggagagactttctcaagagaattagttttcttttttagaaaaaaatatatctgccggagacgctatctccatgacccatagttttctgctcttaatcccggagcttctgtctacttgaccccagatttatatctgaccccaaaatgggacacctcacttgagctctctcaacacagcttgactgggagctggagaaaatctttggttaaggaccagggattggggactctttcaatctaccatttttctagaatttccgtctttctgagccaaatgattgttcctttttttatggccttcttttcttttcttttttcttttttttttttaaagtgtatagaactaaaatcccaaagggccatttcctgtgtggggaaggtcagaatcaatgatggtggacggaaaataaaataacttgatctggcaatgtttaaacatttcactaaaatatctgtgtagaaatttaaatttctatgaagtgtaatcgatcaatattttttcttatgttttttgactgttatgcttagaaaatccatcaccattctaaatttattttaaaaattttttattttacttaaaatattaaatgttacgtcctttgaactttatttgataacaggtattaaggtaggcatcctaacttatctgttaacttccaaatgattgttaggattgcacattttcccccattttaactaagtttccaaatgtatttgtatatttgaactttgtattctacttcattaagccctatatgtggattttaaaaataacattctattgcaattagtatagcatcacacttttactgaggaggaaattctcattctctgaatttgaaggcttcctgaagcctgagttagctgcagtattgtatttggcctctagagagagatgttacacaaattgaatttgatagccaaaaacaacctgatctttttgaagaatagcttttggctatacatgccgggtaaactcatccacctctctgtcagagtgtctatgtggctgaatcgtttccagaaaagacctccagaaaatagcttcctgtttctccacaggtcagacatgaagcccaccctcatctcagtgcttgtgataatatttatactcagtaagtaaagcctctttttgttctatttttctatggtattctgatttagaataactttaatgaatattatccccagtctgtaagacttttcctgatccagaattggtgttataggaggaacaagagcccagagagtgactcagcccgagaagctcctctctgtctttaaaggggccccagtggagctgaagtgcaactattcctattctgggagtcctgaactcttctggtatgtccagtactccagacaacgcctccagttactcttgagacacatctctagagagagcatcaaaggcttcactgctgaccttaacaaaggcgagacatctttccacctgaagaaaccatttgctcaagaggaagactcagccatgtattactgtgctctaagtggcacagtagctggttttgcaaggaagcagaacacaaaccctttaaatacaggaaatatttctttgcaaactctctgtatggccacagcagggcattctttctccagaaattaatattgagtttatctcgtagatattatatcatcagtcatcagttagctatagattaacctcataattttgtccaaaaaattctcattatttaccctgcttaaattaaatttaaaaatagtaaatgtatttattttgtctagtagtactggaaacatactttcgaaataaaaactatattgcactgcataaaaagtattcttttctttgttcagaggtactgtccaggcttccatggtgcagtcctacctcttcaactcctctgctgccccacgtgatccccacatgtggttgtcaccacatacctgagcatagttcctcaaagtgctctgctgtttcatggcttatgattgttcatctttctatatctattacccttctttccatgagtttcatagactcctcctatctcaattggtgtccagccaggaaaaaagaagcccagtgaagtttaatataaagatttattaaataataataagtaattaactactaatgggtaaaaaaacctctaaggaatataggaatgcacatgtaagcagaagttcctgtctctaggactaaggtagaatcccaggaaaggaacagattggcataagcatgacccctcctgccaaggctatgattcagatctcattgagagtgtgtagctggagcttgctgcatagtggagtagtttgctgaggtgccagagaaaaatactgacaagcagaaaaatacctaccaggattacaacacaattcatgggaagcccgcaaacgagtgctgctgaacttgcttgtggtggctgtgaaacttgccaagaaaccacctgtcgggcttgctggaggggagtgccactggtgtcctacaggccaacgaagcatagtggacaagaagtgtggaaaacataccagaaccaggaagagaagcgtcatccttctgcggggtccttccagccccctctactgacaaagcttaatatcaaatatttagagggtccagatccagttcacaaatagggtaattagggtggatttggagctgagaggtaatacattgataactgtcacaccctatcccttgggctactgatctttcatatgcattcctttttttctttcttctttctttttttgagacggagtctcattctgtcacccaggctggagtgcagtggcgcaatctccgctcactgcaatctctacctcccaggttcaagtgatttttctgcctcagcctctcgagtagctaggactacaggtgcctgccaccatgcctggctaatttttatatttttagtggagacggagtttcaccattttggccaggctggccttgaactcctgacctcaggtgatccacccgcttcagcctcccgaagtgctggtattacaggcatgagccactgcacctggtccatatgcattcctatatgcacatttcaacttccaaacaatagtgaaatgacactatgttgctacctaataagctgaagctgtccttgaacaagtggagttttcattcttatctcccaaatgagatgatccatagtcccaacaaccactgtatgaatccctgactgtatcagccacatctcaagttcagaggaagttctactgaatatgctgttatatacagactaaattataaagctaatctccaataatttacatataaaataattatgataagaaagagagaataaaatggcagcatatacaaagaaacacttacatataatgagcaaagataaaatacagaaagctaccacattccttgattccagacttggtcctgggcttcaattgacatagacagcttccttctcttgttacgtattttatattcttctgccctcatccacgtcatcggtggattggagttatttacctggtggaatgacaaaaatcttcattctcgaagagtctgagttctcaatagtcatggcttttaatttgttgctgcaggtttcccttaacttttactattgggcacgaaagtgccattaggctcctcaaaaaaatcccccgggttttagatgtagctctctctacatgtgttgtatggcttctggagctactcgcccccttcctaacaactttgcaacatgttctggtaaccatcacggtatattaaaactttatcgtatctcctcttcctgttgagctgaatgttccagagaagggccgttatgttctctctggctttaatctaaccttctaacacagtatggagcacacaatatgtacacagtgaaggaatgttaaataaattcatttaaacaaatagaaaaatcagcaatcctctcctgtgagcatgtgagtcaacctccactaatgtgatttcactggtttcttcagggaaccgtgtcaaaccaattaatacaggcaaacaatatgttcatctgggcaaacagatgcctaatcaggttaagagttttcttaattggaaaaatagcttgcttatgaagacaatagttttatcaataaaactcacctcaagaccttcggcacatcattgtaccaatcctaaactcgtatatcatgaactagagaaaatagctgagaactagagctagatagtgagttcttggacatgcacacaaaaagtgcagtctataaaagaaaaaaacgataaattagccttaaataaaattaaaacctttggcattgtagaaagaccttgttaatagaataaaaggcaacctatagacagagagaaaatgtttataaatcacacatcagacagaagtcttatatctacgatgaataaagagcacgcaaatctcaatgtaaaaaagaaacaaataaataatccaattagaaatagaatagatatttcaccaaagtagaaatatgggtgaaaaataagcaaataaaaagatattcaatatcattcttcactagcaaaatgaaaataaaaatcacaatgagatatcactataaacatattagaacagctaaaatacaaaacagtaataatactaaatgttggtgagtatgtagagaaatggacacttttatacattgctggtgggattgtaaaatagtacagccattctggaaaataatctggcagtttttttataaaactaagcatgcacttatcatatgatcacaccattgtgcattggacatctatcccagtaacattcacataaagtcttatacaacattcatagtagctttattcataattgccaaaaactggaatcaacctagatatttttcaacgggtaaatggttaaataaactatcatagttcataccatggaataatatgaaaaaaaaagaacaaactgttgatacatggaacaacctgtatgggtcaattcccaaaggttacatacagtttgattccatatatataacattctcaaaataacagaactataagagatggttgctaggggacagagattgggcatgggagggtgtttgtgcatatagagggttaggatgagagaattctatgttgatggaacagtctgaatcttgattatgttggtggttatatgagataaaatcaagaaccacacacaagtatgcatgcacacacgtggagaaaagcaagaaaatagtgacaattgaatactacctgtagtctagttagtggtatttgaacaatgtcaatttcctggtatttatattgaatttcagttatatacgatgtcaccactggaagaggctatgtgaagagtacatagggttctataaactattttggcaacttgccatggatttataataatttcaaaacaaatacagtactatagtttcaaaaattgcattctttactctcaccaccaattttatcagtaaaaccgctaagagttgggaaggtgtgaagccgatggtagtggatgcaaattttccaaaattctaattttcacttggaagctcaaatattatcatgggtgacaaccactattagttgttttcctcaaaatggcaggctcacattttatcattttcaagaacataccttccaactacccaaatctgctgttctgtcactcatgccttcaagtaaaaaaaaaaaaaaaaaaaaaagttctatgagaaacagctagtttagctcacaactcaaacaatactccagtgtctttctctcttgaggcaccactgtgttagtacaccacagatgaactttatgcatacgtcctatgtcatcacacagaatatttaaacggtgtactctcaagggtcaagatttaatttaaaaaattttgcttctacatctaggacattgttgagtaaaatctttttctcttgccagtgtggtggtaatgattatgtacaatgactactagaatattttgggttcatttattttacctgtgttaaaacatcagcaattgcatttgcttcatcagtgtaaatgtcaacacagtgaaagactcaagtaatatcagcactattataaaaatagttttattctacctcacagttttaactctatctcacagttttcccaagaggtcagcaatatttctggttactttttgcagatacagctaaatacatacaaatattaaaagtactatattcttgacctcctcattgtgagacattagacacatcatttaatttctttgaaccagggtacatcttttaactactattctaaatttgctcacagactgtttcaaaattatctggaagagagcagacagattaaaatttcagtttgttaaataacactggttctttgctcaaaaagctttcatatgtctttatttcgcactgaaaaacataaagatttattttggcagtcatctgacccagacccttcctctagacttatgtcttggaaccctccaatctacatattgctctagccagcaatctcttcttctcatttctttttttcctttctctgttctcctgtcttctcatctttcccatctctctctctgttttacacacaaaataccttaaaatcaatttttgggaacatttataaaatactctagaagattcttgctattctttttgactgctctgcatcaggacccattttcttataacaataataatttttcagtcactaatgaatgtcaggcactgtgctaaatgacattttatgatctcatcgttaaccttcaacagctctgaaaaggtagtattattatttactcatgatccatgttctacagccaagataatgtaggcacagaagacagaaacagctactgaactgatagatgtaaacctgacttcgatggcctgactataaaacttcctctcttcctggacccgcctgcctcctgccatagaaactaaaacttctaggtattcactgctatgggctgaactgtgtttccacaaaatgtggacgtagaagcgctaacccccagtacctcagaacatgactctatttggagacagaacttttaaaggtaaagttaaaaggtggtcttgagggtaaccactaatttaataagactggcatccttaagaggagattgggacagatagcacaggcaaagggatgaccatgtgaagacacaacaagaaggcaaccatttatgagtcatggagaaaggcctcaaaagaaactaaacctgccagcactttgaccttgaaattgtagtccctaaaatcatgagaaaataaatgtttgttgtttaagccatgcagtctgtgatactttgttatgggagccctggtaaactaatacagcctactggttaggcttgatgtgggcacatggcttgggctccaacaattagatgaattgttccctaactttcactcaggagttacttttgcaaaaaaacaaaaacaaaaaacaaacaaaaaatgagtaagagtttcctttttgagagtggtggtaattgcaacaaggtggacatgagagtttacaggctacaaggcagtggaattgtagctgcatacattgtcctgcgtgaacagtcttgcataaactacgggcagtatctggagctcaggaaaggagccagtgggatactcagaggagtgcttctccagagtgattttctgtactgctgctgacttcatagcttttgagttcagttctctgaccctactggagattctgaggtaaatccagtattcattaatttattccttttctacttaatttaggcagagtccatttctgttgcccatcagtaaaaaccttgacttgtatataatctcattccagggaaaattttttaaaaggaagctcgtaggtacatgatcagaggtcatagtaactacagggaatttaacagtgcttctcagaggtagtctgaaaatattgagcaccaactgtctttcgtagttgagttcttacctgaattgaaatgtatctgttcctattctaagttagaattagatttcaataaaggcagagactggaatagctttgtaatttcttctgagtcagctctgaacacacgtcctgatggcagcaggatgatgttacgatcacaagagggcagtgcctccctctcctcagactaacttggctttaaatcagcctatctgcattgaaaggaaaggactgagcttgcctgtgactggctagggaggaacctgagactaggggacagaaagactagggattcacccagtaaagagagctcatctgtgactgaggagccttgctccatttcaggtcttctgtgatttcaataaggaagaagaatggaaactctcctgggagtgtctttggtgattctatggcttcaactggctagtgagttggggattttggtgatgggaatggcaagaccaaattttagagcccacagggctgaggggtgaagtgttcttattaatttggaaatgtaatttgaaaatgtaatgactgactcctggtcccggacctgtgtttctgcctaggggtgaacagtcaacagggagaagaggatcctcaggccttgagcatccaggagggtgaaaatgccaccatgaactgcagttacaaaactagtataaacaatttacagtggtatagacaaaattcaggtagaggccttgtccacctaattttaatacgttcaaatgaaagagagaaacacagtggaagattaagagtcacgcttgacacttccaagaaaagcagttccttgttgatcacggcttcccgggcagcagacactgcttcttacttctgtgctacggacgcacagtgttccccaggaacctgcagcctctacgcaaaccctgccaaagcagcttcttagaagccctaatagtgggtagaattagtggttatgtctttcagtcaagaagagtctacaaacagctggcaaagtaaaaggggaactctttcaaattcgtgattttttaaaaagcatcttggactaggggaaaaggcatgaaatttggaacaggaaatggaaatgccaggctcagttctgctaatcctggctacatagggacattgtcagtgtagcagccttcaatttcctcacttgaaataaaggatatggatcaatgagcccaaaatattacttaatccctaattttattagggaaaaaaatcactgggcacttgtggaagaggaggaaggctgcacagttttagaaggtctcatttgtcctatgtgcagccctcccaagacatcagtgggtctttaaggtgcatgaggtggctcttaggttcctctaattcttgtataagaagcagtagattcattaagcattagaattggaagaggtcctaggactctcaaccaagcttttcattttagagctgaggagtaaaaccattgcataataagacagacaattttctgaatctttggagtgatagtgacaaatatctggatctgatttcaccatttattagttgtatgattcccaagcttcaatgtctctattaggcaaaatgggaatttataagaaagtaacaacttttccccatccaaaggagagataggtgtttgacactaccaggtcctaaaacgctgtgttttgaaagcaggcatttttagtaccaaatacataacagtttttcagctatttattcttgctcctactgagaaataaatactgactatagttttcttgacacagtttagatactactgaaaatgtgtttgtggagaaaattagagcatttgtatttaggttcatgctttggtgagaaaagtgggggagggcagggaaaggttgtgtcagaccttgacccattaatattagctgtaccagaatcactagagtatctttaaagatctggactattaagctcaattctggcttactcaatcaggctctgataaagtgatgaatttcaattgtaatgaatatcttctatatatgtaagagattggctcaggttcacatttaaaaaacccaaacaataatgtttgtaacaagattgacgagtttttttccacataaaggagctctgtaatattcagggctggtgctgtagcttcatcatgttacaaaggaactagggtctttctagcttactgtttttcactcttaatgtgtcactcttttttttacactttcaagagactgatagagatccttccactttatacaccttccagactgaaagaaggagaaagtcaagggcacatgtacatgctggctgagtcagtcttttccagaagctccgcccaatggcttctgcttacactcatttgctagagtggtattcgatgtttccacctcctcctatctgcaagggaggctagaatatcaggattattatctaagtatatttctattcacagcaaaatttgggttctattagtaaaaaaaataggtgatgatggacattttacagacaattagaagtttctgccagaccctcagtttaggacatattaggactcataatatttttggttcatagttatttttgaattaccatatccaatgtattttcaagttctattgagtgtaccacctactaagttttccagaagacattacaacctctataacctaattcacctccacacccaaatttaaaattctccctaatcgcttactcctctgcccccagcaagcttgacagaccccatcacttctcagtatagtgctttgtacacagtgagggtgaccttttcagagtgcaaatttgaccatgtcaaccacctgggtcctcactggttcttagagtagaaaaaaaattgcttcatgtgatttacaaaaccctccatgatttagactcttaatacctctccagtatctttccacaataagctcctaatttatctttttcttcaatactggtcctatctacgtttcttgaatgcactttgtttatcttatataaccccctcaaagcaattttaggatacattcttactctttttaaaaaattattttctcttcccttgagagtagagcccagtaaatgcctacttgttctcatacgtctgttcaagagtcagtaatagaagaaagctcaatacgctttcttagaattgtggaccactgcctttttaaatgggcagtttctccttttatttctttatttaattaataattgtctctattattactctatgtgctccttaagggcagggaccattatctgtgctgctcagccttgaatctgtaacaccaaagtaacttaagcactaagataatcaatttttcctcttctttcttcctattaatttatttaatataatatctttattttaagcctcctctaagagttaaaataatgttgtagtaaaagaacacacaagaggtcgggcgcaatggctcacgcctgtaatcccagcactttgggaggccgaggagggcggatcacgaggtcaggagatcgagaccaccctggctaacattgtgaaaccccgtctctactaaaaataaaaaaaaattggcagggcatggtggcgggcacctgtagtcccagctattcgggaggctgagtcaggagaatggcgtgaacccgggaggcagagcttgcagtgagccgagatcgcgccactgcactccagcctgggtgacagagcgagactccgtctcaaaaaaaaaaaaaaaaaaagaaagaacacacaagaaaatagggctgagtttttcaaactatagtccatgggtatttggaattgtatgaataaattgttggtgtataatgggggtcagaaaactatggcctagtgttcaaaacaacctgccacctatttttgtaaagttttattgcaaaatagccatgctcatctatttacacattgcttatgatggcttccatgctataacagcagagtttagtacttgcaacagagagtgtatgatttcaaatatatactatttgtccttttatagagaaaagtttaccaatccctgaggtatagaaattaaatgagaattattagatctgtgtgcttaggacaatgtaaaataatgaaggtacatttctaataatctagatgactaatagaataatccccttgaatttgatttttttgtcacttttaccaaattaagggtaaatgggataataatactctacaaatgaagacattgcagctgtttaaatggtgaaaagtttttggaaaattttggttatgatatagaacatagcacatagcactacagatgtatcacatagtactacagatagggcacactcccaagagcctgcatctttccattgaaagaggatgtgttgcaaaccttcattgtttgtatgcatcaacgtgcaattcaatagacataaaagtagcagtaaattaaaaacatttttttcagtgctgaattcttgggtgtttcattaaataataaaattgtataatggtgactgacatgagtatttctaaataggaaaagtgaagaaaaaatcctagtaatcactaatcacaataactcagacaatagcacatcaagctccaaataactttaatcaaatcagttattcaactgtacacatccatagctttcttttaataagtctacactaaccgttgagtttcagtggaaaatcatttcttacactaatgttttaatttgaattttatcgattttatattttgtttgaagtttttgtctgatttggtaattgtataaaacctgtgagcctaaaaagttgatacccaattttattgttgggtatatgaaacaccgtaatattaaaaaaaatggttagtatgagagtggctccttataagaagacctgcaccttactcaattttgaagaacacggaatgcacctgctaccaggccctggatctactcctaaatgaagccagtcacaccaggggcctaagacactagacacatcttcccacagactgtccttcatcaaagataattttgcccaccagatacagccattcattcattttttccaccaatttttaggggttttttttgagcatttcctatgagctaaggttctaggaaaagggctgctgatagtaataggattcaacttctgatgcaggagcactaagtgcagcttgagaaacaggacagaaatgattctaatatgatgtgataggacagaaaatatggtgggaaaaaggagagcactaactcagctcgagagatggcagaatgttttcacatggaggtgatgcactggttttcaaagaatgaacaggagtcatccaagtgaaagggagtggggagaaggaagggcattctaagcagaagtgctcaccccccggttttgggggaccagtgggaaatatgtcgagaaaaaaatctcacattttctttttttttatattctcaggatatcctgagatgcctaaaactaaattaacacttgttgtgaacacattagatgcagggaatggggagattcaagggaatcatattgctctgcgccttgaagaaggcgacaggaatcacccacacgatgaagtcagcagagtgtttgatgctccttccttgagtcccacccttcacctcggacaccgttttctttctgagtctgcaggttaagccgcaccccagggtgaaaatgaacatcattctgagactcagagcaggcgtcagggacagagaggagcctcaagagggcgctgctgccttcagcttgtggtttgacacaaatttcatctttccttccttcgcacgtctctttgttccagcctgtggcctgatcttgtagggcagtttactctgcttaacacgtgagtcaagattttgtagaagattccgccaaagactcaacaacataaagaaatatatatacctttcggtttggatatctctcaacaaaaccttctactgcttctcagccagccatgctgtctgcttcctgctcaggacttgtgatcttgttgatattcagtgagtaatgtttactcaaaacttctgagatgttctattccttagctttaggatgacctttaaccccttccaaactggagaccatgcctcttctattgccactataataaagtctttcccttttttaggaaggaccagtggagactcggttacccagacagaaggcccagttaccctccctgagagggcagctctgacattaaactgcacttatcagtccagctattcaacttttctattctggtatgtccagtatctaaacaaagagcctgagctcctcctgaaaagttcagaaaaccaggagacggacagcagaggttttcaggccagtcctatcaagagtgacagttccttccacctggagaagccctcggtgcagctgtcggactctgccgtgtactactgcgctctgagagacagagtgggagggactgcagcgagagcccagcacaaaccctggggaacgcaggtggggcctgggtgtgagccgctttgggagatgaatgaatatggactcttgttcgctgggaccccaaatggagaaaataatctcatatttctctgcatcaaagagcacaaaacagaaatgtgggcccctcacacatgggatgtagctcaccacgagaaacttttcctaatattctggagttctgtgagccttgtttgtcctttgtctctcctgcatgattctgtgagttttacacataaaaatgcaggttttgcagggcctgatgcttctttgatttctggggctctctttaagaaaaagaaaattaaattataaatttaagtttctaggttatgcggtagaaaggggccttaaaatcaaagccgaatatacttcatagtaaatctgcatttgaggttacatagagatgatcttctttaagactgaaatattataatagtcttagtttgtcctgatactgggaggttccctaactccaagtcctctttcccacggcagcactagaatcactttagctatcattaatatgagtattttcacttctatctttaaagaaataacagctttattgagatataatttgcataccttaaacttcattcttttaagtctacaattcagtggttttagtatattcacagttatccaatcattattgtgatctaattccagaacattttcaccacctcataaggaaactctgtgcctactagcactcacccccattcttttcttaccctagccataaatcaaataaaaatattgatttatgaggaataataacacaaaattttgatgtacccagtcttattgtaaatacaggacctcttatgaacctgtatctagagggatgaaacataagtcccaacatttaagactgcaaagagtttaatgactgtgatgcaggggacaaaagccagtggagattgaactctgctggtattttaacaggatttctcttgtttttggtaatgctttggttacaaattatatatttttgggtgtttcccatcctaatctccaccataattaatatgcatggattggaatagcaaggggattttcaagaacacacatattgagttataacagaaactcctgtctttgagcagtgagtagaatttctggaatttatttttgtttacacacacacacaaaatatgtgtgcaaataaacatgtaggtatttttctctggtgttactcgacatggcaaacactgaacagatttggtgactcaggaggtatgttgtgaaatcatttattaacaataaaactatttctttttttattatagtttaagttttacggtacatgtgcacaacgtgcaggtttgttacatatgtatacatgtgccatgttggtgtgctgcacccattaactcatcacttaacattaggtatacctcctaatgctacccctcccccctcctcccacccacaacaggccctggtgtgtgatgttccccttcctgtgtccatgtgttctcattgttcaattcctgcctatgagttagaacatgcggtgtttggttttttgtccttgtgatagtttgctgagaatgatggtttctagcttcatccatgtccctgcaaaggatatgaactcatcattttttatggctgcatagtattccatggtgtatatgtgccacattttcttaatccagtctaccattgttggacatttgggttggttccaagtgtttgctattgtgaatagtgccgcaataaacatatgtgtgcatatgtcctcatagcagcatgttttataatcctttgggtatatacccagtaatgggatggctgggtcaaatggtatttctagttctagatccctgaggaatcgccacactgacttccacaatggttgaactagtttacagtcccaccaacagtgtaaaagtgttcctatttctccgcatcctctccagcacctgttgtttcctgactttttaatgatcgccattctaactggtgtgagatggtatctcactgtggttttgatttgcatttctctgatggccagtgatgatgagcattttttcatgtcttttggctgcataaatgtcttgttttgagaagtgtctgttcatatactttgcccactttttgatggggttttttgtttttttcttgtaaatttgtttgagttcattgtagattctggatattagccctttgtcagatgagtagattgcaaaaattttctcccattctgtaggttgcctgttcactctgatggtagtttcttttgctgtgcagaagctctttagtttaattagatctcatttgtcaattttgtcttttgttgccattgcttttggtgttttagacatgaagtccttgcccatgcctatgtcctgaatggtattgcctaggttttcttctagggagtttatggttttaggtctaacatgtaagtctttaatccatctggaattaattttcgtataaggtgtaaggaagggatccagtttcagctttctacatatggctatccagttttcccagcaccatttattaaatagggaatcctttccccatttcttgtttttgtcaggtttgtcaaagatcagatagttgtagatgtgtggcattatttctgagggctctgttctgttccattgatctatatctctgttttggtaccagtaccatgctgttttggttactgtagccttgtagtatagtttgaagtcaagtaccatgatgcctccagctttattcttttggcttaggattgacttggcaatgcaggctcttttttggtttcatatgaactttaaagtagttttttccaattctgtgaagaaagtcattggtagcttgatggggatggcattgaatctataaattaccttgggcagtatggccattttcacaatattgattcttcctatccatgagcatggaatgttcttccatttgtttgtatcctctttgatttcattgagcagtggtttgtagttctccttgaagaggtccttcacgtcccttgtaagttgggttcctaggtattttattctctttgaagctgttgtgaatgggagttcgctcacaatttggctctctgtctgttattggtgtataagaatgcttgtgatttttgcacactgattttgtatcctgagactttgctgaaattgcctatcagcttaaggagattttgggctgagacgatggggttttctagatgtacaatcatgtcatctgcaaacagggacaatttgacttgcgtaataagagctatctatgacaaacccacagccagtatcatactgaatgggcaaaaactggaagcattccctttgaaaactggcacaagacagggataccctctctcaccacccctattcaacatagtgttggaagttctggccacggcaatcaggcaggagaaggaaataaaccacgactggcaaagtagtaacaaagattgagactaaaagttttgccttcctgctagaaagtgaaaactccgtatggttagtttgtaccttgattctatctggagaaaaagacatatgtaagaccaaaaggtgcataactgtatcatcccatgtattcactatagctcataataaattgtaagtctcacattttccaccaaagatgaattaactaaccgtgattcaattttaccactgtatatttacagtccagtaagttatattgagacaaaattggtacttaggacagtctagcatcttccatctctacaggaagtatgtgacatgacacagtcaaactcatcatatatctgttaactatacttcctgtaaaaggcagaagcctcacacagcccagtaactttgctagtacctcttgagtgcaaggtggagaattaagatctggatttgagacggagcacggaacatttcactcaggggaagagctatgaacatgctgactgccagcctgttgagggcagtcatagcctccatctgtgttggtaagcgtgaccactagcacaggacttaggctcctgttagttcagaaggatgtggagagaggcagatctttttagtctaatgaggcttagaaagaaggggtaaagggcaatgaaatcagagcactaggtctgaagccacttaatctattttatccccagagttacaaataagggatcagtctattttttcctctttttcacagtatccagcatggctcagaaggtaactcaagcgcagactgaaatttctgtggtggagaaggaggatgtgaccttggactgtgtgtatgaaacccgtgatactacttattacttattctggtacaagcaaccaccaagtggagaattggttttccttattcgtcggaactcttttgatgagcaaaatgaaataagtggtcggtattcttggaacttccagaaatccaccagttccttcaacttcaccatcacagcctcacaagtcgtggactcagcagtatacttctgtgctctgagtgaggccacagtgagatgggtgcctgtgggagccctacaaaaacctcaacaagaggcagggctcctggggagagactctgtcacagacaggaagaagcaaggagggtctgtgtcagcacaggtggtttggcaaggaaacctgagttcaattcatgtacaatgtctagatataacatttattagaagcatgtgtatcttctattctttagaatagattaagacagaatgtatagcacatatttttatatcacatatagaattatgcaacaaaaagtgcaataacaaaatatattaatcttgtgttggttttattgagggtgggaaactatccaattatcttcagaccaaatggatgattccattcataagctgttaagtttttagaatcacttatacatttatgcattaattactatgtagaatgctttaatccaagagtaatagaaatgcctttcatcgatttttcttaagaatggtatcagtactcaatgaggtaaaaaaattaaatttaaacttctttccataatcatgccagcaacctcttgtatatcagaatagatgcgaaatgtttctcaaatttcctttctctggctcctctgtttttgtgacatgattatgatattttaaaagtatctaaatattttgctgtcatttagaggctgcctactaagagagatgtctaaggtggaaatttgtcctaacggattgaatatcttgctttcaccctttcccctttgagttctggccagtttgaagctgagaagtggttagggccagaattacagctgccatggcaaccagaacccacatggtgtgtccagtgtctacttcctgtctaaacacatatttctccttggatgttacaacaggtgctcaggaacaaggatttttatttcttttgctccacacaagtttttagaaacctgagtttttaacattaaaagaaaacagacatcacattaaaaaccagatttctagcttacctataaacatgggaagagctgggaaacactacactccctggggtagaagtcaaaagttctgtttggacacataatggttttgatgtatatgtattttatttttaaaatttatgcaaatttaccattcatttcacagtatgaattaatttaaaagtaaaaatttaaattattagttacaagacaagctaatctgcaagacaaacaaatctgaattaccatttcatgaaactatacctggttttccccccatgatttcatgtatcatgggtgtgtcccagcttgagaaccttaagtatagtttattcttaattcaggagacatttgtagctatagtaagcattggagaaacattagttaataagacagacatggctcctgcctttatggaggtcatgttctagggggctatatccactatagaatggtaggcagagggaactaaagttttacacaaacaacctatgtgaccttaagaaagttataactcccctgaacatgttctctcatttgtaaaatgtagagatttaattaggcagttgctattgaataatattttccaaaattttactagcctcacaagagcacatagtccactgcctttttgagttcctaacacttactagctgcccttcttttttgggaaaggacaattagttgttatagacatattcatactgttccacatgttgcatgataatgtaacagtaataacaagaagccaaaggaagcaggcagagaggagagtggcttgggaggtcatctgctttccatacacagaagctactgttctatgtagccgggcagcagaggaagagggagaggaagaaggcgagagggagggagaggagaaaagaaagaaggatgaggaggagaaggaggaaggggacaggaggaaggcagaatgagggatagagaagagatgaagggaggaagaaagaaggaggaaagcacagaacaggtactaattcgaaagtaaatatgtttatttgaattcgaagtttttgtttctttcacaaggcattagacacactttctttcctcagcatgagagaatgagaaaaattagaagattcctatttgacaagcatgaggtcacactgaacttggactagctggctgaaactccagaggacacagctcctccagttaagctctaaggcaggttgagagacagattttctagtaattctggttgtcccttgtaaaattaatataattcatctgttcctaaaggaactaagaacattgtaactgggaaaggttccttcaatattagagttctctctagagctaagtagcaaatgcaaatgctcataggtgcctagagtagaatgaaatgagtgtggttgtccaagtgtttaaaaaggtacaggcctgataatgtgtcactaggcactgggccttggcatcagatgataaacaaaaatgatgcagtaaaccctcccattcttctcctaagcagagtgggtgtcctgaaaggttatccagagattgaagctgcgttgtttgttcctgagtcctgtcaaagtcaggctacaagctgttagatgtagacaggccattgcacaagagcttttatacaggaagcttctggatgaggggctggggagatgaagccatcacagtctgcaaggcagctgaggcttattccagcctctgtgaataaagtcaatgataatgaccattaggctccagcccctgctatttcctaatgatccttatcagggaacctcttcaggtgttccctgaaattagtcaccctcataccccacatctcagagcctatgatcttgcatacgatggatgtcttcactgcagaattgttccagtatccctgggctaaagtttgactgagttcaaataaagcatatcacacacagagagagctggttaagctaatgagctgtccagggttatgtaatcacttggcttacataacttctggacatgatccattgtcataagcatttttttttaaaagaatgaaagcatatattaggcacatattatgtgtgatacaaagaatctctgaaccttacttcttatccctctttattacatgtagtagttgccttctccatgacccctagtacaacctgcttaccatctacatcctttgtgtgtttgccctcatttccatcttctacgacacaataagacacaagttcaacagctcagtgctgttccaaccccagatggtagcattaggagcctttccacctgatttcataattaaagtttccttttctttggaaaagaggaaatttccccatcagaattggacacccttgggagtgaacagtaaattgtcaaatatgtactctcccagaagtagagtggaattcttgatgtttcccaccatcgttattacacaacctccagtctctttcagaatttccaaacagagggaaaaattaggtggacttgaaatagtaactcaatccaacagatttcccacattagtgaaaaatagctttgttttctgttcactgtattaaacaaaatactgccctctagacccaatcgccaatttatagtaagtacaaaggacagcagaacatattaaacccatcacaaatatacagtaagcaaaatctatagtgtgaaaaactctgcaagacaaacaccctgggtctttttttcttcccacaataaactacaaagaatgagtaaggggatctatggattagaagagcctttaaaaaacatatcgccagaactttggctttcccagtgccccatgcttgcaccatgtagaagtgcaagcagacgaaacctcagcatgccaacttggaggaggaccagggtgagcagcaactgaatccagagttcgcagatgcagcctgaatggcgccagtggtgggggcccggggtgctccaatggatcaccaagggaatgatgatgaagcgaatgaggacaaagccacgtggtaaaatggcttcatcaggaggagatggacacctgtgagaaatactgtgcagagttctttagcgtctctgagttcttgaaacataagaaaaattgcactgaaaatccccctgtcctctccaggaatgacagtgagaggccatgacagctctctggagccagactgagccataccagccacccagtccaagtaataaagatggccacaaggagaacagtggcagctcaggggacatgaaagagaagctgggtgtggagtctgtggtgcacttacagacagagatggccctgccacccacacctaaggacataggctatttacccacacgcaaagtagccaacgctaatgtgcccatgcaggctctctggggcaccaaggtggcagtgaatcagtggagtgcaggtgcactgccagcctgtgcccagtgcccacagcatcccatgggtcctcgagcagatcttgtatctgcaacagcagctacagcagatccagctcaccaagcagatctacattgagatgaacgtgtgggcctcccacatcctccactgtggcagggcaggggctgacaccctgaagactttgggcagccacatgtccctgcaggtttctgcagctgtggttttgcttagccagaaggctggaagccaaggtccgtctctggatgccttgaaacaagccaagatactgcacaccaacatcccttctaccttcagcactctgccccaggactgatgccttttgttctgaagccagatgggaaaagggtactctcttccctttccctgtttgggaaaacatcatgtgtcccatactgagtgctttgctccctcaggctctgggcttggtgctcttccagggtactttctccactatggcattagacccgtccaagaaagggaaaggaaggctatggaacatctccaagcacaagtgtaagtgctctagcaaggtttttgggactgatagcttctcatggatccacctctgctcccacactggagagagacccttcgtgtgctatgtctgtagtcatcacttcaccaccaagggaaacctcagggtacagtttcacaaacatctccaagagaaggtgaacccccagttgtttgctgagttccaggaaaaaatggcaacaggcaatggcaacccatatgcactctgtacctgcccccatcaatgaatcgagcctctctttaaacaacaaacttgtccttgtaacttcctctctaaggctacctcagaatctctcttcagagactaacccgaagaacctcatggatggcctgttgcccaattacctgtagcccagtccttctgcagaaagtgagggcaggcctacactccttgaggtaaggacaaacaataattcaccaagtattggtggcttctaagtgagtgggacccccggccaggaccagagaccctaaaattgctgtagctgtttgagaacatccacaatgcctccactggcttcattttctactgattcctaagctatctcaaaatgtattactgcacatgcacccacacaccagggagagactattccagtataagatttgtggctgagctttttctaccaaaggcaacttgcagactcaccttggggttcactgaaccaacacacccataaagaggcagcattcatgcctcatctgccagagttaccaatgccgtgatattgcaacagcatattcagatgcacacgggcagtcagattcccaatattcccttgccagaggatccctgtgaccttatgatcctgatccaatgatggtcagtgaggatggcagtacaagtgccatctgctatgatgatgtccccaaaagcaccgatgtagaagtcagctcccaggagggcccaagcagctcctcaaagatccccgtatctccttccatgacggcttccttagatgccccaggtagggggagtgggtcctatcccttttggcctgcagtgccagagcagccaaaaaatggttcagtggagagcaatggcttgaccaaccactcatcctcactgaaatgagactaggagtgtgagagccaaagtccagacaccatggaaactaggtccttccaggtactctctggccaatagtgaggcacaaatcatcaagtcaatgtctcctgatgctgggggcaaatcagagagctttgagaacagatgcagggatggaaggtcggagcaggctcccttcaacgtttatctgagcccagccaacctatgtcaaacttgaagttccaggtatatttgtaggaccctcaatcttgtctccagggatgacccctttgttagaggcccagctacactgacaggtcaagcaacacggctgcacccagtgtgggaagaacttcctgtccactagtcttttcagattcacagacagactcacactggagagaagccttttgtatgcaacatttgtgggacagcttttaccaccaaaggcaacttgagggtctactatatgacacatggggtgaacaataactcagcacaccatgggaggaagctggtcctggagaacaccatgtctctgttaggtacaaaaggaaaaagagtctcagaaatgtttcctaaggaaatcccagcccctttagtgaatgtggacactgttgtaaggaatcagtatacccccacacttgactgtggtctggcagtgaaaaccagtgagctctctctgatccagtgtagctgtattcctaccctcctggtttccttggaggctgtctccatcatgaataacaccaccatctccaagatgatggctaccaatcaggtgtcattgcggatgtggaaaaaccaggtgctattgacagcattcccaaacatcagttcctttacttcctggaagaaaacaaggttgcagtcttctttttttttcttttctttttctttttcttttttttttccagcttagcttaacttgcatggaaggataaatgcagacagagttaaatctctagaatctgctttttttttttttttgtaaaggcccatctcctcctgttttctttcttttttatttttatttttttcgagatggagtcttgctctggaggctggagtgcagtggcgtgatctcagctcactgcaatctccacctcccaggttcaagcaattcttctgcttcagcctcctgagtagctgggactacaggcatgtgccactgcatgcagctaatttttgtatttttagtagagacagggtttcatcatgttggccaggctgatctcgaattcctgaccttgtgatccacccacctcggcctcccaaagtgctggagttacaggtatgagccacccgcgctcggccttctttttcttactggtatgcaaatgacgtttatgaaggttgtgaccatcacctcaagcacaattgaaatgaaaatgaaaaaaatgaataaaaaattataccaaaacaaatatacactggatttttttttttaagcagcaggtgttgcaaagtagccttgttacttgtgacaaactatatacataggactttcgtaaaacctatggtgactttttctaagaccattatctacttcaaggtggaatcattggaacttattgaaccacagtggaagagacaactacttagcctaattggggtgaagggtattggtaaccgtatgcaggtaaacggacaagatctgtcatctatttagggaactgttttatattcccccaatcctgttaacatctttctttttctttctaaaaatatacttttaaaagaacaaaaaactaaggttgtacaattataaaattgcttcaaccttagaaccttaagtaggatgccctcagatggacttatgttagtgcttagggattcattgtgtgtgttgctgtttattcaaatgcagttcagtcagaaccgcaagagtgccaatgtcctcctcatacttcccaaatgcctttttcttcctgaacctgaggtggacacctgaatggggaatctcaggtgacttaatttagtttgtcggtgcctaccctattgaaaaaccgggttttcattcttgagaagaaactcatggaagggtgtgtttcctgccataggttcacacactatttttttgttttgtttaatttatttggtgcaacttaggaagattattttttcttgaggattttatgaaggctgtgaagttggaacaggtgagtcctgggtaggaaagcttttatttatctcccttatttatttatttatttgttttttagccatagtctctattttcctattttaagactactgaagtattcccaggttctgtcttaaacctaaaagtcagtgtattggtggaaagagttggatgttcaaggtgttttgtgattcctttatttgtaatctccttttgtatatgtaataatattgagcaaaggaaacatctctctaatggtttaacaagaaaggagaaagaaaaaccctaacttctgggagaagtctatcccttctatgtggaaggccctgaatgaaatgtagatcaagactgttagctaatgttttgcctcttggttattgcacctgattttaggcctttttatttttttgccatttgtgcctttccttctggaattgtaagtgaacacaataatggtatctgcttatactgtgaagtgtgtattgttacagagaccacaccagtggctttttcactgttgagctaataatgccttgtgaatgtatgatctttggagaaactcctgtagctgtgctgctaatgctgtctgtctgttggaaaataaattttgaatgttttctctttggaaaacatgtccacaaatcacaatatgtgactcttaggtgaattctgaatcagataagctgtaaaataattgaaaatgtaaacacatttaccaatttggttgtgttttaaaaaagtcaaaatttagtgatagtactaaaataagcaaaagcaaaataatatgatattttacaaatatatgaatggctttaaaaaaataaatgaatgagtaaatgtagttggggcataaataaaacaagattgaccaagaatcaatatttgatgaacatgggtgatgggtacatggggtttcattgttccatactgtatacttttctatatgtttgagaaattttctttaaaaaaattaaaaatagaaattggctagattcaaatcctgtcatctccattgcagcatgacttttgattctttaacctgttgatgtctcagtttcctcatccattaaatggtgataatagaatttacctcgcgaagtcgagttgagaattaaaattatacatatttacatacacctatatgtttaaattaaactatacatgattttatacagacagttttcgcacggtacatagcatggcatgtcgacgcagtagagactcaatctgtgacagccaatgttaatggaaagggtggaatttgttcagggcctaaatcagattttcaatcatgtgctagtttcataacaccacactgctccttgacacgtttttcaaaggaaagagccaaaactcattgataaggaaaggacatcttggcactgcttgaaaatcaccccaacaggtccctaaatccccatttgcagctccagtaaatatccccatttgcagctgctcccccaccagtacctaccctgctgctaaggcccaggccctgtcagagaagcagcacatgacggatgtttaacataaaagtgttttcagggggcaggcagggctgctttaattcccctaactaggtaatttaaggtatattttctcatatttgccaacagaccaaagaagaaatgctctaagatgtaatcaatattcacatcagccttcaaaccaatttgatttcagtctttcacactgttgaaataaacaaccctgtgaagtcccacacatcaagataaaagccaacaaagaaatggcatttttcccttgagcaactatacacctaaaagatgacttgtgaagcaataaatataggttatggagattttcccctcttactctaagagtacataaacactttaaaatgtatttgagatattattgattgctgaattaatatattttgtaagatgaggtaattattgacaaagaagatattctcatcctgtattcagtttaaatgcaagctgtcatacaaaaaagagatttaagaggagatttataacctgctccaggaagctaggagaaggtttcatccacccccaaagcgcagacacctcctcactcttctgcttgttcacagtaatatggatgccactgtgtctggtcacagatctatgtctctgcttaaattgtccccattgcacaaaatgtcctttctccatctccacagactaaacttctgtctcaacctcctatgactgtacttttggaaaggaaagtggggaacacagtaggtgagaaaagacatctgttttgctggttgataatctagaagatgtggtctagacattgaattattctcgtttcataatttataagaacaactattaaaatgcccagtggtcctggataatgtatagtcaccattcttatcttacaagacatagctgtcctgatgtaaagatacaacgtgtgtaatctttccttctctaaacttctcaatcactctttaatctttgttgctacttaccacttgatatgttgcattttgtttctgaaaattcatgtctataactataccatgatcagaatggctaaagtgaaaaagactacactaaatattgacaagaacatggagcaacagaaattcacatattcggctggaaggaatgtcaactggtacaatttcaaaaacatttggcaatatttactatagctgaacatgtgcattccctgtgatgcagaaattcaatttctacctatatgcccaataagaagttacatatattcatttgtaaaacatgtacaagaataagaacatgtattacatcagtgattataatatcctaaaactggaaagcaactcagatgcacatagcagtttcaaagataaataaagtacgataatgaaatactacccagcaatgagaatgaataaacttgccatatgctcaaggcagattgaatcacacaaatattactgagtgaaaaatgaaagcaaaagaaattcaagaaaaggcaagactaagctatgaagttgtaagtcaggagagtgaagataggggctatctttacaaggagatagtgactcagaaagagtacaagggaggcttctggatgttggcaatgctgtttctcaatttgggtgctggttacataggcgatttcactgcctatgtatgaaaattcaccaagctctacatttaagttttgtgcactattctgaatctatattatactttaaaagtttttaaaagaaaccttatccatcccattgactaaattttgagaacatacttcttattcaatccatcttcatagccccactgcccttcacattagccttcatttaaaacatgcttcataattgttttctcaataaaggactgagctacatgtttaaaaagatgctccggtcccaggtcctaggatctagtatgttatcagatggacttgaacttccctgtgtagcttgctaattactgctttgagtttagacctttggtattgatgtggtttttctctgtctccactcaaatctaatgctgaattgtaattcctagtgttggaggagaggtctggtgggaggtgattggatcatggaggtggcttctaatggtttagcaccatccacctagtgctctctcgtgatagagttctcaagagatctggttgtttgaaggtgtgtggcacctccccctttgctctctctctctctctctcctgctgggcatgtgaaagtgtacttgcttctccttcaccttctgccatgaatttcttagtttcctgaggcctcccagccatgcctccagtatagcctacagaactgtgagtctattaaacatcttttcttcataatacccaatctcaaatagttctttatagcaatgtgagaatggtctaatacaagtatgttacacatggttttctgtaacaggcttttaactggcctccctccttccagcatttcctccccataatccactcccataccctacaaatgacttattcttttaagaaacacagcatcaatcacatcagtcctctgtttaacaaccttcaatgaccatccttttcctgtaggagtaaggttaattaaaactcatggtgtagctctcgatggcctctacagtagtcatgaactttctgcttcatcagattaagtctaacttgtgaatgaggctgggaaacatttactgtcctccattaacagctctgctcatagtcctttgctcccatgattacacctgtctgaatgcttaccatcattctttctcctgatcctagagactatctcagaccattattaccttgtgaagaattttctggtcaccccagctcacagtgatctcttccttctgataaattaccccaaatttttaaaaaatatatttcaaaaaatctttttttcaaaaaatatttttgaaatgtatttttatatattttatgtatgtttttaaaatatagttcacttaattttacagtgcacttttataagcattatctcattcactgtttataataacattgtgaacaaggcaaggtacaaagaattaatctcattttgtagcttaaaaactgagattcagagaagtgaaggggcctaagccagtgtgctcagccaagggtaaagctcactcttctcacccgagctctctataccaaattaccttattatgagtatatacgttatctcctcccaaatatacatttttttctaaatgttcttacacgtttgtatgtctcataatactggacaagacatttacggggctatgtagagctgagtgattttatttcaatattgttcccagcaagctcaaggactgacaaagctgtaccacctctgctctatgggactactgtagcaaaaactgaattgtagaaaaaaacaatcactgcatctccaaaaaatctgcttttggaagtaagaaagagacaagaaaaataatcttttaaaggtcagggcagccttaattttacctttatatcctaggctccaatattgaaaagtttcaaagaaggctatcagaggtaatgacaatgggcttcaagaactacaaatgaatcacaatgaaataagtttcaaattgatcaaattccagaaaccactcctcagataatttaactagtaagcaaaatggagaactttttgattttgaagcccagtttaacagaatttaaactatattaatacaaaacttaattttctttattccaaaggctatattatactaaatctttctggaagctaaccacaggactaatgtgatgaaattgaaagaatggggaacaaactaggtggatgtctggacaccccaaactgaaggtaaatgctaccttctaccctaacattcttgacttccacaaactcaggtgttagacacctgagcactggaagttaaacaggtagatatgaagactaagaaaagaagagggagatagagggaccaaaataaatctgaatattgtaaagaaggtattcacacagtctttatttgcctagtgctaaatacatccagtgtctacttctagtctgacccttcattccaaatgcctgtgtctgggctaacgggagcatagacagcgaatagaatttgctttactgtctgatcttcactcaagtgaaagcaatttgaggcaggaatcatgttttgttttggtttatgtgtttttttgcagagctttacatgtcatgtaagtcggaatttctggaatgagtacttaagcttagggattcctgagcatgcataaacatttaagagcggctaggtgatctgtctagccagagaatcttgtcagcatgtaactgtactcaagaccacaattttactaagagttgaagtgtgtaggtaattttaactggtgagaaaattcatttaggataaatatttattatttgaagattatttttatgttcactttatttttgccatagctattgttactatactgacagcacttccaataagaacctgtgtaaaaaaaacaatatagtggtcctcagtaaaaaagtcccaatgctttaaaatggtttatgtaggcagagaactatgctttaacttcttactataatacaaccataacttgcataaagtaaatccaatcctagagcaattatgagctatgaattctgctggtcttatttcattagcacaaataattttaaaagggctagacaaacaggccaacagatgtcgagcaaacagaaactttaactgagattcctgaaatccctaataaaacaaataaacaggagacagccataataaaataaatgcctctgtaatgaagagaagtgtgtaatagtaagcatctaaacctggcattataaaagaaacaaaaagtaaaaagatggtgtttcgaaaaccaagttactaaagtaaggttacctatttatcataaggctaaaggtgtaaggctgctgtcatccaagtatgatccagggaaccctagacagaccttttagggagtctggcattccaaaactatttttataatgataataagacattatttgccttttttactttcaaagtctcgcaggtgtatatgcaaggtttccagtctacatggtatgtgataaggtcatcactctgatggttaatggaatatatctctacctctatctctatgccacataaacacaacctctttagagtcttcttggaatctctcagtgaaactataaagggatcctgagaccaacaagtttgagaactgatggtttacaggctacaaattcaatttatcacaatatgactttgaataatattttaccacttcacacacagtgtaataaatttacagcatttcacctccattctttgtgctattgttgtcaacacatttttattctacataagttaaaagccccacaatgcagttttatggtttttcctttaaaaaattatcttttaaagttttttttttagcacttcaaagtttggttctgacatacattgtttctgatgaaaagctggctgttattcttagctttgactccccatacctaaagtgtctttcctcatttttctatcctgtcaccccaactgctgttaaaattttcctttttattactggttctcagaaatttgattacaatgagccttggggtaattttctctatatttcttctctgtatctacgaaaaactttcagccattatttctttaagtatctttctttctctccctctcttcttctgaggcctcaggtacacctattttagattatttgattttgtagagttcaggagcactatttctttttttaaaatcttttttctttgcttcagtttagatcatttctactgctttttcttcaagttctctaagctttttttcctgtgatttctaatctgctgttaatcttgtccaacttatttttcattttatttaattgttttttatttctacaagttccacttggatctttttacgccttccatttttctcctccttatgtttctatatttttttacatccttgaattcatttttattgtatgtatgtagtttatatgcactgttttaaagtccttttataataatcacataatctgtgtcattttaaattctgtttctgtttatctttctcccggttatagactttattttcctggttcttcaccagcttgataattttgattgggtgctagatattatgtattttacattgttggatgcacaatttttttatattactttaaacaccattggacattgtactgattattaaataatttgcttatcattttgattttttgagacttcttttaatttttatctgaacagcctctattctgggactaattaaagtcactactaatttatcacctttctgaggattctagtgcctgccctgtgcattacaatgtctcttgaatcctggatgctagtaatacaaactatgcccagcactatgtgaactctggaaattatttggcctgttgcttctctttgcctgagtttcctctcatgtatgtacagatcagccaaagacaaagagtgacccctccagagccagagttctcttctgaatctctctctccccctctttctctttgtctctctctctttttctctctccccaaatccctcctctctggtacacttattcatacattctagatgctttaggatccccaatctcctattctattcctcaacacaacgaggcagctgtgctgtgttgtggttaatcctccctgtgctgttgcctagaaactgcctccaggaaataagtggaagaaatgttaggactcacttcatttattttcattatctctgtattatctgtagtccaaggtctgaaaatttcctttattttgtccagctttttaatttgaagatcaatttctgtagcagtgtacatttatcaaggaaacaaaagtcaaagtaatttatttgtgttgtattttacagttgtagtggtccatgataaattggtgaaaacactgattctttatcatagattatttgaaaagagccacattagataatgtttctaacatgcattatcatgtttataagatgacatgctgattgtgtcttggggacttaatagaactgattcagataaaggaataaaggagagtagagaggactttctaggcagatgttctctgtcccatgagaaccataaagacatgtgcaaggaggaggcctcagatttttctacttaaaagttgtgcctggaattatttgggattattatctgtacccaaggagaaaatgatgcgagtaataattgaacattgccccaattattgctgtgaatctataaaaaatgaatgtttagtgctttcttcttagagtcctattccattcttcttaggtatctaccttcccttcaagctattttattaaaaacagggtcaaggttctttttggtttttattttctccaagatggtggattggaggcatcgtcaacatgcttctcccacttgggaagacaaaatagtgtgtagagactcacactgtgaactttcttccaagaagcaacacaggaacttaacaagaaaatggaaagaaaccacataccctttgaatgaagcagcaagttggctgggcacagcggctcacgcctgtaatcccagcactttgggaggccgaggtgggcggatcatgagatcaagagatcgagaccatcctggccaacatggtgaaaccccatctctactaaaaatacacaaattagctgggcgttgtggtgcgtgcttgtagtcccagctactagggaggctgaggcaggagaattgcttgaacgcgggaggtggaggttgcagtgagctgagattgcgccactgcactccagcctggtgacagagcaagactccatctcaaacaaacaaacaacaacaaaaagcagcagcaggttgcagcctgcactgtgagctagttggaacactctaagtccccagagtgtgagagggttagaaactgcttctgggatatacatgcccactggggaacctggcaatccaggctacggggaaagacttaatcctaccaagccctagagctgatttagtgagccgcacggggtacatgagaaggagcagcattgggatgtgctttgcatgcattcccagtctccagtggggacagagagaagccatttctgatcctcacaggggacctcgcagacatctgccagctagctcaggtggtggttgagagaagctcccaactgagatttgcaatataatctcgagtggggataaactcctttagcccaaactcagggacaagcagaaagtgtactataaccatgagcacaggagctaaatgcccctgccttgcaggtggatcaggaggggcatggcctgaaaaccacagtttctgtctctatggggaagccttgtggcctggagaagctttgagttctgagggcagactgcttggaatctagctagctgctgatagtgaaacactgcaggtgtgagacctgccttgccaagtgtgtaggggctgagggaggcttactgctgcctgctactccccactccctatgtggaagagtccacatggggaagtgccttctgtgcaatagaggcagctgtactcctctgcttatgccagcttgtgcctccacttgtgccagcacgcagaacacggacttccctgacccagccccacctagctttgcccctccaccagctccggttgcttaacacaaaggtctgagtcttttaggagctatatcgcccttcccattgcctgagacaccaaagtacctctcccagtaacataaggcaagcacaaatcccaccattattaccacagttggtagtcctttgcaagcactatctcctggctagaggccaaccaacacagtccttcacagcatttgtagacagaataaaacagcaccaagaaagaggaaacttgagtgtgatctcaactatcaccattgcctgcagcaccctggctaaccaggaggtcctcagcatgtccacatgatcagttcgtttactagtataactggcatttgaggaagccaacacactaaagctattcataactaagcaatctctcagagtctaagtcactctcctgccactcccatcagagctagtgctggtagccacttccgggagacttgagaacaggtcacatcactagatcccttgcagacattctgcagcaacagcctggaggtatcagtcccactgggtggccagatccagaggagtagcagcattcacagcagtctggctctcagggactcctacttctaggggtaaagggggtgcactatatcaagggagcaccctgtgggacaaaagaacccagatggccggtcttgagtcccagaattttctgctttggggaagtttctttcaacagagtcacaggtgcagtgctgagctcagcagggaaagcttgtggctctaactaaacagtcagtcagccctggtgctagtgaagggtcttgaaaagtagaattctttttccccctcatccaccactgcagacacagctggaacttctcccacggaagctcagtgtgggtgcatctgtagacaacctttccagaacacttcaaggtaattgcatccccacaggaaaaatgccttccaggtttagtcttacacaagggggagagtcacaatccctgtctacatggaacatcagcactcatgcaggtgagaagaggtgcctatacgatctgtatagctggaacactgggccagcagtatgactgggaggtggatcactttcctgctggactggcagggtagctgaggaggctctctccttccccttgaagaggactcagtgcatttcactgagagttcccccagctgcttctgtcaaggctgggacctctgcccacctctaaatattgcatttacccatctgctttagccacagttgtttttttgttccccttggacatctcttactggtctgaagcctgaactgttccacccagtgaataaaatactggggaaaaaaagtaaataaataaaagggtgcacaccactggagaatgagacaagcgtcaagacgcctctgccattcaagccccacaggagacaatgaacctgctcacatactgggaacattgctactacaaccagcatccaagaaagctgtcatacaacggctttctataaccaaggagctcatacagaattcatctctgaaagcacccagagccaaaccagattataataaactataatcaaagtcacatcctcaagggggcaaaaaagaaattaaaaaacccacaagtgagtaaaaaataagttaaaaaataattagaagaaatggtctatccaaatacaagaagtgcaaagaaccactgggagattcaaccatacacacaaaaatgtgacccatggtcgaaagagaaaactgttaataaacccaaaaagagatgacccaggtgttggatttattggatgtactttaagataaatataataaaatacaaatggatctaatagaaattgtagacaatatgcatgctgagatatgtaagtttcggagagagaagaacaaacatatgtatagggaataggttaaccagtatatttaaaaatatgtatacaaaatatgctaaccaaaaagaaagattgacaaataggacacgaatacaattttaaaatggtgctcatccaacgacagtattaagaaagtcaattagcaacctaaattctgaaaaaatattcaagaagatacagctgaaaaaatattacttccagaatatatttaaaacctcccataaattaacaattaaaaattacacaataataaaatacataaatggtgtaacgagtgagtactgctatagactgaatgtttgtgtccccccaaattcatatgttgaaatctgttgtgattttaatttatgtctttttttttttgacggagtcttgctctgctgccatgctagagtgcggtgacacaatctcagctcactgcatcctctccctcccgggttcaagcaattcccctacctcagcctccaagtagttgggactacaggtgtgcgccaccatgcccagctaattttttgtattttagtagagacggtttcatcatgttggccaggatgatctcgatctcctgacctcgtggtccacctgcctcagccttccaaagtgctgggattacaggtttgagccacctcacgtggccaatttgttatgtcttcttaatttggacttgaagtctctctcctgagaatgaccataagccaagataaccactgcctaggacagccttgactaggggaaaaattaggtttaggtgtgtgggtcaggtaaaatggaatggatctttaaaacttcatgttgagcaatagaaaccaggccctcctcccaacatgctatataaggacgtgaagcgaaaaggcataaaatagaaggaatttatttctcccaggtcccagagaggttataggtgccagtgggaggctgatgggaagttcagaggcagcagggagctcaaccagtaggtgaagagagagagaaacagagggagagagaggcctgtgggattatacgtttattaaggttcatgggtattatcccttaggcttatccatgggtactgaggactgtctagttcaaagaaaacacataaaaaggggagaaattatgtacacgactctggcgttggccattagatttatcatggttagcagctgtggaaagtgttggattttgggtcagtgagatgaagaacaaccataaagggagtggaagttctaactaggccaagggagatgaagtatgacttatgtcaggcctgaaaatggacgccaagggagcaaccacattaaacaaacttatgacagaactgaattaccagtgtggtcgtatttggaggtgcggcctttaagaggtgattaggtaatgagaataatgtccatataaaagaggtcacagagagcttccttgcttttttggcaatgtgaggacaccgcaaagatgactaccaacccgaaaacacgccctcactaggcactgaatcttctgggagcttgatcttggactatacttcctccagaactttgagtttctgtttttataagccacctatctatgatattttgttacagtggcccaaatagactaagacaaatccataaaatatgttaaacatcataagtcattagggggatgcaaataaaatctacattccggtgccattcatccccactagaagcactaaaaacaagccatctgacaaccccaatattggcaaatatgtggaacaactagacagttcatgcagtgctggcgagaatgtaaaatggcaccgcacaatcactttggggtcttgcaatggcccagcaagaacactcacagatatttagcaaagataagtgaaaacataggcccataaatgatccatacaaaaaattttgtatgcacctcatttatatttgttgtaactggaaacaatttaaacgtccatcaacaggagataaaaaagaactacggactgatacacacaacaatattaacggatctctaaagccttgtgttgagcaatggaaaccaggcccttccctcaaaatactgcatgataccttttatataaaatacaagaacaaaaactaaactatggtgatacaagtaaaaatgtggtttcctctgggaaggagagtttgactaaaaaggggcacaaagggatttttctgcgatcatggaaatgctctacatattgttttaggtgatagttacacaggtgtataaaattctcaaactcattgaaatgaatacattgtatctgtgcattttattatgtcaatcatacttcaatacaaaagaaaccaaaataaaataaaataacctatatagaaagaaatgtgcccctgcacaattgtagggctaggtaagttttcacaatttggaaaagcccatgtaaccagcacccatatcaagaaaaagggcattacccacatggcaggccactcttgtacctgcttcctgtctctaccagcccaagtaaccattatcccgacatctaactgcacagactagttttgcactttaattaaatgggatcatttagtatgtactctggtttctagctaattttacacaatcataactttatgagatgtatttgtattattatgtgtagccataaatcttcattctcagaactttggggcattttattgtctttggtcatttcatttgtgtatatttagcttcccagggcaaattaatgaccagctagtctttgttgattccaagtctcagacagctatcagagtagactataatcacgacagaccacagctgctctagcaattggaaaagtatagacaaattcctgcaaaaactgtagaaagctaaaaatattaatttttctctgtgtatatattattttattttggttcttttttatgaggtataattttttctacaatgaaatgcacttacatgtttagtttaatgtgttttgagaaccatatacacccatgtaacaagataatatatagaacattccctacatccctgaagtctcctttccagtctaatttttcctcctacagacaaccactttctgataattttatcactagttaaatcatcctggacttaaaaaaaattaattttctcataagagggactttaggtcattatattatattcaattatattcactcaaagaagagagcataaacagacaattaaaagctgcagtcaactgaatcacactcacatatctgcacattgacaccacacaaatcagtcaccaactttcatgctgctgaaaggtaaaactatagagttgcccccagtgaaaaaagtctttcagccacatctgccgcagcagtgggctgacagagggatttgcaatgttccaattgctttatttatgatataagagaataagaatgcatgctctgatgagtttggctgcactcatttagactatcgggtgcaatgtttgaaagccagatttttcctagcacagacttactattgattgctattgggcacatgcaacgggacaaattttgtcaatcaagaaacttgctgtaatgccattaagcaaacaagaaactttatctaatataaattttcccagaatccaatggcttggtgcacaggaagaaagagttataatgattgagagtgaaaagttttatctccctgtctggaagaaaaatctgggaatatatttcactgtagatttcagccagagaccaaaaagcatacaccatgcaaaaagatggatgataacttgttctcagtagtcatcataacccataataaattgttatttcttatgaaacttatgagtctatctctgatgcattggctgaatgtagcaaatggttgaatcattaaaaccttcaatttaatttaactcatgtacatgtacagatataatttctgtctattaaattaaaataagaccaaataggcaggttagaatctccaactgtgtcaaaaagctatggcttaacacaggcaaactgatatcagcagatcacattttctcttctggcagaggagcaccttacagctcggcactcagaagaacttgcaacattctgctcccctgcctactgaggatagtcatagcctctttctgacaaaggatggtaaagatggccacaaatgcaggactccggcttttctcagctttaaaatctgggggcagcagcaggttgttattttctcctaaacctgatggggtttaggggaaagaggtaatggacagggagtcacagccccgtcctacattatttccttacaacctcatgggtacccccaggagaatcagcataattctctctcccttccccctctctcatctcttttctctctctttttcaggatctagctagttccagagggtaactcaagccctgaccgaaatttatttttatgctttaagttctgggttacatgtgcagaacttgcagttttgttacataggtatacacgtgccctggttgtttgctgcacccatcaacctgtcactcttctaatgttatccctcccctacccacccaaccccaacaggccccagtgtgtgatgttcccctccctgtgtccatgtgttcttatagttcaactcccacctatgagtgaggaacatgcagtgtttggttttctgatcttgtgatagtttgctgagaatgatggtttccagcttcatccatgtccctgcaaaggacattaactcatccttttttatggctgcatagcattccatggtgtataagtgccacattttttgaattcagtctatcattgatggacatttgggttggttccaagtctttgctattgtgaatagtgccacaataaacatacgtgtgcatgtgtctttatagtagcatgatttataatcctctgggtatatgcccagtaatgggattactgggccaaatggtatttctagttctagatccttgaggaatcgccacactgtcttccacaatggttgaactattttatagtcccaccaacagtgtaaaagcattcctacttttccacaacctctccagcatctgttgtttcctgactttttaatgatcaccattccaactggtgtgagatagtatctcattgtggttttgatttgcatttctctaatgaccagtgatgatgagcattttttcatatgtctgttggctgcataaatgtcttctttggagaagtgtctgttcatatcctttgcctaattatttgatggggttgtttgcttttttcttgtaaatttgtttaagttctttgtagattctggatattagccctttgtcagatggatagattgcaaaaattttctcccattccgtaggttgcctgtttactctgatgatagtttcttttgctgtgcagaagctttttagtttaattaaatcccatttgtcagttttggcttttgttgccattgcttttggtgttttagtcatgaaatctttgcccatgcctatgtcctgaatggtattgctcaggttttcttctaggatttttacggtcctaggtcttaggtttaagtctttgagccatcttgagctgatttttgtataaggtgtacggaaagggtccagtttcagttttctgcctatggctagccagttttcccaacaccatttgttaaatagggaatcgtttccccattgcttgtgtgtcttgatgggaatttctatactaccaggagaatcactataattttctcactcttcttctcctctcctctctcctctcctctcatctcctctcctctcttttctctctttttcaagatctagccaatcccagaaggtaactcaaacccaggctgcaatttctatgctgcagaaggaggctgtgaccttggattgtgtataagaagctaaaacttaattattatttactctggtacagacatccaccaagtgggagaattattttccttatagatcaggagtcttttaatgagcagaatggaacaaagggttggtattctctgaacttgcagaaaccagccagttccatcagctgtattttcacagcctcacagcttgaggttttggcaatgttctttcatcccctgagtgaaactacagtgaaatattcacctgaggggggcctaaaaaattcatatctcaatgtcccccgatataaacacctgggcaagagtcacagtgtgaacaggaagaggcagggaggcactgtcaatggagatggagatttaggagaaacttcactctaaggaaaatgttctctctggctcagagaacatatcttaaattgtcattaatcaaaagcgtgtttatcttcagttctttatcttgaagtagattattcggcaaaagatatatatatatgtgtgtgtgtgtgtgtgtgtgtgtgtatatatatatatatatatttttttttttttttttttccaagatggagtttcactcttgtcgcccaggctggagtgcaatggcactatctcggctcactgcaacctccacctcccgggttcaagcaattctcctgcttcagcctcccaagtagctgggatacaggtgcacaccaccatgcccggctaatttttgtatttttttgttaagtagaggtggggtttcaccatgttggccaggctggtctcgaactcctgacctcaggtgatctgccagcctcagcctcccaaagttctgggattacaagcgtgagccaccgtgcccagccaacaaaagattttttttagaaatttgtggtgactacattaaagtgtgaaactgactcttaaaaagttaagaaacacttggccaaatccatatgcgaattgttagatgatttgtctgtatattgccatgacttgctcttcttctttttatatttttttctttcccgttgagtgacctacttgatttacttaatttctgggtggatattccttccattacaagtcctagcctaagacttaaggaaaatgagcttgcttttctactttcctgactctggttccaaaggccgaattatttccattggaataaaaacttcttgattcttaacccttaaggagacttttagaaagtattatcctcaattgtaatattggtcttttcaaaattcacccatgagagcaaaatcaggaccctgttctgggaagaagcatgactacgtcccagggagccaggccatttggccatgaaactgtgattgtgaaaagacgtagatgaaagcatatgactttcacaaaaagtaatgacaagaagagggatttcttattcttgggacaatttggagagaattagtcttttcttcaggaaacatgtgcctaaatatcagaaaagaagtcatagaagaagaaagaaaatctcgttttcatttcattttgatgacttaaagatggatgggcaattttcctggggaatattaaggtttaaaagaacataaattttaggaaaagtttccagttattctcaataataagacagatataaaactattttccaaatctataatacaaaattgccctgtgataaatgacaggaaatttccgaaggtgatgggttgaaaacggtgtgatgtggtccctatatttctaaattaaattttcaggtagaataatcatagtgagataaaaaggaaatttttcagcctcaaaatataaaaggttttaaagtcatctattaaaagtctttgatatacattttggttattcaaagcagaataaccactgtacaattccatttatataacattcatgaaataacaaaattgtagggattaataacagattagtgattgttaggggttatgactggggagaaggaatagctgtggctattaagataaaaataatgaactattcctcctatccaaaaaatctatttataaataaacatcataaaaaataaactcaaagtgaatcatgaaattaaatgtaaaatgtaaaactgtgaaacttttggaaaaaataaagaaaatcttcaagatgcagagccaagcgaagagttcttaggtttgacaccaaaagcacaatacacacacacatatacacacacaaattggatttcatcaaaatttaaaacttttgctctgtaaaagatcctgttaagaagatcaaatgataaactacagactgggagtaaatatttaaaaaccaggtatctgacacagagttgtagctagaatatataaagaattcccaaaatgaaacagtaaaaaaaaaaaaagttagaaaatgagcaaaaagcattaaacagatttcactttgaggatatacatattgcaaataagcatatgagaagatgatcaacattatcagctatcagtgaaatgcaaattaaaaccacgatgagatattattatatacctatcagaatggctgaaataaaaaataaagataacatcaaatgctgttgaaaatttagggaaactggatcactagtatgttgttggtagggatataaaatgatacaggcactccggaaaatagtttagcaatttcttataaaattatgcatgccttaccccatgacccagcaattacactctttgggacttatcctagagaaacaaaagcttatattcacaccaaaacctgtacatgaatattaatagcagctttattcatcacagcccaaatctggaaacaacccagatgtcttccagtgggtgaatggttaagcaaacagtggcacattcataacatagtctattatatagcaatacagaggaacaaaagcatttatacacataataacttgcatagatatcatgcttttatccctcatgcagagtgagaaaagccaattttaaaaggttactactgtacaattccatttatatgacattattgcaataacaaaatagtaggagtaagtaacagattagtgattgtcagggattaatgatgtggggaggggatgggtgtggctgtgtgaaggagtagcatgaggaaagctgtgattgtgaaaccattgtgagtcttgattgtggcaatggttacatgaatctatacatacgataaaattgcatagaaccatacacatacaaattagtgcatgtacaacttcagaaacctaaataagctctacagattataccaatgtgaatgtcttggtttagaaactgttctatagctacacaagttgttatcattggggatgctaagtgaagaatacgtgagacctctatatacattttttgaaattataatactataattatttcaaataaaaaataaaaatatttttaaaaattaaacaaaactttgcataaaactcacaattctaaatcaccttctgtggctctgttacccatctatcacacattcagcctaggttctcttagttcctgcactaataaatataaatataaattgtccctgcattataaataaccctgccccaatcttgcgtttatctttcgtctttttcgccttttttcttaggtacatatattcagaaacagagaaaaactgcctattgaaaatgatttgtaagagtcagagtttgctaatgtgggtaaaataaatcaaatcagtcaatgataaattatatgcaagctagtgtaatgatttgtagataactgagaaattatcttattctcaaaaaaagtcaatgaacaacgtgtttatactgttagtacagtatatgctcggtaacttttttttctgctgaatggaagaagggttggaggagcatcaaagttaatggggactaggagcagactcctattggcacaaatccaaagagaattcgtataagtgatagataattcaacgagatgagcacatatttaatggcaaaatttacctacaaaattattggcatatgataaacacatctcaattataaagtccagtggtgtgtcatagaatcaaactaattaggcaatactagttttgccatgatatcttagcctagtattgctaatttcaatgttcttggaaaaacagtttaggagttatgtcagaatattattgaggttaattttcattaggtacctactcttttaattcagcaactcttatttttatagtagtgggtattgtctaaattatgattaccttgaaatttttatacatttatttgaaactagacatgctcactcaaaaatttcaatgaagactaaacatgtagaaaacgagaaacagtcttaaaacagaagggcaatagggtggagacaagttcgatcatacattaaataatattattaagctgaaataattaaaaatagttggcaatagtgaaagtataactagatagattgatagaagacagaaacaaattacatagagaaaattactgtactgcaaagatattactaatcagggagaaaataatagatttttgagcacataatgttgagtcaattgtctagccacttgaaaaaaattaaccccttaccttattccttagatcaaaataactccaaatgataggcttaaaagattaaatataaaacataccagaaattttcaggatttaaaaaagtaagcttagagtgggtcaggttttctaagcaagaccaaaatttcaggagacattataaagatgaatgcatttgaatataccataaggaagagatatatgaaagcaaatatttctacgtggcaaaaatacaataaaacagcaaaaactaaacgccaaaatggaataaaaagcttcaaaatataaagtcacataaaacgtgactttaatatataaagagctttagtaaaccaacaaaaaattaactctccaaaagaaaattgtgctaatactataatagctaatgttacttatttgttatgtggtagccactattttaatttttatctaggtagtgtgtaatctacctatctacctatgtatctatcattatcaatcaatatatatctgtgggtttcaatacatatttcaagtgattctcacagtaattctttaaggtttgtactgttctttctccaccatccaatgataaaactaagctcaaagataaaactaagtcacagaaaatctctgagcaattttttcatagaaaataaatcatagagctagagtttgatcactggtattctgtctccaaaatgaacacttaaacataattttcaatagactattcaaagagagacatacaaatggattttaaaattattttttcaacccaggcttcagtaataatagagaaaattttgaaatggtattctgaattagcatttttcacctattaacttcagaaagataaaaatgtttaataatacattgtgttggcaaggaagtgaagcaatatttattaaatgaaaaatgcatgggttctctgttatcatttacatatttccaataatttttataaatatatttgtccatgttggcaaacatctttttatggggataaccatttcagcataatctttggtagtaaaagactggaaatgaaaatacaaaaatgcaaaactgtttaaatataatatagtacagccaaacaatggaatactacgtggccattttgcatggacaaaaaacaaggcacagaatgatatgtatgtttgtctgaaaataatgagtatgtacgtgtatgagagtgtttgaaagaacagatgcatagatgcctctataatgagaactgtgatactgaaggacagatgaggaggaaagacttacttttgctgtgtattatttatattgtgtaaaatatttataatttgcatggaataatctccctcgccacacacacacacacacacacacacacacacacacacacacacacacagtgactttcaggtctctctgaggtccagaaatggagacctcttttttctctctgctatgctttttcaaaacttccttccttctaatatctaccaattttgtgaccctgaattttggtcacagttggtctcaatcctgtagtcacacagaaaattatttgaagacatggatttcttaatttatgttccaaattctctgcacattgcatcagagaggtttctagacacatccacaagctatttgatcccctcaactccatcttttattttcagagctctagtctttttaaggtttcacctgctgaggttttgaggttttaaggttttaaggtttcacctgctgaggttcttgtgcattctagtgaaaaatatattttagtgagaaatataattacagctaccagtcggattcaactcctttgtaacttctggttgcagcttagctttaaaaaccattcaaaaaacaatctagagaattaagagtccaagtaaaataaggcttttctcattgccactttaaacctcatatgcactatgcccaccaaatatgaagaatatttttctttgtaggtggcataaagtgggtactgtgggacagtactgtggccacgaggtggcagtggttcaatttactctcattctacaactgcctttaatttcaaaagcatgaaaattactagaggacttgcatttgattggttgagcagccaacagaaaggctctttcctgcattacagaatatgaactaagatacagaagtggcgcctctgagaaaagaaggttggaattatcgtaatttgtttctaggctgagataccagcatggagaaaatgttggagtgtgcattcatagtcttgtggcttcagcttggctgtaagttggaggttaagaaatgagaaccattcgtgcaaagctgaggaagagagatgaagatttaatctcagctcattcagttttcctgttggaatttttcaaagctgctaaactaaaagctttgtataatttctgattttgttttcctgaacagggttgagtggagaagaccaggtgacgcagagtcccgaggccctgagactccaggagggagagagtagcagtcttaactgcagttacacagtcagcggtttaagagggctgttctggtataggcaagatcctgggaaaggccctgaattcctcttcaccctgtattcagctggggaagaaaaggagaaagaaaggctaaaagccacattaacaaagaaggaaagctttctgcacatcacagcccctaaacctgaagactcagccacttatctctgtgctgtgcaggcacagcgttccccaggcacctgcaacttgtatcaaaaccctgcagctgaggatctgaaatgatggcagaggtatctctgctgttcttcctcttgaaggagtatttatttaatgcccaggacctttttccaaatggtcctttggagaatgaagtcatgagacaaagccagagggcagggactactgttcattctgtccaggcatcctagacagtcccttgtgcatgttcatgggtcagtctactcttaataacatcccagaacttccctcacataaattcagaagggccagatgtaatatgaagagtcctggtttccagttgcggactacttggaaaaagactgcacaggtgcatacactccctgccgaaaaaaaaaaaatgtgtgtatgtgtctgtgttgtctcacaataatctggtcacgttaatataagtaaatctttttcattttaatatagtcttcttgaaacccacatctccaccagccacatctctatatttctcatcccttcatcatcaaattacttgaaagaattgtctggactcattctcttaatttccattcttcagtctcattcaaacctggcccctgttagcattactccaagggaagttctcactttaacaccagtggttttggtattgataaggctatcagatatttttcagtactcatcttgtctaagatttgcagcagtctttcctcccttctcattaaaataaatgttactttaatcaaaataatactcacatatatttacaaaactcaacagcactgtctcacaccccagtcatgtctctccattctcaggtgatggtactcacatttatctgaacatttaaagatgctgtttcttcgctttcttctctttctttttgaaattgaggtacaacacataataaggtgaataaaactttagcttacagctcaatagaattttacacttctttgtatctgggtaacaccatccagacctacatattgaaattttccattactccagaagatttccacatgccccttccaattcaacggcccttccccaactctccacctggagtaaccatgattctgcctttcatcacttggtcttacactttgtgtgactggaattatattgtgcagcctatattctactgtctcaatttcttctctcaatatcatatctttgaaattcattaatgtttctgtatgcatgttattttaaaatttatatgtaaaattcccctgtataaatatgtaataatttatttttccattcttcttgaaatagacttttgggttttttagactgtttacagttttgtgccattatggaaaaggttgctataaacatttacttaaattttatttggtggacatataaactcactattcttgggtaattccactggaatggacttgaatggacttaactaggccataaaataggcatgtatttagctttagtggttattatcaaatgtatttcgaaaggctaccaagttgtatgctcttatgaacaatgtatgggagttttagttattccatgtcttcaccaaaaaatggtatcaggtttctttttgtttgttttttaatttaagccattatggtgacatgcagtggtatctcataaaattgtggttttaatttgcttttcctgaagaataatgatcctgagcaccttttcatatgctcattgtccatctggatattcctttctgtctagtacctgttcaagtcgtttgcttatttgtttattgttcatatgtaggcattcttcatagattctggctataagcccctgtcaaaaccatctattgtgaattctccactaatccattacttgactcttcactttcataatgattttctttgagatacagaaattcctagttttggtaaagtccaaataactatttatttttctttattggttagtagtttttgtgccctattgagaaatctttgcctacctcaagtaacagacacactttttttcatgtaggtccatttgccacctcaaatcaattttcgtgatgctatgcaaaaggtgtccaggttcctattgccccatgaccatttaatgaaaagatcttcctttcccccactgaattgcagtggtgtttgggtcacaaatcaggtgatcctacgtgtatagctctatttctgcactctattttgtttcttctgttagttcagcctcccagctatctcataatgtgcttattaatatagctttagaatagaatttgaaactcatcagtgtttttcttcatctgtgttcttccccttattattttatccattctatgtcctttctgaatccatacaaattttagaactagtttctaaattctaaatcattttcacatctacaaaattgcccttgcagttttgattggtattgcattaagcttatagataactttgaggagaattgctacctcaaaaatattgagtcattgtgtcaaaaatatagactatctacctgctaaggtcatctaatgtcttaagcaatgattttagttctcaatgtagtgatttgcacatcctgtatcagatttacttccatgtatagacatttcatgcagatttaaaaattttattttctaattgttgctagtgtatagaaatacaattgggtttttacatattgaccttatattcattgaacttgctacacttactaattttaatcatttggtcatacattattttggattttctaagtccacaatcatgccatctgcaaatgaagaaaaatttgtttcttgcattataatctttgtatcttatttattttcctttccttccttattggccagacttagtggaagagttggccactctatttagatctgcttatcatcccagggaggcagggacttaaaaatgtaaaagatataaagtgagcgagtggtttatggagttctagctattgagtcaaagtaatgactaatgccctacttataaatagactctaaacaacagcatcggctctttccacctccgctttgtgtagaagaaatgcagggggcctagaaaaaagggagcagaagtagaagcttcctgatttaggaagagaggcacaagtgttattttacccacgtcatctggttttgttgtatttaaccctttgggtttacagccttacagtttgcccaatgtgttcaggtgaagcgatacaaaaatcaccgaaggattcctgctttacctggtaccaattttgtcattctcatcatcatctttatcgtcacaaaaactatgaagtaatattaacccatttctcagattgggaaactgaggcttacataagttttgagatgaaagcatttctgagataaagtaaatgctgcaggtaccataaaataagatgaagaaaaacatataaaacttcagagttaaccaactagacagcacttctctaattttactgtacatttaagaatcacatgaagagtttattttaaaaatgctttatttccatagattctgattctataggtctgatacggggtcaggagtctgctttttttagtgagttgtctaatgattttgatcattagatctggagatcttactttgaaaaacactgcaactgggagagtactgcatttcaggaggatggatgatatagacatgcaggagattttgtgttaacttagataacagggcttagggaaccaggaaacacacctgggaatgccttaatgtgggttatgcctattctgattaaactatatcctatcataattagtagaagatactttgttttgatgataaagaagggaatgatttttgtttcaacaacagaaatttatttatgatttgaaaagcagcagagagattaggggatagacaaggccttttagttggcagactttccaagaagaaaataggctaaaacaatatatgagattctccactatgaattaaactttttcattctttattgtcaattaaaaaataaaacttctatatattttaaaggccataaaccaattatcttagtgtttccttcaatgttctaaaatttagacaggttttatctaattattttatttactctttttactctgcctggattctttacaacattttaactttctattaaagaaagttggttccaatactgttaaggctctgtttattacataatatagcacaatagtgctctaaactccacctttaacatgctcatataattccagtatagaccatgctaatactcataattgtttaatgaccatggttaatcttctgctgcatcctcatagccaggctttccttttcctgaatccatgatgagtttggttggtgtgaagactgtaattgactttggtccccaaagctcacctaatattatattcctaatattattggaatacaaatatgtctatttacatttatatatttataatctatatgttacacattacacatttatatttatttatatgttatatgacaactaattattggaatatatttttattttgtcttttggagaatttgttatggaatcaaacagacttatttttcccatgagatcaataggatatattgtgggacattttctgttacgaatttggcaaataggacccaaagctaggaaccaagattcattaggcatccaccatttttcattaagaatggctcacattttaagcacagctgcacttctcaaaaaatttttttaaataaaaaaattaaaaaaagaatggcccacagttggacattctctgtagaggtaagaagcagcaactgaacaggctctgcaacctccaattctcacctcttagctggtgtgaggaggtagcgagggatgggaggagtcaagaagagaatatcatcagagtattccccctttcccacaagccacttgaggggtcagtactccaaaataattacttccaaagacagagatctgctgcataaaaaggaacattgtgtgacattttcatctttgttctgaagcagattttaatctatgtttacatctacttaagaagaagacgaggaaactggagagagatggtggagtggagagggggcagccatggcctgcctgggtttctgcactgggcatggtgaggaggcacgtgtattctgtgggcaggtgctgcctctgaggtgccagggctgagctgtcccgccagagcttcacccggaggagaaagtaaggggctgtggagggttctcctgagggaggggctgacaggaaggggagacacctcccttgaggagcccctgaggtcccctgggtgctctctcatagggacactcaccatacacagccatcagtggtcggccagggaagcaacaacactagaggtgcacagtggttaagtaagaacagttttgttgtttcttccccttaatctttttctttcaccttaatcccgggaagttaaaatcaaagaaaaaggaggaaagaagagaacaaagtaggccatgtccacctcactgtagctcgggatcaggcctgaagtttggagagcagaggaaaggtgaagactggagtgttaaacagaactgccctgaggtttatttaaccactgaaagtgcccagaggtttggagctttctttcctagacctcttcaagggcataaggaccagggcccctctgaaggacccaaccatgcttaagcctctttgatgctcttttctttggcatcctttcctctccctatcgctccacccagaaaatgtttatatagactctggtaggcagacttgcattatatctttgtatcatttcctataagtcagtttatgctggattccttaatttgcctataaagctgaaagttttgaaataagatggtaggaaagacttctttatttttggtttccagctatgcctcctttcctgaaagtgataagcagaaaatcacccaactgcctcaatggaggaaaaattatgaggttaattaaaaataataatataaaaaggcaaccactgttaatattgaaaaatggcttgtcacacatggtgatcattctgaaaccacaaatgaccaaaactggtgaagtcctttctgtaacatcacaggcacgtctaagtgattcttttccatatctgtaaagtaactttacgaaagcaggtgaagacctgcccaggacctgaatgaaagcattcatgtatttagtcacaagagggggctgctgtgtctgtcaataagatgcctgttcagttggggaaagagtgtttggctcacagtcagtagtgaagccatgcagaaactgtgacaaatgatacgctttattctctttgttctaagcagagtagtctgtgcatagcttccaacattcaataactcctggccttgcctcaatccattatgaaaagttttgtttctactcaaaataggacaatatagaaagacagagacaggaagtagttatacagctttcaagttgaattgatcttttttttgtcgtttttgaaatagagaaaagtagatatttttggtggggaagatacttttttttctcaatctatttcatttctcttaaacttgagaagataatgagaaaaagtcttctaggttgctcccttccttcttacagtcccctcctttcttctgtctttcctcttctctgcatttcaattcttagtgtgtgtcaccactaggcacacacatggagaatggggaaaggtgggtcagggatagggtttctggggtgtaaggatgtgtgtgaccccaagtctcttgtttcctttgtaccaagatatgcagtctgtaaatgctctcctagagatagatgatatctagaggcatttcaggcatctggagacatggcttcctgatcaggttctgattatacttttctggtcactttggacacattactgtctgcgtctgagcctcatttcctctttattgttatttagatgggctttctccatcttcttatgatggtataagccttggtagggttttcctgaatataaagaaacttgtgacagagtggactgtactcctgggtaagagtttcaggcctaagaaaagatggtgttctaaaccaagaaatcagaagaggaacctgctgcctgcactgtcttactctccttcacccaagatgctaagggcaaccaatcaaataacagctgttaactttttgaggaggtcacatcctcagtgtgaggggctacatcatacccagtatattagtttgtgccataggctggggacttaaaaatcagaaatttattgtctcatggtctggaggcaatgtctgaagtcaagatgccaacagaatccaggaaaggaggatctgtttcaggcttctctcttcggcttatagatggccatcatatccctgtgtcttcatatcatcttccgtctgtgtatatctgtgtccaaatttctccttttatattgcattagatcccacctcattttacttagatacctctataatcaagaaataatcttgaacccaactccaaataaggtcacattctgaagtacttggcgctaggagttcaacatataaattttagagggacaaattttagcctataaccctcagtgaaagctcacagaagagttttctttgctgtagaatttcctgttttattgagcccaagggaaaatgacagacagatccagggagtcctgcctcttaactagtgagtctacatgaccccagccgtatttggctctttctaggggaagggagtcatacataaaattacttatcagtactataccaggggtcttcaacaagttcatgaaaaatgcatattacaaaaaaattatgcataatttttaaatttttgcatcaaaataaactcctactaacttgtaatgacattgtacacagtatctaatttgaggcactaagaaggatgaaagacaaaacagtgtgaaaagagctcctatcagagcaacgtgaattctgccaatattgaagcaaaaacaagcatcaaatttaaggtaaagcttgggtggaagaatggtgaaatcattgacaagtttatgggggcaattccccaaagaaattagcagtttacaaatgaataactcattttaagaagagacaagatgatgttgaaaatgaagcatgcagcagcagagcatacacattgattgagaggaaaaaattcatcttattcatgccctgattgaagaggactaatgattagcagcagaaaaaatagccaacaccatagacacctcaactggttcagcttacataattctgacttgaaaattaaagttgagcaaacctcccactcagtgggtgccaaaattgttgcacccatatcagctgcagagaaaagcagacatttcaatggaattttaaacaagtgggatcaagatcctaaagcattttttcaaaggattttaacagaaaatgaacacagattcaccagtacaatactgaatacaaagtactgtcaaagcaatgactgccaagaggtggaagtggtccagtcaaagcaaaagtggactggtcaagagcaaaggctgtagcaacaggtttttttgtttgtttgtttgttttttgttttgctcaaggcttgttgcttgttgactttctggagagctgaagaatgacaacatctacttattactagagtgttttgagaaagttagccaaggctttagcagaaaaatgcccagaaaaagctcaccagagagttcttcaccacgacaatgttcctgctcattctttgtgagagtttcaatgggaaatcattaggcctccatctcacaatactgactttctttcttctgacttatttttgtttcctaatcttaaaaaaaatctttaatgggcacttactttttcttcaattaatatataaacaaacctgcattgacatggttaaattcctggactctcagttcttagggatggactaaatggctgatatcatcacttaaaaaagtgtcttgaatttgttggagcttatgttgagaaataaagtttatattttttaattgttaccttttaattccatatttctataaactttttgaaacccccttataccttgatctgaaaaatctgccttgatttgagggtctggggataatctcgtttttctcctcagggattatgtgtaatgttaaagccacaaaagtagggcagtgctgaaacaagaagtgaatataccctgttcccactctaccactggaggaaatgaggacacaatctggtatcaacagtttgataaccatggctcacagtatctgattggaggtttaaagaacgaggtgaccagtcaaatggcttcactgcctgtattagtctgttctttcattgctataaagaaatacttgagactgggtaatttgcaaaggaaagaggtttcattggctgttcaggttccgaaggttgtacaggaagcgtgttgttggtatctgtttggcttctggggaggcctcaggaaactctcaatcatggcagaaggtgaaggcagagccagcacttcacatggttggagtaggaggaagagagagaggacggggaaagtgccacacacttttaaatgaccagatctcaaaagaatgcactcaccatcacaagaacagcaccaaagggaaaatttacccccatgatccaaacacctcccaccaggtctgacctccaacattggggattacaatttgaaatgagatttgggtggggacacagatccaaaccatatcactgcccattcctgtggacaataaggctagtaccctggtcctgcaccagataaccctcaaaggcaccaccatgtgttactacactgtgggcagattggaccacatctgtctcccaggtgaagaggggagataaaatccatttaaagagggcattgcccaagaaaatgtgagattaatggaagaaggtagaaaatgaaatgagaagaaggaaaggggaaaaataaggaaaggtacatgaaatcaagaactgcaccagtaaagaaaaaacaaggagagagaagatcctggatattgctctttctccaatctaacattttcattcttggtaaaggtccggtgtcaagttcataaattgagcattatttttctgagaaatatctgggctctctcgattttttcaactatagcacatgcattgaaaagtaaatgaattttgaaaatttgctaacatgaaatcattatatcaatatttttatttcaacatttccctagttttctatgtacctgtattccatttttatgactaatcactttgtaaattaatgtgtaattgtttaagtatctacgcaatatagaataaaaagtgatacttcattgattttcttctgacaagttcctaatcactgttgggtttcatcacacttccactgtttctatacatttaaatacaaactcacagtaaacatacttttaaaaatcgtaaataggatcacactatatataaaatgctgtggttcaattgaataagagacagaagcttttgcaactcagaaagtttaacccaccttatacttttttgcaagtgtagtaagtaactcacaatacagagctaccataatgtattgactatctatattgaaagaatatttaaatttttttccacttttttaaccattgcatgcaatgtacagtgctgtaagtgtatttataagagtatttcttaagaaaaattcctggccaaatggaaattttgcattcagtaatatgtaaataacatatgtagacatttattaattatatttcagctatcagaatatcagagtatccatttcctgacattatcaacaaaactgaatattaatagtatgattctgaactccttttgcaatatgacaagtaagagatgatagaaagggccttttcacaaaaatgcaagttacgggaaaccagtccttaagcactgaagtggcaagaagagacagcagtcagaggaatctggagaaagttgctgtaacagtatggaaaacatttatatattttttcttttctaacataagcatttaagaatatatatttctctctatgcactgatttggctgcattctacaaatctcatattcaaacatttttgtttctttaggagaaggaggaggaggtgaaagtggaggagaaagaagcatttctctagcagtactgtgcttggttctgaagtggcagtgttttcatttctttcattccatttccacctcccacattttgcagatctgtgtgtgtgtgtgagagagagagagagagaggagagagagaggagagagagagagagagagagagagagagagagagagagagagagagagagagacttgtctcagattggctgggccaactctgtgtttcctgtagaaatgtttgaacatatgagagagcaaagcagagtgtttatcttgtgagccattctccatatttcagatataagatttcagttctcagtgagtctaagtgacagaaggaatggagaccctcttgggcctgcttatcctttggctgcagctgcaatgtgagttagagggaaatggaaatgagcaaagagcaggctgactccaggacgtttctcccaggaaagagggagaaagaaagggagttgttatgcctgtatggtttactgggaatttctgtggaaattgaaaaaataaatttaaaggtaatttctaaggaatcattagccactaaccagtctattgctctttttctgaacaggggtgagcagcaaacaggaggtgacgcagattcctgcagctctgagtgtcccagaaggagaaaacttggttctcaactgcagtttcactgatagcgctatttacaacctccagtggtttaggcaggaccctgggaaaggtctcacatctctgttgcttattcagtcaagtcagagagagcaaacaagtggaagacttaatgcctcgctggataaatcatcaggacgtagtactttatacattgcagcttctcagcctggtgactcagccacctacctctgtgctgtgaggcacagtgcacaacaggcacctgcaaccaatacccaaactctatagctggggctctaactgcatgttttatcttgagactgagcaatgtttttgcattaagaggacttctaaattgacactgtctccacacagaagcaatcaaatacacaaaacttgatgtaataatctgaaattaaactatgaattctctgatctttagatttttatcaattttaatataaataatagttttatttcaattaatttacatgccatgaagttcagtcttttaaagtgaacaattaagtgttatttagtgtattcacaatgttgtgcagcttttatctctgtgtagtttcaaaaactttttaacatctcaaaaggaaaccacatgtccattaagcagttaccttgcccaccctcctcccagcctctggcagccaccaacctgttttcagtctctatggattttcctattctgtacatttcatataaatggaataatatagtaggtagtggcctttgtgtatggcttctctcacatggcataattttctgaggtttattcaatgtaggaaggaccagagaaagctaaatatgcacatctaaccaatgacatgcttatatcttccccatgcaagagcctccaaccagggcatacctgaagctttgttagttttcttccactctaaagcttccctactcctctgcctatctttaagtctctgccaaacacaagggacggtagctgattcctttggtataccaagctctgaataaattgcctttgcttttttcatttaggtggtcttcacttatatccacagaactattgtaaagacactgagtttttcttccctgccaagttctcacttcaccataagagtcactttgcacatgaaaaattaatgaatcaccataagaaatgttaaagctggagggcagcttgtcctccattcagataggtcattgaagcctacatcaatcagatagtacttcttagataagtcagagagatgcattgatgtaaagcccagttctcaatatttatgtgtcaaactctgtcctcaataaaagctcgaaactccaaacagatatcttggccttcctggaagattttcttatcaacaagtccttgttctcatttatttcttttactaaatattcaggctccatattgtgtgatgaggagtttgcattcacaacctctgccatatctgggctacaaagctgctttctttcttgacattacaaaccaactcgtgggtaagtaatacattcagatatatgagctataaaggagcttaaatagtgggggacttcaccaccccactgactatgttaggaagatcatcagggcagaaaactaacaaagaaattctggacttagggccgagcgtggtggctcaagcctgtaatctcagcactttgggaggccaaggcgggcggatcatgagatcaggagattgagaccatccttgcaaacatggtgaaaccctgtctctactaaaatacaaaaaaattagccaggcgtggtggtgtgtgcccgtagtcccagctacctgggaggctgaggcaggggaatcacttgaacttgggagacagagattgcagtgagcggagattgcagtgagccgagattgcgccactgcactccatcttggtgacagagttagactccatctcaaaaaaaaaaaaagaaaaaaagaaattctgcacttaaacttgaccaattggatctgacagaattttatagaatacttcagtcatcaaccacaggatatatattcttctcattggccataaagcaagcctcaataaatttttttaaaaattgaaattataccaaccatactcttagacaacagtgaaataaaaatggaaatcaatactaaggagatctctcaaaatcacataattacatggaaattaaaccacttgctcatggatgattttagataaaccatgaaattaaagcagacatcaaaaaattatttaaaataaatgaaaacagagacaccacatacaaaaatctctgggatgcagcaaaatcagtgataagaggaaagtttatagtgctaaatgccaacgtcagaaaataagaacgatcttaaattaataatctaacatcatatgtagagaaacaaggaaaaggacaaactaactccaaagctagtaaaagaaaagaaataactaaaatcagagcagaactaaatcaagacacaaaaatccatacaaagcataaataaaaccaaaagttggttctttgaaaaaaaataataaacaagatgtatagactgctagctaaattaactttgaaaaaaataataaacaagatgtatagactgctagctaaattaacaaagaaaaaaagagaagttccagataagcacaatgaaaaatgacaaaggcagcattacaaatgataccacagaaataaaaagatcctcagaaactattataaacacttctatgcacataaactagaaaatctagagaaagtggttgaattcctggaagcacacaatcttccaagattcaatcaaggaaaaaaattaaatcagtcattaagaatctagcaaccaaaaaaacctcctgggccagaaggattcacggccaaattgtaccacatggacaaagaagagcttgtaccaatcctgctgaaattattccaaaatattgaggaggacggacaccttcctaactcatgctataaagccagcctcaccctgaaacaaaaacatggtaaagacacaaagaaaaaagaaaactacaggccaatattcctcatgaatctagatgtgaaaattctcaacaaaatactagcaaaccgaaaccagtactacttcaaaaagttaattcaccagaatcaaataggtttcattcttgggatgcaagttttgttcaatatatgcaaatcaataatatgattcaccacataaacataattaaaaacaaaagccataagatcatctcaatagacatggaaaaaacttttgataaaatccaacatcccttcataataaaaacctttaacaaattaggcactgaagaaacatacctcaaattaataacagccatctatgacaaacccacaggcaacatcatattgaacaggtaaaaactgaaaacattcctcttgagaactggaacaggaaaacagtgaccctcttaccactcctagtcaacatagtattggaagtcctagccacagcattcaggcaagagaaaaaataaaagactttgaagtaagaaaaaaggaagtaaaagtatctctctttactgacaatatgattctatgcctagaaaatcctaaagactctgccaaaaactctgccagaagacccctggaactgatcaatctttcacttccttggttagatggattcctgggtatttaatttttttgtggctatggtaaatggtatgagagtgaaagatctctacaaggataactacaaaacactgctgaaagaaatcagagtcaacacaaataaatgaaaagccattccatgctcatgaattgaaagaatcaatattgttaaaatggcaatactgccaaaagcagtctagagattcaaaactatccctatcaaactcccatcattatttttcacatgattagacaaaactattctaaaattcatatggaaccaaaaaagagcccaaattaccaaagcaaaaagaacaaagacagaggcatcacattactcaacttcaaattacactataatgctacagtaaccaaaatgataatggtagcagtacaaaaacagacagatagaccaacggaacagactagagaactgagaaagaaagccatacacctacaatcatctaatcctccacaaagccaaggaaaacaagcaatggggaaaggattccctattcaataaataaacagaattaaaaacaaaagatttacagtaagacctcaaactatcaaaatttcagaataaaacctaggaaatacccttcttgatatcagtcttggcaaaggatttttggcttaagttcccaaaagcaattgcaacaaaaataaaaattgacaagagggatctaaataaggagcttttgcctagcagaagaaactatcaacagagtaaacagacaacctacagaatgtgagataatatttgcacactacacatccaacaaaggtcttatatccagaatctataaggaacttaaacaagtcaataagaacaacacaaataactgcattaaaatatggacaaaggacaagaacagacacttctcaaaagaagatacagccaagtggccgacaaatgtatgaaaacaattctcatcatcgctaatcatcagaggaatgcaaatcaaaaccacgatgagataccatctcataccagtcagaatggctattattaaaaagtcaaaaaataacagatgctggctaggctatgggaaaaaaggaacacatactctgttgatggggatgtaaattagttcagccactgtgaacagtttgcagagcagtttggaaatttctcaaaaaacttaacttaaaatagatctaccactcaacccagcaatcccattactaggtatatatccaaagaaaaataaatcattataccaaaaagacacatgtactcgcatgttcattgcagtgctattcacaattgcaaggacatggaatcaacctaggtacctgtcaaatgtggattgaataaagaaaatatggcacatatacaccatggaatactatgcagcgacataaaagaatgagctcgtggcatttgcagcaacatggatgcacctagaggccaaatttctaagtgaattagtgcagaaacaggaaaaccaaataccacgttttctcacttgtaagtgggagctaagcattgggtacacaaggacacaaaactggggaacaatagatactggggtttcctgacaagggtaggactgaaaaactacctattggatactatgctcactacctgagtgacaggatcattcataccccatacctcagtgtcacgcaatatacccatgtaacagacttgcacataaaccctcaaacctaaaataaaagttgaaattgtaaaaaaattaaaaataaaattggatatagttatgaaaaagggggcttgactagtgctactttaatagctattatattccataatataaatgaacttctattgttaatgacaattaatgaactacattgcaagaataaatgtgagagttcacatttgaaagaagttgaaagaagttactttctcctgcacatggggtaacagcatcttaggtaggcaaacactttgctgttggcaatatggcagtgaacagttacaatttaacagggaagatgtatacacacaacaaagcaattcaaacaaatatataatttcaatgcatgataaggacaataaattttaaaaatggatatgaaagatgataaaattgtgtttactttggcacggtggggattatgctgctggtggtcagagaaggcctctctgagaaaatagttacattgagatatgtaggaaagattgcaatagcaaagttaaggttcctgctaaaaagagctgcaggcagagagaaccacttgtacgatacagtgaacttaatcaataaatcttttgtgtgtgttctgacttctccaccaagtgaccgtttgcccctctctttctctctctgcaggcctttctatcccctaagacataacaatattgaaaattggctaacagtgacttctaactgttcaagggaaaggaagagtcgcatatttctcacattatttatttttctttttgtggagatggggtctcactatgttgcccaggctggtctcaaactcctgggctcaagcaattctcctgcctttgcctcccaaacagctgggattataggtatgaaccaccacgatgggactctcattttaagtcaaaagctagaaatgattaagcttagtgagaaaagcatgtcaaaagcccaatcaataagctgacagatagacctcttgaactaaacagccaagttgtgaatgcaaaggaaaatttattgaagaaaattaaaagtgctactccagttaaacacataaatgataagaaagtaaaacagccttactgctgatatggcgaaagttttagtgttctggataaaatatcaaaccagttacaatattcccttaagccaaagcctaacgcacagcaaggccctaactctcttcaattctgtgaagcctgatagaggtgaggaagctgccaaaggaaagtttgaagctacaagaggttgtttcctgaggtttaagaaatgaagtcatcatcatgacataaaagtgcaaggcgaagcaggaagtgctgatgtagaagctgcagcgagtttccagaagatctaactaagaccactgatgaaggtggctacactaaacaacagattttcattgtagacaaaacagctttctattggaagaagatgccacgtaggactttcatagctagagagaggaagtcaatgcctgacttcaaaacttcaaaggacaggctgattctcttgttaggtgctaatgcagctgatgactttaagttaaagccaatgctcatttaccattctgaaaattctagggcccttaagaattatgctaagtgtactctgcctgtgctctataaatggaacaacaaaacctggatgacagcacatctgtttatagcatgttttactgaatattttaagcccaatgttgagatctactgctcaggaaaaaaaaggttcctttcaaaatagtactgctgattaacaatgcacttggtcacccaagagttctgatggagatgtacaaggggattaatgttttcttgcctgtgaatgtaacatccattctgcagcccatggatcaaggaataattttggctttcaagtcttactatttaagaaatacattttacaaggccataactgccatagatagtaattcctctgatggtctcagcaaagtaaattgaaaatcttctacatgataccattaagaacatttgtaactcatggaagtaggtcaaaatatcaagattaacaagattttggaagaaagtgattccaacactcgatgactttgaaaggttcaagacttcagtggagtaagtaactgcaggagtaaatactttagtggaataagtaactgagataattttgaaatgatattgatggttcttgtatattttaactatctaggacactgctgtagaaagcttttaagaatgggagggaaatcatgggtttggcatggttaagttgttttctttcctggaggcagtaaacgagttgaaaggctcttgaggtgccctctggagctcagaatttttaaatgccagttttaaaaagatccaaatgattatcaaaatatagtggtagatagcaggagaactagaattagaagtggaacctgaagatgtgattgaattgcttcaatctcatgataaaactaacaaataaggagtttctttttatgggtgagcaaacaaagtagtttcttgagatggaatctattcctggtgaagatgctgtgagcatcgttaagataacaacaaaggatttagaatattttataaacttagttgataaacccatagcagggttttagaggcttgacacagattttgaaagaagttctactatgggtaaaatgccatcaaacagtattgcaggttacagagaaatctttcatgaaaggaagtattaattgacgcagcaaactgcattgttgtcctattttaagaaattgctatagtcaccccaaccttcagcaatcacatcctgatcagtcagcatccatcaacatcaaggcaagaccctccaccaacaaaaagattatgacttgctgaagaatcagatgaccgttagcattttttagtaataaagtacattttaattaatgtatgtacattgtttttcacagtgctattattgtccacttaatagactacggtgtagtgtaaacatagtttttataagcactgagaaaccaaaaagtttgcatgactcaccttattatggtggtctataatcagcaatatttcagaggtatgactgtatttgactttgccatcaactcaatgacttacactccagaaattgttattagcagaagcataccaaaggtcaggcaatgggagtggtttgtcccagttgcaggtaataacagggtgctttatagagagctttttaaaaacaatataaaaatgattaatagccaatctgatttttattaccatatgccaggaattctaaacaatgtcaatgataaaaaatattttttgacctaagttctaaacaaatgcagaggttactatttattttaataataaatgtatgcttcaaattatcacatttttatttcttatcatgtaataaacagttttctacatggaagttattttggagaattctcagttttgcagctgtcttcaacacacatggattgtaatacagcgattttccatgtaccttttatccagtttcctctaataatatattatctttgatatgttgtatatatatcaaaacaatgatataattacagccagaatatggatgtcgatatagtcaagatacagaacatttccatctctacaagcatcctcatgtttcccttttattagcaatagcaacttccattatgccaccatctactatttaacccctggcaaccactaatttgttctccatttccataattttatcaagaatgctatataaatggaatcattcaggatatttatgaacatgaatatttttcactctgcataattatctggagattcatacaggtcgttgtatatattaatgtttcattccttttcattgctgagtagaatttcatagcatggatatgccagtttgtgtaaacattcacttaatgaaggacatttgggttgtttccagttttgagctattatgattaaagcttctataagtgttcatgttcaggtttttgtatgaaggtgagtcttcgtactctggaatatataccaagtagtacaattactgagacatggagtaagtgtatgtttagttttataagaaatcgccaaagtattttctaggttgctgtactgtcttgcattcccaccagcagtgtttgagtaatctaatttctccacatttctgctagcattttgtgttgtcattggttaatacttcagcaactctaagaggtatggagaaatcattgtagttttactttgcatatttctaatagccagtgatgttaaacatttttggtttttctttcttttttaaattaactaaagcccacactttattcctatttcctttgtttttgccaaatgtcctttttatgtctgcagggtctgtaataacactccctgtttcattcctaatattagtaatttgccttttttttctttgttttactacaagtttgtcagttttacccatctttttaaaaacggctgtttaatttttgtttctgttttcagttctattgatttctgcttttatcttgattaattccttccttaaatttgctttggattaattttttccttctttttcttggttcttgaggtgggaacttagatttttgtttggatacttttttcatttttaatatttgcatttagggatatacattttctctcaatgctgctttgactatgtcctacaaattttggcatgttgtattttcatttccactcggttcagtgtatgattgatttcccttgagcttctttgatccttggattattaggatgtatgttgtttaattttcaaatatttggagatttttctgctctctttctgatatttacttatagttgtattctattgtggttataaaacatagtctttattgtttcaattcttttacatttaattttttgaggtttgtcttgtggcctaagatatggcatacttggtatacgttctacaggcatttgaaaagattgtttattctgccattggtaggtgccatgttctagaaatggctattagatcctgttggctagcagagttgttgagttcgtctatgtccttgctaattttctggcaagctcttctattagttattgagagtggggtgttgaagtttccaactataattctagaatcatcggtttcttctttcattactatgagtttttcttccatgtatttttcagctcttttggttggtgtatacacatttagcattgctattccttcttgaaagactgaccctttcaacaatatataatgttcctttctgtctcttctgtctctggtactttgctttgctcagaagtctactttacctgatatcgatataattattttgactttcctttgattaatgtttgcacgatatatattttactttctttctttctttctttttttttttttttttttgagacggagtcttgctcagtcgcccaggctggagtgcagtggcgcaatcttggctcactgcaggctccgcctcccgggttcacgccattttcctgcctcagcctcccaagtagctgggactacaggcgtccgcgaccacgcccggctaattttttgtatttttagtagagacggggtttcaccgtgttagctaggatggtctcaatctcctaacctcatgatccaccagccttggcctcccaaagtgatgggattacaggcgtgagccaccgcacctggcctatattttactttcaacatgcctatgtcattaagttagaaatgaggtcttcgtagacagctgtagttggatcatatttccactcttttcactttctctgtattttaactctcttttcattgctgtttgtagaccaatctctgtatcttaattggtatatgtacatcatttgcatttaatgtaatgtatattttagtgattaatcttccatttaattttgtttgttctgttttttgtttccctgtgttttatctcctaacttcttgtgaattatttgacattttctaaaattccattcaatttacctataatgccttggatgtgtatttttgtgtagctttcttcagtgtttgctctaatggctattataaatagataacacagttgtctattggtgatgtcattccaccaatttaaatgaagtataaaaacattgtctccctttacattcagttgtcctcaccaattcatgatacagttttctttatgttttccccaatatatatttagaacctcatcagacagtgttattatttttgcttgatccatcaaccataactgtgaattaaaaaaattgatcaaacatgtttggagtaaagacttcattatcttattttctctatataggaaatattacaaatttattgtcatatgaagtcaattaagaagtatggaaccaaaaaatataaaaacaaaaaatcttaattctggcaaggacgtggagaaaagggaactcttgtacactgttagtaggagtgtaaattagtataaccactatggagaacagtatggagtttcctcaaaaaactaaaacctgagctaccataagatccagcaattccactgctgggtatatatccagaagaaaggaaatcagtatattgaagaggtatccgcactcctgtttgttgcagcactgtttacaacagctaagatttggaagcaatctaagtgtccatcaatacatgaatgaataaataaaatgtggtacatatacacaatggagtattattcagccataaaaaacaatgagatcctgtcatttgcaagaacatagacagaattggagctcattatgttaagtgacataagccaggcacagaaagacaaacattgcatgttctcatttatttgtgggatctgaaaatcaaaacaattgaactcatggacatagagagtagaaggatggttaccagaggctgggaagagtagtgagggaatgaggggggaggtggggatggttaatgagtacaaaaatatagaaagaatgagtaagacctactatttgatagcacaacagggtgactatagtcaaaagtaatttaattgtgaattttgaaataatgtacagttaaactaagagtgtaattggattgtttgtaacacaaaggacaagtgcttaaggagatgaataccccattctccatgatgtgattatttcacattgcatgcctgtatcaaaacgactcgtgtacccctaaaatatatacaactactatgtacccacaaaaattgaaaatttaaaaataaagtattatagaagtgtgtcagataaacaaggaaatatgtaaatttctgaattctgtatttatggtattcgtgttttaaaatttatagtttgttgtgattttctgacctaaaattatttttgtacccagttttattcttatttttatgttattctttttaaaatcctccatcttgtaagtttcaggcttacaaacataaatcctcctttgtacattatcataaatctttgaaattcaacactagaagggcaggaaggatgtggaggaagttcacaaaaattgtgaatttctcttagccctctatttggcccctggagggtgttgttgcctaaattggaaatggcttttctttaaaagattagaataagctccttccttctctacaggttaaagaggtgtcctttctgactgagcattcttttagacagcgatgtataaagaatctcagacaccagaggcaggcaagtttgtcaagagagcatctcttactagcagtttctacaagatccctaagaagaagaaatctaaatccctgccatttctccttagtttcaacctggattcaagttaccccgtggtcagattgtgtctgtggggaatctcctggaaaggtgcatgctgctccctcagtgcttggctagatctcattgtgtgtcttgacgcttggggtactcctgttcccaagtgggtatcattccattttactctcttgtccacaaatggagcattgtctatttgactctgaatacggactttttgtgttagctgagttcactgacatagcattggcattgtaggaaaaaccactgcccattctgtgactcagcctgacgttcatgtcgctgtctctgaaggagcccctctggagctgaggtgtaactattattgatcttctgttccaacatatattttctgatatgtgcaatacctcagccaaggactccagcttctcctgaagtacctatcaggatatagggttctttcaggaattaacggttttgaggctgaatttaagaagaatgaaaactgcttcctcctgaggaaaccctcagcctattggaacgacacgctgagtacttctgtgctgagtcccgcattgcccaggactgtagtgggggctacataaaaactacctgagacacatagcttaaacaactaaggatctcagcctcagttattttcaggaagttgacgtgttctgtgaaagcaaacagtacaaagaaagtagaatcctgtctagcatttagttcctatggacatcttagatttctttaatttattttcttatttgccattttgcaaaggaaagagcttgtacctgattctagaagaaattagactataggatttgtaacaagcaggaggaggtgatttgcaccaaggtatttcagatagtgatggactgggatgacttaaggttggccatgtggattggtataaggcaaatcaatttgcttttagttattaatctcatctctcaaacaatcagaaacccagaatgagtgtttatttcaagctgcattatctacagattattttacccagtatcctgacttcagtgagctacagtcctttgaggaaagaagcctcttcaaaggacttcagctcactgatgaaagtatttgagactgggagacttaattaaagctgacatttaaggatgtgtgcaaggcaatctttccaaagacaatataaaagggaaaaaaaaggctttatttttttaatctggtggtccccagcgaaaggcagtctaaattaaacacaacatcatggcagagttccatgtggaatcttggggttggttgttctatggatgacctaccctttatcagttctacccagattacctctctctgtttttctccctttcaattcaatttccctaatacttgctgagtgtccaataactattgttgattccttaaccatatttaattatttctctacaccattcctcatagtgccaatagtaactatttgcaacgttcttgagcagttaatccaatgttgtgcctgcagaacttttatttctacttcagtaaaaatataggtgttcttatttttcaccccctttacctccaaatccatttccagattattattatttatggagtctggggcaaaagcaaaaacaaattattttcataacttttaaaaacagctaattttcttttaaaccattagaataatctagtaaacctaaaaagcaaaatataaataataattaacaatgaatagctttaataaaatatatttaaataaaattagaatttatttgtttttaagtttaattcgatcacagtatttaaaataaatgctagtttcaacattcatctagtatataaagaagctaatcagtgtcactctttatgcagattcaatctaggataaaatatatgcaatttaaaactaatgttgttgaatattacaaagtgttccagccatcatgagcaactatagtgaatactatgctgattcatgagtaccctgaagaaccacaaatgagtacataagagatgcaagaaaatagatcctcagcaccctcgggaaacagtatttctttttgtaagaatctattgcctccgtgctgagaggaaagatggggctagctaattaattttttccttcccttccttgaaacccctccacccttggccccaattccaaatcagagtcatatgaagtcaattaagaagtatggaaccaaaaaatataaaaacaaaaagtgttaatgctggcaaggacatggacaaaagggaacccttgtacactgttggtaggagtgtaaattagtatagccactatgaagaacagtatggaggttcttccaaaacctaaaacctgagctactataagatcatatttacttatttttctacaccattcctcacagtgccaatagtaactatttggaacgttcttgagcagttaatccaatgttgtgcctgcagaactttaatttctacttcagtgaaaatataggtgttctcatttttcatcccctttacctccaaatccatctacagataattattattattgatggagtctgggggaaaagcacaaacaaattattttcgtataaacagagtctgcctcctatggcagcagtggcacaacccacaaatatttctaatatttgaaaaggacaaaggtcaaggtatgtgaagaagtatttttctcaaatctgaaaaattgtgttagtggttttttaggttacagattgtgcccggtcctgagtgacagagacagtccgtgttcttcagtacatttgcgtgtgtgtgtgtgtctgtgtgattgagtggccctgtaaaatatgaggctctgggcagggctcttgcctgagtctaagggtcatactgtccacaaccttgctcatcttctgtccttcttgtatttaaaacaaagggtcacttttcaaagtttgccatctttgcttttgttactctccagtctcgtcacctccacagaaggcatgtagcatcacatcccccatcaagtcacatcctgtaatagaagtttgacataattgttactgtcttggtgctcatgtggtgtttaaggatgctttttaaaaatgatatcctgtaaacctttattacattcagagagatgtttgtctcctcactatatcacaagctctctgaaggaaaaaccgtatccaattcatttttttttttaatttccaaggtctcaaacactcttaaatatattgacttaactataactgaatcaaattggtgagctcatattttttcagttcatacgtatgaattaaatggatgttctaattacataaaattacatttaaagtatttatcttcataaaagccaccgtggggtctcatggccctatttatggtactctccattctgtggacacttctgttgtttcatgtcaacccacaggtacagccctaggaaaagacagctgggctgagctgtccatatatgctgaggaagatgtagtctttctcaaggtttagcacgtcaggaggcatataggcttctcttaaattgagggacggctctgaaggatctagtagtgaatagttgttgaaagatttgagaaatatattgagtataaggatgagggccagtaagagtaaagagggaagaataattatgtgcaaggacaaactaaatcattatcagcacataagaaacatatttttgctgagtattcttttcaattgtagctctgtcctctaaaacaagataaatgacatatgaatattcaagttctaggttatatttgaaatgcatatatatatacctatatttaaatttttgtctttatattattatctttatctgtatctatcagaaaatcctggatcaaacagaatcatatacagcaaaagggaaagtggagaattccaaagaagggaattcggattttaaaaaatttttatttcctaagatttcctaagaaaaaaatatgaacttttatttcacaggtccaaaattatttctaaactgttgaaagccatcttttctttagtattctcctgtccctttcatgtaactagaaccccctaccctcaaccaaaaataaataaataaatagataaataaataagtaaataaataaaagagagagagagaaaaggaagaacatggaaacagaaggtaatgataggagaaagtggaaggaaaaaaggaagacagaaaaaaaagaaaaaagatttactggactgtaagataagctataaaggaagtttgtataaaataagaattagaaaaataaaacatattgcccatccagggtaatacgtagaaaaaaatttgatttgatcttattttttctctcacaatttacagtcttactagggtcatttcttataacaatatttaccacaattcttgattatttcagaggagtcctaatccacacttttcatatattctaataataaaaattattacatatataatacataacatgtatgtccttattactttacatgactggaatgactttcacctaaattggctaataaagaccttcttgtcagaacacattcttgttttgggggtttaaaatgtggacactcattctgtgatcctctccaggctcgaattagtattacagttgaggcacgttgtcctcccgaggaggcccctccctttccttctcacaggatctttcacattctttactatatccagaactattagaaaacatccctcaggttacggaataatgacctttctttttcccttccactccacccctttccaccccggctctcagccaggtttaagtcggcgggtggggcttcctgtcacagaacgctgtttaaaaactcagtagcatctgggcgtgagcaggctttgtcgggtggagctgattggttgcaggagcagcaacagttccagagccaagtcatgacaccgacctccccaaggtttagttaaatatatcttatggtgaaaatgcccggagcaagaaggcaaagcatcatgaagaggatattgggagctctgctggggctcttgagtgcccaggtttgctgtgagttggggctgtccaaggtgggaatctgaaaggatttagcagctgcagccttgttgaggggaggaagggcaaggagttaaaaagtcatgcagtctttctactcacacagcctgtgggggcattttcaggattcttcagatgttaaactgcccatcacctatgactttttctccatttctgaccaggtgtgagaggaatacaagtggagcagagtcctccagacctgattctccaggagggagccaattccacgctgcggtgcaatttttctgactctgtgaacaatttgcagtggtttcatcaaaacccttggggacagctcatcaacctgttttacattccctcagggacaaaacagaatggaagattaagcgccacgactgtcgctacggaacgctacagcttattgtacatttcctcttcccagaccacagactcaggcgtttatttctgtgctgtggagccacagtgctccccaggcacctgcggcctgtacacaaaccctcatccgggctcggttcctctaccagtaacaaccacatcacgaggccaccgcagcagcattttgcacagcttaatattccttttgtacataggtagagttttaaccgtagattctttttggctctacaggtttgagactttggtctttattttcccttttcaatacacacctcctcctaccctataaatatctaacttggaaggagtagagtagctgataagaggacagaatcaaaataaatatttaagtgacagtatgcaggactccaaaagggtaaaaagtaaaaagaataaaaagaaaagaaacaccattccaataagcatgttgttagacattagttagacagtgatccagcttagttgtgtgtctcaagcacattcaggtctacctcaccacattatgtaccaacagacaagggcaaatatttgcatactatcccactagtgcagcaaagtaaaatttctttaaatattcacatattgataaatagctgtggagaaaaaactttaaaatgttatgttcccatatgtgtttttcaggcttgttgtataacctagaatatgatctatcctggaaaatataaccatgcatgattgagaagaatgtgtaatctgatcttgggtagatagatgtctgttaggtctacctggcttttgtgttgttcaagtcttctatttccttgttggtattctacttgtcctatctattattgaaagtgaggtattgagtcttcacctgttattcttgaattttctgtttttcccttcaattctgtcagtttttgtgcatcatgtattttgggatatgtcattaggtgcatatatgtttataactgatatattcttaatggatgcccttttatcattataaaatttcccattttatctctagtaacattttttggtttaaagtatactttgtctaataataatgtagtgacaccagtcatatctttacctatcctttttactttcaacttatgtgtatctctgtatctaaagtgtgtctctgacagtgtatagatgtgtgtgtgtgtgtgtgtgtgtgtgtgtgtgtagccactctgataatctctactttttgattggattggttaatccattaacatttaatgttatcattgatatagattatatctggcattttaattttattttctttctgtcttatgtcttttttgttcctctgtaccgccttaactgctttcctttgcattaggtgaatattttatagtataatattttcattcctttaatttttttcactatgctttttcaattattttcttggtggatgttttagtacttacaatatatatacatctaaacttgtcagaattcacttcagactttatgctaacttaactccaatgggattttcagatgtcacttctatataggtctatttcttattccctttattattgttattcacattatatgtatatatgttacaaacaataggttattataatttttatataattttataattatttctttatataatcttatgttttataagcagagaaggaaaaaaggaaagcaaatatatattgaggtgtttgtggttaaccttcttacttatcatttctgggtctcttcatttgttcctgtgcacttaatcatagccaaaaggtcaagaagtgatcatttgttcctgtggattcaagttgccatctggtgtcactgtcttactccaatatagttttgcaatctgccttcctcctttattcttttattatcaaatatgttacattcctgtaagtccaataatataattatatatgtattgttttatacagtagttatttaaatcagttaatagtagaaaggggataaatatgcagtcacactatctttttagtaagtgtgtggatgcaaattactgtttgaagtcccttgctcccagcctgaagatcttcctttattattgcttgaaggtgagtctgcttgcaataaattctctcagtttgtatttatctaggaatgtctttattttaccttcatgtctgaaagatacttttgctgaatataggatcttcattgatggtatatttctttcagcactttgaatatatcttcccactgccttctagctctgttgtttttgttgagaagtcagctgttaattttattgagtttctctcataaatatttgatttcctctttctactttgaagattctatttgtcttttaacatttttgctatgatgtgtctgagtgtggatctctttgcattcattttacttagagttcactgagcttcttagatgagtagattaatgcttttttgaatctgggaattctcagccattgtttcttcaaatttttttgttccttttcttcctttcctttttctggtactctcactatgcgtatattggtgtgcttaatgatgtaccacgtttctctgagtccctgtttatttttctttattcttttttctgtctgtttttcagattgcataatctctgtagatgtatctttaagttcactgattccttgttcagggagcctgaacctactgtttgaccctccagtcaatttttttatttggttattgcactttcccaactctagaatttctattttgttcctttcataaaaaaataatttttaccactttatagatattctctggctgataagaagtcatcatcatatcttttttacttccctcagcatggttttatttctttgagcatacttaaaacagctattttgaaatttttgtctgtgaaatccaacatctaagtcatagaaaaggaagttgccattacccaatttatttctcttgtgtaagaatcacactttcctgtttggggtatatcttataattttttgttttaaactagacattttagataacatattatattagttttctatggctgctcttatgggttgaattgtgtttctcaaaattcaagatgaaatcctaactcccagtacctcagaatgtgaccttatttgaaaatagggtcattgcagatgtaattagttaagataaagtcataagaatggaccctaattgtgatggttaatgttaggtgttatgttgattggactgaaggatgcctggataactggtagagcattgtttctgggtgtgtctgtgagggtgttgccagaggagattgacatttcagtcagtgaactgggagaggaagacccacactctttgtgggtgggcaccatccaatagctgcgcagctacaacaaagcaggtgaaagaaggtgggaggcttctggctgcctactttctcccatactggaggcttccttctgcttctcttgtccttgcgttcctggaccaaactgaggtttgggctgctatttttttacagacaaataacgagatgcagatgaactggggaggaagagagtttttatttctgtagtcagttacagggacatggcccggaaattattgccagactaactcaaaattacaaagttttttcagagttttatataccttctaagttatatgtctacatgtaagtgtgcattcatttaaagacataaatgattaacttcttttaatttataactaaggtctgagtcctgaagaccttcttctagagtctcagtaagtttatttaacctaaatgggtttaggtgctggggtgattagccttatctggtcttctgccaaatcacagaggtttggggagttccttcagacctccaataaatgtgtttgtggaggcctagcgagtttcttcagaccccctataaaacttgtttaatcctaaagaggacctgttaagaattactcctttattttgtcatgcttaaaagcccaggaaagtcccaggcaaaactcttggtgggcttttgctacattccagcctttgtataagggcactggcttttaatatttatcttaaccactcagtcagtaccgaaacagttgttatggagtcctgccacacttggacatcagactccaggttctttggcctgtggactctgggacttgcaccagtggcttgcaggtggctctcatgcccttggccgtagacagaatgcttcactgctggcttctttggtttgaggctttcgagcttggactgaaccactaccagcttctcttttccccagcttgcagatggcctatcatgggacttggccttgtaactgtgtgagccaattctccataataaataaataaataaataaataaagtttattagggagaattggcacacacaattacaaggccaggttttatatatatatatgtgtgtgtgtgtgtgtgtgtgtatgtacatacatgtatacacacacatacacacacacacacacatacacatatatcctattagttctggagaaccctgaccaatacactaatctaatatgactggtgtcctcataaaaagtgaaagtttggaaacacacacacacagagggagaataccatttaaagatgaaggcagagatcagggtggtactccaacaagccaaagaatgctaaagattgccagaaaaccacgagaagctgggcaagaggaatggagtagattctcgtagccctcacagggagtctctcagacttccattctccagaaatgtgaaacagtaagttcctattgtttaagtcacctagcttgtggtactttgttatagctctagcaaactaataaagctgctataacaaattactgcaaatttggtagcttaaaaccaaacaaatttattctgttacagttctggaagcaagaatctgaaaccagttttacagggctacagtcaaagtgttggcagggctgatttcttctggaggctctcagggagaatctgcttcctggccttttccagcttctgctgtccacctgaattcatggctcatgctcttttttgaatcactccaaacttttgcttccatcatcacatctcctttctcttctggagccacatcttcccctgtttccctcttataagagcacttgtgattatatttagggtccactcaaataatccaaaatatttttcccatctcaagatccttaataatgtattcaaagacatttttgccatataaggtaccatttgcaggtaccaggcattagggcttggttatctttggggatgataatccaggctatcacatatagtgactctggatattgtgtctctaccccatccagggcttgttgttatttgcttgtttatttattgtaacaactttacttgactatttcagttaagtccattttcctgcagggtgcagcctatgatgttattcctcagaggacagtctttggtatgtgcacagacatcttgatatgacggtggtttcagcagtgttttctttaactgtctttcttcctgatttttctgttaaactacctgcatctgtttgtatcacacttagccatgagcctccacacttatccatagtctggttcaattaaattcaggcccctttgcagaggtaatctttgaggtcaatctttgaagcttcttataacctcaggaggactcttcccagctgtctttattcccggttctctctattagatttttagctagtcatctgtggtttagtttgttgctctcgtggagctaccagcctcctcttaattgcttaccacaaaaatcttcattcatttccactgtacccttaaggcttggacttcctgaagctctgttccaaatagagtcttcctagtggagagctctctgttcttataactcctcctctccctgggcacaacttctgtgcccctgctctggagcaatgtgagaagagacattgcttttctttcctcagagtgataaccctactttaggagcaaggtgcttgatgggggcagtatcccatggtcttcttgtttgcctcccccggtatgaaacctccaccttatgagcaagctggggtgagggaaataaggacccagtattcttggtctgccatgccagggtagagcttctgccctaacagtaggtgctaggaagtgaaaaggagccctaggcctttcagcttccctggcccagaataggacttctgcaatacaaaattgaggaagatgagaattgttggcagactgtccctcccaggcagatatcgtagctcaacactggaatctgagggaagaaggagccctgtattcttggttgctcccacccgaagtagagtttctattatgctgagctctgtgtggtgggggaagtagtagtcatggctcaaattccaaggattttgttcttatggtgatttagtaaattttcctgaatagataattctccatttgctatatactcaggacaatttccagagacttaagtttttaaaataatttttaccaattaatagtgttttgttactaattagggagagtaaccatgaacctcctcatattgcaattctgaaagtcacagcctcccattcatgatgttatcacatagaacaggcctaaacagaagataatcagaagttcaacttttctttgactttctccattgagaaataaaggtgaagctgccatcttgttttgatcctaaacctgccacagagataattattcaaacacgtcatgtatcaccatcataaaataagcatgtattctgagagtattaaagatgaaaaacaggaacactatattttcttaaatcatagtttttgtaggaaggatggagtgaggtagaataaacaagtctaggattgcctagtttgaataatttcggtgggctctgaggccaggactatccctagttgcctggtacctggccatgggatgcttagggcagggggaatagtggatggagtgtaggagcctagtgacagcctgataaaggaggtgcttggagtatgggctctgtatcggttggtttgcatttgaaagatgtgctcccaagtgagtctttactatctctaggaattagccagagatggttaaggcccttagatgtcaaaacatttgggtaaaaagatgtggttgatacaccaacactgttggaatatgagacttctctatgcctcactttcctttggatactcttgttcattcatattttttctttacttaaagttaggtactctgactttgcctattatgttccttttatgattaataataacttgcctaagtctagtctttactagagacaacaatcatcaacttaattcactcaactctccaaagctaatgttattacagccaatttgaaaagtgataaaagggtatggtacactaacactaccaatagtgatagtctttgtaggcaatccataggtgaaaaaagtccttacattacaaaaagtataacatatgatggtcattatttgtcaagaatgaattccatttgagttccattcaaaatggaattttcatttcatacctacagctactgggaactgttttctgtttgggaatcagtctcttcatggccaaaacagagccaaggccaatccttctgtaggtctattcattaggctattttaagggcatgacccccaacaatcctcagtggagcacattattttacaaaaatcataaagcaacgaaaatctttctgaagaaaaactcctgagggtagtgacaccatccatatcattaaacaatttgcagtggttatcaaaaagtattttctcacattagctaatacaataaatatagtagtatatccaaaatcttggaatcacagcaagccagttaaaatttcttaatccaaaggcctatgtgtagtagaatagtcacatatttttgtggggccaatcaggaagtgatctttgtcattgctaatacttcatgttgactctacattaatactgaagatgagtaaaaacacttttagcatagatagatgatagatagatagataggtagatagatagatagatagacagacagataggtagatagatacatagatgagacatagataaaaagcaacctagttgtgtaagatagactcagaaaatcatttggactttttttttttaatcaagtctgggaaatcttggatcatggttgcaaaatatcttaccctttttataatatttaatacttcagatttgttcatttgttgcatggctctgttggtattctaaatatcactgtccccacaaatggttgaacaagtaatccaaagacaaaaattcaataaaagtcatgcttttaaatatacaaactaaaaatcaaatctctacaggccaaaactctttgtcaagaaaatcgacaatagtggagaagacctggacagttcttgaacatcttttctgcagctttggctgcataaggaccaaaaggggatggggggtggggagaggggaggaaaataaaattattcccatagatttaggaaaagatagattgttacacagccataataagtagccaccagaaccagttttatacctgttcaactgattaacaactcgtctcaatgaacatgcttttgcaagccaactaatcaatgtcagctcctggcttctgaaagtcagccagtcagtgcccctgagtgccaagcaatcagcaatagcctcaccctagtgactctgtttctgcagataatgttaactcatttacacctctgaagtttgccaatccctgaattccatgcttccccaaaacccagtataaatcagctgtctgttgtgctcagcaagattgtgtctgattttcataggtctcctttgctattatttccaataaatgcacatggtctttgtatttcacagcattgagtagtgtcaaatccttcgacagctgccaaagtatattttcttgtgggacatttggacttggacaacttttcttactatttttcttcaatgctcaaaacaaacctaacataaagaatatttattcttgtttgaaatgatattcagcatcagcagaaatagttaacatgctatcagaacttataaaatcaacatttagtattataagaaaatgaatctctctgcagatcattccagccagaatagtgatgtttattgctttgtacatcattgaagtcactgattccaaaatcagctatttcaaagcagttgtggattacatttagggtgattgtgtcccacatagcatagcaacaagattcttcactgctatcaaaaatattccattaaaaaatctatactagaaatatttcttcttattttacataatatactaagtgcataaaacttttaggtaattaattatgccttcatctaaaaaccgcatatatattatggtactagaggacaaaaaaagatattgcaaatactgaaataagtccccagttcctttgggcagcacgtttatcaaaacagattttatctattttggcaagctattctcctctctaattgtaggaaccatctcccaaacaatcttccaacatcagtggatttaactttaaatatacatataggagatatgtgtatatataggggattttcaaatttttctacaaatggtcttacttattagtctcagcattgtagcacagtcagacttcctcttaatgaatgtatatatgtacatatgtatgcataatatatgtctgtgtatatatttttccttgagaaaaatgcttttcaccaagaactaacatctggcttggctgaagattatagaagagccccatcttataattattaattatgcccatatgcacatgcttatcctgaatagatctgctgatttcaagccaaatattagtagccaaaagagtttctgcagatgctgtatattttagagtaatggcataatgttctgacaatgccagcaattgacctatatctccattcaaaatgtaattgtattaatcttttatttagaaaaatgattcagatctaatttttttcactctagattagtaaagcaatctaagaatttcgttttataaattaaccttttgtttcccctctcattctttttaccttccttggcaggctgtttttctattctgttctggtttttaagatacatacatacacacacacacacacacacacacacacacacacacacacagatgtaccttggagataatgtaggtagggttccagatcaccatagtaaagtgaatatcacaataaagtaaggcatatattttttttagtttcctggcacacataaaggtttaaagtacactgcagtctgttaaatatgcaatagcattatgtataaaagtgtacatacctcgacttaaaaatgctttattgctaacaaatgctaattatcatctcaggcttcagaaagttgttacttgttttgcaaatgtagggtcttgcctcaatgttggtggctgatcagggtggtggttgctaaaagttgaaatgtctgtggcaatttcttacaataagataaaaatgaagtttgccacatcaattgactcttactttcatgaaaggtttccctgtagcacgcaacactgtttgatagcattttactcaaagtagaacttttttcaaaattggagtcaggataaaaagaaggaggttaatggttacagaaatacagttagaagaaacaaattctactatttgatagtacagtagggaaattatggttaacaataatttactgtatatttcaaaataactagaagaagagaattgtaatgttccccaaaacaaagaaaagaaaaatgtttcaaatagtggatatcccaataaccctgatttgatcattgtacattgtatacatgtatcaaaatatcacaaatgccccaaaatacatacaactataataaattgatttcaaaatctttattttttttttttgagatggagtttcgttcttgttgcccaggctggagggcaatggtacaatttcggctcacagcagcctccgcctcctgggttcagccgcctgggttcaagcgattctcctgcctcaggctcccgagtagctgagtttacaggcatgtgccaccacgcccagctaattttgtatttttagtagagacggggtttctccatgttggtcaggctgatctggaactccagacctcaggtgatccgcccacctcagcctcccaaagtgctaggattacaggcgtgagccactgcgcccagcctaatttcaaaatctttttaaaactactaagaaaatttttaaaaaaatggaagttaatcatctcaaatcctgccactgctttatcaactaagtttatgtaataatctaaatcctttgttgtcatttcaataatgtttacagcatcttcaccagaagtagattccatcttaagaaagcaatttctgtgcttatccataaaaagcaatttatcatttgttaaagttttatcatgagattgtagcaattcagtcacatcttcaggctccacttctaattctagttctcctactatttttaacacatctgcagttactttctccactaaagtcttgaacttcttgaagtcatacatttggattggaatcatcttcttccaaattctgacaacattgatattttgacctcctcttatgaatcatgaatattcttaatgtcatctagagtatgaatcctttccagaagcttttcaatttactttgcccagatccattaaaatacaagcacgttttattttattgcatctatttcttgaaaacttttttaacccattgaattgtcttgaaaattaattgcttgaaaattaattgaatatgaatttgtgaatctatttctattttgtttctttgatctacaaattttattttcacaaataccaaactgttttgattactgttctttataatgtcttgagatcaggcagggtgagtccttcaattgtgttccctttaaaaattgttttagtggccgggcgcggtggctcacgcctgtaatcccagcactttgtaaggccgaggcgggcggatcacgaggtcgggagatcgagaccatcctggctaacgcggtgaaaccccgtctctactaaaaaatacaaaaaattagccgggcgtggtggcgggcgcctgtagtcccagctactcgggaggctgaggcaggagaatggcgtgaacccgggaggcggagcttgcagtgagccgagatcgcgccactgcactccagcctgggcgacagagcgagactccgtctcgaaaaaaaaaaattgttttagttattcattaaggtttattttttgcatttccatataaattttagaattagttggtctatttctataaaaaggcctgctaaaattttgagtgatattgcattgcacttacagaaaattgggggtagaactgccatctggaagctattaaatcctctaattcatgaacatgacatatctgtcaatttattaaggttctttaatttttgtcagcattgtttttggacttttcagtgcagaggtcatggacatctttaagaaaacataaaggccattgacttgaagaaactatttgaaacatgtaaattattccaaagtcttgtgtacagcatatgtaaaaagctcttacaactcaataaaagagaagaaatagcccaatttaagaattaacaaaatattttcgtagagtcttcacaataaaaaaataaaaatgaccaataaacacaggaaaagatgctctacatcaggagtcaacaaaatatggcccatgagccaaattcagccatccacctattttcataaagctttatttaaacacagagatgcttgggtttttttagtgtgttatcaatggcttctttcatgctgcaacggtagaactgagtagttgccattgagactgaatcacctgcaaggcttaaaatacttactattcaaccctttatagaaaaagtctactgactcttatgtcgttaataatcagggaagtgcaagttaatactgtaataaaatatatagccactatatggagcatatatgctatataatatatatgctatatatatgttatataatatatatgctctttatatatgctatatatatgctcctatatagccactatgttggctaaaagtgaaaaaatgactactataccaagtgttgacaaagatgaagtgtaattaactaagttagatctatttaaggacatattctctttagtgcgaagacttctccccgacctgatgttgccattatgtgaggaaggagatcccatgaagtgactccatctgacggccagtttctgcctctgaaggaaccccagagcagttgcggtgtcactgtttcagtagccctgttctctcctggtacctccagcatcccaatcaattcctccagatccgcctgagacatacctgacctcagcaaggacaaaaatctcctttcatctgaagaaatcattggctcaagaggaggactgagccacttatttcagtgttctgatagatgtaggggttgctgaaccgttttaagaagctgtaggaaattgtttgatgtaaactccctatatggccacaagggggcaatgcttcttcaaagaagattaacatttgtccaaatacacatattcagcaattagccagagattatccttttaaaatagtaaattatctcctactctgtttcaattcacgtgtctgtttcattcaatgcatctatgcatttatccattcatctacctaactagtatctgtatttattctagtctaacagagtggaaaacatcactttggaagtcaacacttttttgaattatacatgttatccttcaagcccacattaacttctgtagtataactttacaaggttttcacccacatacagcccaatatccagtcacactaatctgtgcctaaaattcccttatccattctttttatggggaaatctatcatggtttgtggcccagttcaagcatctccccatccgtactcttctttgactgggtccagaaacagatttcatcaccctttccttcgtcacatcatctagacacactggtgtctttggcaggttccattggctgatacctgagtcttgggactaggttgactgaagacttggactgtgtctctttcgtgaatgaaatgaggcccaagtactgcctaatttagtaggcactttgtggacagtatatatgtattgaatatatgcatatataaattaaaagaaaagaaagcacatcaaaacttaaacaacttttaaaaagcaccttagggtactggggaagaaaaggtttggattgtagattgaggaacgtggaccattgtctcctattggactgcgatggtgttttctttgagtggatttgagatgacaccaaatataaatacaaaaaaaatcatttttgtgcttctgaaaaaaatgtgcttctcatgttattttaacttatatgacttataatacagatcatccctatttcaggggtgctttagaatttatcttcaatttctcccttgtatcttgcctgtgttaatatcaaaagttaaatttattctttatattttcatagttgatcgattttgaagtgtgaataaaatatcgaatgtttattcaaactcaggataagagccaccaaaaatgactgcattacggatggttatagatctatatcttctgcagaatttttctatcctctctttccctttaaagatcacagctcctccagaacagataattccagtatttcctattttctttttctaggtacatttaaaaaaatatttaatttacctaatgtgtaatttagaaaaaaatatggagaaaaaataaaattgacttaattgtattatatcatttctgaggatcatctaaaatatggaatgaatacatctgaaaaattgcaacaaaatttaagttctctgaggacaaagggaccatatattctctatgttctgattcatgaccttagcttgtaatggggtattatgcccattgtgtgccctcaataaactttattaatactcacaataaaaaagaaatgccactgtacatgttaatcgtgcggtttcacaagagttcctctcttctaccattgtaaaataaggccctttctattgacatatccagccatcttaaaggtctgaggaaaagttgagggggcttgacagacagaaattctaaactgatgcttatctgtgtgtaaagaaaggattactgattcccaatgaatatatcttcagcaattctaaatttggacaaagtggggaagtgcttcctttgacagagacagctttaagtgaaagcacttgtgaaagggcggggcctgctgaaagaattcagttgagggtgaatttacagagtttcagctggttgggaagactggaagaccacctgggctgtcattgagctctggtgccaggaggaatggacaagatcttaggagcatcatttttagttctgtggcttcaactatgctgtgagttatggaagagaaactccaggatatgttactaacttgggtgaatgagaaaattggggtacagacaaactcatgcaggtagacactttaagaagaaaatattattttggggcctaatgacattttgttatctctctaagcaggggtgagtggccaacagaaggagaaaagtgaccagcagcaggtgaaacaaagtcctcaatctttgatagtccagaaaggagggatttcaattataaactgtgcttatgagaacactgcgtttgactactttccatggtaccaacaattccctgggaaaggccctgcattattgatagccatacgtccagatgtgagtgaaaagaaagaaggaagattcacaatctccttcaataaaagtgccaagcagttctcattgcatatcatggattcccagcctggagactcagccacctacttctgtgcagcaagcacacagtgctccccaggcacctgaagcctgtacccaaacctgcagttgaggttccagccaaaccccacagtgggagcttacgtaggcagagatgtagcctagttttcatctgcatatgcaagtgataaataaatgtataaacactagtgtggcagtatgagaatggtaattaaagaaaagaaacttagcttaataaatgaccatctctaacaaatgttttattatagttacagtatttgaaattgttacaagcatccagccagttttggggcaactgggaattttatgccttgctgatgggatgcaaatcagtattatgacactggaaaatcatttgccagtttcttataaattgctcttaacataggaccagaaattccactcctaagtatttatctataataaatgaaaatatatcttcacacaagacttttgtttacagcagttttaaccataatagccccaagctggaaacaacccaaatgtccattagctggggaatagaaaaataaattgtggactattcctataatggaatactacagagcaataaaatgcaataagctagtgatacaggtaacacatgacggatctcagaactttatgcttcattgagtgaatggttaaatatactgtggcacatacccacataatggaatatgattcatcaataaaaaacatgaattattgatgcatgcaacaactttgatgaatctcaagggcattatgttgagtgaacaaaagtcaatctcaaaggctatataatgtgtgatttcccttatataacactatcaatatgtaaaaattacaggacagtggttgccagaagttatgggtggggagtgtgtatatagggagtttatttagggtgatggatggaatagttctgtatcctgattgtagttgttagggaaatctatacatatgataaaatgtcacagaagtatatatcaaaaaaagagtgcatataaaaatgggtgaatccaatagcaaagacttggaaccaacccaaatgtccaacaatagactggattaagaaaatgtggcacatatacaccatggaatactatgcagccataaaaaatgaagagttcatgtcctttgtaggaacatggatgaaactggaaaccatcattctcagcaaactatcgcaaggacaaaaaaccaaacaccgcatgttctcactcataggtgggaatagaacaatgagaacacatggacacaggaaggggaacatcacacaccagggcctgttgtggggtgggggatgggggagggaaaccattaggagatatacctaatgctaaatgatgagttaatgggtgcagcacaccaacatggcacatgtatacacatgtaacaaacctgcacattgtgcacgtgtaccctaaaacttaaagtataataataataataataaaagttctttaagcaaaaaaaaaagggtgaatcagaataagatctgtagtttaataaatactattgtatcaatatcaattttctggttttgatactagtacataatgataatggtacatagctatggttatgtaaaatgttatcattagagaatgctgggtgaaatgtgcaagagaactctgcgttatttttgcaacttctacgtgagtctaaaattatttcaaaataaaaagtaaggatgtagaaaaaagatttttaacaaacatttacaaatttttggaatataaaattttggaatgtggaattttagaacatggttggaacataaactgggcaaccactttggtggattttcataaaactaaatgcgtttctaccacaacccagtgactcacatctaggcatttacccaagaaaaataaaaatgtgtcaacacaaagacttgtacaagaatgttcacaacagttttattcataatagccatcaatttgagaaaacacccataaacaagatactaaatcaataaatttttgtgtcacacacattcaatggaatattaatcagcaataaaatggcctgaaccactgatacacataacagtacaaacaagcctagattatataatgcctagcaaaattgccaaatacaaaagggtatatactgtttgattcaagttatgtgaatttctaaagtagacaaattaatccacggtgaaataaagccaaacagtgattacatctgtgagtgggaattatttgggtggagcacaatgaatttttataagctaaaggaaaagaaatgttctatttcatgataggggtgtggtttacaaggctgtttgcaattttcaaaactcatctaactccatacttatgacttgtttatttcactatatcaattatacttcaattaaaaataaactacagaaattaatcaaataggaaacaaaaacaaaacaattaggggaaaatccaatgccgaataaatttgaagaaataaaagagttaaatactcgataatgttgataatgaggaaaatagaaaatagttaaacaatgcagtacgctgaattctggcccccaaagatgtccatgtcaaaaaccccagagtctatgaatatgctgcttcacatggtatattagttttctagggctgcagtaacaaagtaccgtggactgggtggcttaggacaacagaaatttactgtctcctggttctagtggccaaaagtctggaaccaaggtgttgcagagccatgctccttctggggcgctagggaagatttgtttcagacctcgttccgagtatctgatggtcacaagcatcccttagcttagagatggtcatgtcctccctgtgtctcctcccatcatctttcctctgtttgtgtctctgtctcttcacgtgacattcttttcataagggcaccagtcttattggactaagggcccgcactactccagtaggatctcatttcaacttaactaatgacattggcaatgaccctatttccaaaaaagttcacattctaagcttctagaggttagaacttcaacatatgaattttctggggatacaatttaaccgaataacatatagtgaaaggaactttacatacatgattaattcaaaaatcttgaaatgagaagatttatcctcaattatccaggcagacccagtggaatcacaaggatctctataaaagggaggcagtagacttggaatgaaagaaagcaatgtgatgagagaatgagaacagcctcgaagttggaaaaggcaaaaaaaaaaaaaaaaaagaaaaaagacagattattccccatagccaccagaaggaactcagacctgctggtaccttgactttagtccagtgaaactgattttggatttaagatctccagaattgcaaaataataaatgtgtgctgttttaagccactgattttgtggtaatttcttatagccacaataggagactaataaattcaataataggagagattaaaaaggagacatgtctggagataaagtagaaattaaaaaaaaattagcataagttaagtacaatttaagccaataaattttaaaactttaaaaagtagaaacaatttgaatgaaaaacatatactaccaaaagtaactcaagaagaaatagaaaaactaagtagatttataaccattaaattatttgataattggaaatgaaaatccctaaagatttagtaatagaagggaaatttttaacctgcatgtgcgcccactacaaaattaaaaacaagacacatgctggatgcatctgtaaataatataaccaataagattttagaaattaaggttagatggggaactcttacaaataaataagaaaacattcaaaataagaagagacaaggatataaaaggcaattcaaaaagaagaaataggaatggccactaaatatgtaaaacatcaacttccacagaactcgaggaaatcaaattaaaataaattattgtttcatttctatttgatcaacaaaatctaaaatatctggtaacattaagtattggtaggaatacatggagatgaagctgttacacttttccagatgaagaaaaacaccacacagagaatttaggataacaatttgcctaaactagttatgaatttgcacatatctaataatccagcaatacaaatttctgatatctacataaaggtagtcaaaatgtaaactaggaggcatttacaaggatgctcactgcaaccctctttaaaaataagtataatcacaagaaaaaaacaaccccatcaataagtgggcgaaggacatgaacagacacttctcaagacatttatgcagcctacagacacatgaaaaaatgctcatcatcactggccatcagagaaatgcaaatcaaaaccacaatgagataccatctcacaccagttagaatggcaatcattaaaaagtcaggaccaattttacactgttagtgggagtgtaaactagttcaaccattgtcgaagacagtgtggcgattcctcaaggatctagaactagaaataccatttgacccagccatcccattactgggtatatacccaaaggattataaatcatgctgctataaagacacatgcacacgtatgtttattgcggcactattcacaatagcaaagacttggaaccaacccaaatgtccatcaatgatagactggattaagaaaatgtggcacatatacaccatggaatactatgcagccatacaaatgaagagttcatgtcctttgtagggatgtggatgaagctggaaaccaacattctcagcaaactatcgcaaggacagaaaaccaaacaccacgtgttctgactcataggtgggaattgaacaatgagaacgcatggacacaggaaggggaacatcacacaccggggcctgttgtggggtgaggggaggggggagggatagcatttggagatatacctaatgtaaatgacgagttaatgggtgcagacaccaacatggtatatgtatacatatgtaacaaacctgcacgttgtgcacatgtatcctagaacttaaagtataatgaaaaaaatacaatacattcattaaaaaaaagtataatcaatagtggaataaaaaatagtggtttagtcatacaatggaagtattagccattacaagcaaagaagtggttctatacatattttcttagatgaatcttacaaataaaatgttggatgtaaaagcagaatgatacatactgcatggcaccattaataagaaatcttaaaatacaaaataatgcagtatattgttttgtaatacatacctgtaatggttaaattctttttttttttgagacggcatcttgctctgtcgcccaggctggagtgcagtggcacgatctcggctcactgcaagctccctctcctggattcacgccattctcctgtctcagcctccggagtagctgggactaaagggagcgccaccacgcccggctaatttttgtgtgtgtgtgtttttagtagagacggggtctcaccatgttagacaggatggtctcgatcccctgacctcgtgatctgcccacatcggcctcccaaagtgctgggattacaggcgtcagccaccgtgcccggcctgtaagggttaaattttaaaagacatgcgtggaaacttcccaagagtggttactatctttgaaagaataaaaggaacaaggactattgttctagctttgtctgaaatgtttgagaaaatctgaaatgtagagagagaaagaatatttttagaaaacatagcaaaattcatcatctgtttatgtgtttattctcattgctggatacgaaggtgcctgctatataattttctgtacttttgctcatgataattatttcataaatttaaaaaataatttttaaatggatagcgacaatcatagtttttactatcttcaccagtccacagaagagaatagcaccttcattacctacaactttgccagatgtatttctggtaggccacataaatggcaataaaacatcaattggaaaaaatctctaatttatgaataaaaggatgttcaacctgaaataaacaacccaagactctttcccctgaaccacaatgcatacattttcaatatattaaaaagaggatgtggaaaaaaaatccaattagttacctcttagcaatgggagatgtggccacaaaatgtcagcattttgtgaatattaactcccctgggctctcaaagtttattttacttccttttttagcagtttgaaaaatcgaagaagaaattggaatagtatttatgtctgattagagtggctttcattggactgaaatattcaagaataaagtagaatacagtgcctaggatgaattcgtggtcagcatgagaagagggctgttgtcaagtatatgagagagaggaagaaatgggaagagctgggagtctcaacagtgattctgtggcttcatacagatgtgagtttggggatttctacaaagaaccaggaagagtctgaggacagtttgccacagaatcactcaactattcccatttggatttctttatggggcagtccaacaaaaatacagcttttggaatttggtgctttgacataaactgctctatcagatgaagtttcagcataaagtggaaaagaatcttcattctttcaatgtccaaagagggaaatatttttattttggacatttatactattaatagttttgaatatttttactgataaagcagcattttgtgagaagccttgtcttcctgataattattaaaaattatagaattgcaccaaacagtacacatgcactcatggcaacagcatagctaaagatttgaattcagagggcccatggattctcccatcctagaacttcaaataaaattaagcatagagttatagtagaaataataggcctttgccgttactattgacagtagaacacacaactggagaaaatacagaacctgggagtcttttttttttaatctcatttgtctgagctgttgctttgccattgtgaagttccaattcccttggtttgatgggtaagtaggaaggacgggaggtgatgacttctggtttgtctcctgtgtcaaagccaaggattggtgagcagcttcacctttgactcaggttggtagcaagtgaacaatcaaaacatgaatgtatatttgtaatcaaagccatgattcataataaattggtttcagataagcccctcagatttatcacagatcaatttcctaaacttggaaattttaaatgactaatctccttttaagaattccttcaatattgtttcatgcatgtcctttaccagatataatcctttgtcatttgttaattaaattataagaaagggcaaaacgatgtttaggatagaaccaatttcccagcctagggattatcatagcacattcacacttgacccacccagaaaccacatttcagaggcagcttccatacagaactgagggaccctgcacctgtactgtcagggtacagagcagggctatttcaacaggaaggaaatcctgccatcatactgcttcccagtctactgtgagtattcatggtctccatctacttaggtacaaataattgcaaaccagagcatggctacctctcagcactcagaggtgaaacgggactaaggagtagatgtctcaaacaatgagaaactattccctgcaccactcagtgatatgctattttgacctttataaaagaactggaaatgttttagagaccttgtctgcactttctttcttagctatctcttggtccctttatattaattcgtccattaagttagtgaaactagaggctgggttcacacatataatcccagcactttgggaagccaagataaggtcacttgaggccaggagtttgagaccagtctgggcaacgtagagagactccatctctacaaagtaaaataaaaatttagccaggcctggtagctcgcaactggagtcctagccatttgggaggctgcggtgacacaattacttgagcctaggagttccaggctgcagtgagttctgattgtgccactgcacttcagtctgggtgacaaagagagacccccaactctaaaacaaaaatttttctatttaaatttttaaaaaagacaatgaaatcacatggaagattaacatctaaattccatacaatcacgtaacagcatacaaaaaattcagccaccaacttctgtggtattgacatgcacaaagttcttgcaaccttcagataacacgttctgtgggagtatattatagcattgtatcatttgcatcacagagagatcttgtatgcttatcatgacaaacaatgtcttatgcttatcattaaaaatttttaaaatgcccagccacagaatgtaacaagtgagactgaatactttggatcaatgggatagaaaatgtgatatcaggacaattctaggacacatgatctaagaagtataattctacttgtgaaggcaacaggactgaatatactgatcctcctcagtctagtaaataaaacttagtgtcagattttgaaatgattacattttattgctgttataatttcataaagagataaaaaactgagcagcttctgaaagtcgagaaggactgatttttatcatttgattttgaagtagctttacttattatagaacttaactagggccctagacctcagtaaggaggaagaaagagatgcagtaattgtttagaataggactgcctttcacagagaaagtcaaatatctgagtatttttcttttaaatttaattagtttctgatggcaaaaagtaaatatatgctaaatgaataatatcaatgtatgtcaactggttcaactgcagttcccctcaatacaaattgcttttcttatatcccttttctaggttctgtctatcctaatgactagggaaagacaactagacaaagtaaagattcaggggtgagccagacatttttcctcatctgtgcatagccatgtagtctatgaacatgagactcaatttcctgtttggggagatagcatcagaacccaggaactacatatacacaccgcagggccctggtaggcactgaactttgagcttcaggcagcacaactcacatttgtgcaaagagctacatgccacatgctgttctccagcctgctgtgtgtatttgtggccttcagctactctggtatggatggttccaagtgtgagtaaaaatgttaaggatggaaggattccaaacaggcatatggtatttctcatggacttgaggaggaaaggagaaattgtaaaaaagcgagcatattatgattttagtttggtttgtctctgggtcctaaattagtctagctcttacgatattttattcactatatcaaaggatcagctctgttttctgatttttcccacaggatcaagtgtggcccagaaggttactcaagcccagtcatcagtatccatgccagtgaggaaagcagtcaccctgaactgcctgtatgaaacaagttggtggtcatattatattttttggtacaagcaacttcccagcaaagagatgattttccttattcgccagggttctgatgaacagaatgcaaaaagtggtcgctattctgtcaacttcaagaaagcagcgaaatccgtcgccttaaccatttcagccttacagctagaagattcagcaaagtacttttgtgctcttggggaactcacagtgtttgaagtgatagtaaaagcaaaacaaaaaccctagggctcaataagagaacccctctactccccatcctttgctacaggagccaatctgaaatgcacacctgcagatctcaggcaagagagggtagtgactgtggtctgtggatttaatctgtggtctggatcagatggtttaattccaagtaaaacctccttctatctcacttggaaacaggtgttcagagcaactttcttctaatacttcaatttttacttaaaatagatcatacagaaaatgtgtaaagttgtctaaagttggaaagacttccacataataacttaaagtggcagtttcacttaacgatgctcacagcagaaatctgggtctagttatcttgaatcaccataaaaatcatttccttagccctttcctcttaagctttatgtcagttaggatacaatcagggaagcagaaccatcgtgaaagatgtagaataagattaattataaggattagacctcatgcaattgctggaacgggtggctctcggaagttacttagttgtttatgtttttatgaaattgtaacaggaataaaatgtaatctattcaaaatctgacactgagttttatgtactaggctgaagaggatcaggacattcagtcctattggcttcacaagtagaatagtacttcttagatcatgtgtcctagaattctcctgataccacatttctatcccattaatccaaactattcagtctcacttgttaaattctgtggctgggcatgtttttcatgtgtaaaataaagtcgtgataagcatgccagatttctgtgatacgatgccataatctgctcttactcctatgcaaagctgtttgctgaatttactctaggtcagctagactcacatttgggaaggagagttgaacatggacaagagcatgcaaaagctgtgatttgtaaagacattttggaacccatggtgacaggtggaacccacgaggacaaactaaaacttgtctgtctcttacctccttcaatctcatagtgttggtgaccttcagaagaaatggtgttatttgctatcatgctccctgggtacttggcccaagaaaaagagaagctgaaagaggagatctggggggagtgggggagttgtgaatcaacaataagatgagttagcagatcagagcaacatatgtgagttgccacagtgcctggagcctggcacctgccttacacaatttttttcaacttaatcgagaacaatatagggaaggattttcttagaaatatatttccaggtagttacgacgagacagtacaaagttaccacaatacccccaccttgtaaacttgacatccatatgcacctcttttaatagcacttagctttcaaataaaggcaattttaaaaagcatacttcctgccaatatgatgccactgttcttcattcaaccacacataccctaaccctctcccctaaagagaatacaaagtatttattcatctttgggtgatgttctttcctcttctagctgagtcacactctcccattgatatcctgtagtttagcttctgagatataacaagctataagagtaacttattaacatatctttcactattatgtataggcaaatgggaggagagtaaaaaatggttgacatgtattttaatattttcatatcacaatgaaaaagaaatgtttataacagtatagtctttttttccacaaatggtcacatgattgtagctggtttctataactacctcttccattacccatttcataatctgttttcagcaagcacctcaactcactggtacacttgactttctataaaacaagctccttggtcaggagcaatgttatacagaatgccataaagttgagtaaggaattctctaagcccaccactgtggttttgccagaagcactgcagatgtggaaggaaagtccatattcagaatgtctaagtggactaaaacaaagcaaaacttgccagcagccagagaaagttgatatatcatgatatatcatgatatatcatgtctttaagaatgattgctgaattctcatcaaaatcaacagaagccaaagaggaaaaagtatttttagagtacttacaaaacaaacaaacaaacaaacaaacaaaaaaactctctagctagcttcctatgaacatgaaagtctaattttaaaccctttgtcaaaaatcattgttaaaaaggtggaaagtcagtgcacagattgggaaattatatttgcattggtgtatttctgaaaaagattcaaatgcagaatatataaaaaacttgtacaagtcaacaagcaatgagaaaacaatacaaatggccaaaacttgaagagacacttcagaaatatgatatctaatagtaataagcatacacaaaaagcacttaatataattactcattaggaaaatgaaaatgaaaccccattgagtgatccccctgtgccctttcagcaccccagttgtattaatgtagccaggaggaaatgaccacaagaggataatgaaaaatagtgactacttccaggggaagggatggccaagtaggttttctagaaacttctgttaaattaagtttagcctaaagctgcctccttatttatttaaaactcagggcaaaggtttctccatacacagggccctgtaacctaacaggatgcataaacaggctacagtctgctctctaccaatccctaagtttcggccataggtggccaactgttcaaacatgttcaaataaggcaaatgccaagctt

SEQ ID NO: 81 - DNA, 156544 bp, Homo sapiens
gaattcttctccaggaccagcgattgcactattcttaatgtttggtaagtaaaatggcacttaaaacttagaatcttttgttccattatgttgatgtaatctgtaaccacagttttctctaacgggtacagctaagatcacgtctaaggtaacttggtataatttgtttatttttttttcagggggaatcaatggagattcagtggtccagacagaaggccaagtgctcccctctgaaggggattccctgattgtgaactgctcctatgaaaccacacagtacccttcccttttttggtatgtccaatatcctggagaaggtccacagctccacctgaaagccatgaaggccaatgacaagggaaggaacaaaggttttgaagccatgtaccgtaaagaaaccacttctttccacttggagaaagactcagttcaagagtcagactccgctgtgtacttctgtgctctgagtgacacagtgacagggactgcaggggaagctgagcacaaactctgagcagcacgaggggcctggctgctgagtgtaagccactgtgatcccctctggttagggaccaggaactactctactattgttgcccaccacccaccctaggcactcctagtgtgaaagccatccaaataaactctaaaacactatagaataactaaaagtaaaaatacctcacaccagatgctttaacaatgagagtgaaaacagaatgtcaccatagttcctcaaccttgtttgaaatttgtgattttaaaagtataaaaccttgagataaatgaaatggtctagctgctcatccctgtataaaatgtagcctcctgaccttgtctcaggccatccaaggaaatagtatgcttacagacacagctgtgacagatgaggttgcaaatgcttaatgcatacctgagtggggtatacattcagctggggcaagatggggtgatttcttaggaaagcttctgcccaagaaataataggttcttaaagaaaaaaagaattataaatggaagaagtcaaattttccttgtttgcagatgatatgattttatatttggaaaaacatagagactccacaaaaaaaccttagaactaaaaattcagtaaagttgcaaaatacagaatcaacctataaaaatcagtagcatttctatatgtcaacaataaacaacccgaaaaagaaataaaaaagtaatcgcatttatgatagccatgaataaaattaaataactagggattaacttaaccgaagaagtgaagatctctataatgaaaagtataaaacattgatgaaagaaatcgaagaaaacaccaaaaaaaatactccgtgttcatggattgtaagaattaatattgataaaatgtccatactaccccaaacagtctacagattcagtacaatccctaaaaaaataccaatgacattcttcacagaaatagaaaaaaaatcctaaaatttatatggaaccacaaaagacccagaatagccaaagttatcctaaacaaaaagaacaaaactggaagaataactttacctgactttaaattgtactacagagctatggtacatgaaaacagcatggtactgtcataaaatcagatacatagaccaatggaacagaatagagaacccagaaacaaattcacatatctacagtgaactcatttttgacaaaggtgccaagaacatacactggggaaatgacagtctcttccataaatggtgctgggaaaactgtatatccatgtgcagaaggatgaaactagacccctgtctttcaccatatgcaaaaataaaatcaaaatggattaaagacttaaatttagatcacaaactctggaactactacaagaaaacactgggggaaatctccaggacattggtctgggcaaacatttcttgagcaatatcccacaagcacaggcaaccaaagtaaaaaggggcaaatgttatcacatcaagttaaaataccctacacagcgaaagatacaatcaacaacgtgaaaagacaatacacagagtggtgaaaaatatttgcaaactacccatcttacaagggattaataaccagaatatatgaggagctcaaacaactctataggaaaagatgaaataatctgattaaaaaaacaggtaaagatttacatagacatttctcaaaagaagatgtacaaattgtaaatgggcatatgaaagggtttttgacatcattgaccatcagagaaatgcaaatcaaaactaaaacgagatagcatctcatcccagttaaaatgatttacaagaaaaaaacaaacaaccccatcaaaaagtgggtgaaggatatgaacagacgcttctcaaaagaagacatttatgcagccaaaaacacatgaaaaaatgctcatcatcactggccatcagagaaatgcaaatcaaaactacaatgagataccatctcacaccagttagaatggcaatcattaaaaagtcaggaaacaacaggtgctggagaggatgtggagaaataggaacacttttacactgttggtgggattgtaaactagttcaaccattggggaagtcagtgtggtgattcctcagggatctagaactagaaataccatttgacccagccatcccattactggctatatatccaaaggactataaatcatactgctataaagacacacacacacgtgtttattgtggcactattcacaatagcaaagacttggaactaagccaaatgtccaacaatgatagactggattaagaaaatgtggcacatatacaccatggaatattttgcagccataaaaaatgatgagttcatgtcctttgttgggacatggatgaagctggaaaccataattctcagcaaactatcgcaaagacaaaaagccaaacactgcatgttctcactcataggtgggaattgaacaatgagaacacatggacacaggaaggggaacatcacacaccggagactgttgtgggtgggggaaggggggagggatagcattaggagatatatctaatgctaaatgacgagttaatgggtgcagcacaccaacatggcacatgtatacatatgtaacaaacctgcacgttgtgcacatgtaccctaaaacttaaagtataataataataaaataaaattaaaaaataaaatgtcttatatccaaaagacaggcaataacaaatgctggccaagatgtgaggaaaagggaaccctcgtacactatcgattggaatataaaatagtacaatcactatggagaacagttttagtttcctcaaaaaactaaaaatagagctactatgtgatccagctgggtatatacccaaagaaaggaaattagtatatcaaggagatatctgtaccccccgtttgttgcagcactgttcacaatagctaagatttggaagcaacctaagtgttcatcaacagatgaatggataaagaaaatgtggtacatatatgcaatagtaccattcagccataaaaaagaatgagattctgtcatttgcaactacgtggatgaaactggagatcattatgctaagtaaaataagccaggcacagaaagacaaatatcacatgttcttacttatttgggggatctaaaaatcaaaacaattgaaatcaggaacatagagagtaggaggatggtctgaggctgcaaagtagtggggtgggagagggagatggggatggttaatgggtaccaaaaattagaaagaataagacccaccatttgatagcacaacagggtgactatagtcaacaataattgtacatttaaaaataactaaaagagtgtaattgaattatttgcaacacaaaggataaatgcttgaggagaaggacaccctattctccatgacgtgactagttcacattgcatgcctgtatcaaaacatctcatgtactccatgatatatacacctagcatgcacctccaaaaagtaaaaataaaaataagtaaaaatttaaaaatcattaattaaaaaagaaatataagaaataatggagaaggagagagtagaacatgtgatcacatatatggaaaaagaagatggaacatttcttagtttctattttgggaaattacatgacatgcatagactggttttgcccaaaagatgaaactaatccctaaaaaatatgactcatggccaggcatgatggctcacgactgtaatcccagcattttggcaggctgaggtgggtggattacctgaggtcaggagtttgagaccagggtggtaaaccccatctctactacaaatacaaaatttagctaggtgtggtggtggttgcctgtaatcccagctacctgggaggttgaggcaagagaatcacttgaacttgggagacagagattgcagtgagccaagactgtgccactgcactccagcctgggcaatagagagatactctgtctcaaaaaaaaaaaaaaaatgactcatgcctaaaagataccttgctgagatattatgacagtagagaattttagtttgcatgatatctcagcaagatggctttctctcactaagacattacttaagatatataggtagtgttcagattctggaagatgcaaactattgagatgaaactttttctatgtagattggtgtgagaaaggaatcttatagcttccccaatgtctttcaagctatttcttctacagaaggggagtaacagatgaagtggtagatggcggccagggctatgagaagataaagaatggcaaaaagaagaatttttggatttaattgcagatatcttggcatctttgctaacattggagattttcttttgcttgtctattgaaggtgcttaactcatatcaatcagtttattgacccataaggagtgcatttttgctcattataagggtccttaagcacaaaaagtgagagtaagaggatggtatgcaagatcccctgtttcacaggctacaaaggaatggaactattcagattagtgatataataattgacactgaagatgccttgactttgactcttcatttttcatgatcaccctgctttagtttctctcttagcttttaattttattccaaaggcctcaatttagatcttattagttagttgagctaataactacctatacaaaataaataatttatgtacatgggaaaaataactttagatggttcaaatgactatgcaaaatatctctgacttttggctaccacatggccaggttgcaaattttccaaacttttttggcctgctttccttttacatataagttccaatttcagatcctttctttgctcacagatataagcataggctgttacaagcagccaggccacatcttaaacactttgctgcttagaaatctcttctgccagataccctaaatcatcactctcaagttcaaagttccacatatccctaggcagagacacaatgtggccaagctctttgctaaagcaaaacaaaagtgacctttgctccagttctcaataagttcttcacttccatctgacatctcttctgcctggactttgcagtccatgtaactatcagcattttggttacaaccattagacaagtatctaggaagttccaaactttcccccatcttcctgtcttcttctgacccctccaaactgttccaacctccaactgttacacagttccaaagtcgcttccacatttttggttatcctttcagcaacacctcactcctggtaccaatttactgtattagtctgttttcatgctgctgataaagacatacccaagactgggaaatttacaaaagaaagaggtttaattggacttacagttccatgtggctggaaaagcctcacaatcatggcagaaggcaaggaagggcaagttatgtcttacatggacggcagcacgcaaagagaacttgtgcaggaaaactcccccttataacagccatcagatctcttgagacttactatcatgagaacagcatgggaaagacttgcccccataattcaattactttccactgggccctcccacaacatgtgagaattcaagatgagattttggtggggacacaaccaaaccatatcaacttctttacttactaatatgcatttaaggtttctaagtgcttttcatgtcttgatagctcatttctttttagtagtgaataatattccattgtctggatataccatattttatttatccatttacctcctgaagggcatcttggttggttctaagttttggcaattattaatatagctggtataaatatctctttgcaggttttggtgtagacataagttttaactacttttggtaattaccaaggagcacaactgctggactgtatggcaatagtatgtttagttttgtaagaagctgccaaactgtctcttaaagtggctgtaccattttgcattctcaccagtaataaatgagatttcctgttgttccacatgctcatcagcatttgatgttgttggaggtctggaacttgggcattggaatagaagtgtcagggtatctcattgttttaatttacgttttcccaatggcatatgataaaaagcatcttttcatatgttcatttgtcatttgtgtatcttccttggtgaagtgtctgtcaaggtctttggcccattttttaatcaggtcgtttgttttcttattattgaattttaagtcttcttgtatattttggataacaattcttttttttttttttttgcaaatactttctcccactctctggtttttcttctcattttcttgacattgttttttacaaggtagaaatttaaatttttatgaagctcagtttattattgatttctttcatggaccatgcatattgtgttgcatttaatgactcattcccatgctgaaagtcatctaggttttcttctatattatcttttggagttttacagttttgcattttacatttaggtttataatacattttgagttaatttttgaagactgtaatgtctgtgtctatattcattttcatatgtatatatattttttgcctgtggatatccagttgttcctgcatcatttgttaaaaagactatctttgccccactgtattccctttgtttctttatcaaaaatcagttgactttgtgtatgcaggtatatttataggttctctattctgttccattgatctatttgtctcttctttcataaatgacacactttcttaattaatgtagctttatgttaggctttgaaattaggtaatgtcagtcctttgatttcttcatgtctttcagaattgtgtttgttattctggttttttgcctttccatatatgctgtaaaaagaattcatcagagtccctccaaaaatcttgctggacttttgattgttattacaccgaacctgtagatcaagctgggaaggataaacattttgactatattgagtcttcttatttatgaacatggaattcttcatttctgtagttgtcctttgatttctttcatcagagttttatagttttctttatgtagatcttgtaaatattttgctagatttatacctacatattttaccttttgggtgccaatgtaattgttttctgtttttagctcaaattccacttgtttattgctggtatataagaaaatgaatatgtatataacgtatataataataaataattacttatatacaatatatcatattttatatgttaaccttgcatcctgcaacgttgatactattgcttactagttccaggagttttctttttgtcaattcttttggatttttttatgttgatgatcatgtcatctgggaagaaagttttattttttcctgcccaatctgtatagcttttcttttcttgtcttgtcttattgcagtagctaggactcctgatatgatgctgaaaaggagtagagagaagggacatccctttcctgatcttagtgagaaaacttcagttttctcattatcaggtatgatgttagctgtaggttttggtagacactgtttactgtattgagaaagttcttctctattcttgttttactgagttttttttttgttatgattaggtgttgaattttcctaaatgctttttctgcatcattgataagatcatgtgatttttcctctttagcctgttaatgtgatgaattacattaaatgactttcaaatctgaaccagtcttgctatttgttgcccttgttctttgttcttattctgtcttccactctttttttttttttaataattccttttctggtttttttaaggattttttttttaatctatgattttcttttttcttttattttggtggtggtggaggtggggacacagtctcactgtgcccaggctggagtatagtgatgtgatcttggctaactacagcctcaacctcttgggctcaagtgatcctcctgcctcagcctccagagtagctgggaccacaggcatgcaccaccacgtccagctaatttttgtattttttttttttttttgtagagatggggttttgccaagttgccctggctggtctccaaatcctgagctcaagtgattcacccaccctggcctcctgaagtgctggaattacaggcatgaaccactgtgcccagcctatctatgattttctataatttgaataggaaatatttaggtattttgttttgttttggtatatatcttgctgtgtgttctctgagcttcctggatctgtggtttggtgtctgacattatctggggggtaattctcagtcattgtctaaaaaaaatcttttttgattaatttctctctttcttctctatctgatattccccgtatgtatatgtgatactttttgcaactgccctacagtttttagattttttttccattttttcttttgtctttgttttctttgcttttcagttttagatgtttctactgatctgtccttaatctcagaaattctttccttggctgtgtccagtctactaataagctgatcaatgatattcttcatttctgtgacagtattttgatctctagaaattttttgttctttcttaggatttccatctctgttacattgcccatctgttctggcatgctgtctactttattattagagctcttagcatatttgttttaaattcctggtctgataattccaacacccctgatgtgtttctctgatgcttgctctgtctcttcagattgtttttgccttttaatatgccctgtaatttttttcttgatagccagacatgatgtactgggtaaaaggaactgctgtaaatatgctgttagtgctgtggtggtaaggtgtgtggggaggggaagtgttctataggcctacaatttgttctcagtctttgagtgagcctctgggctgtaaacttctccagtgtttcttagtctccctcactcctcacacaccctttagctgggaaagaactcaagggtgggctgaagttgggtatttctcttccaccaggtcagttaacctctgataaaaccccaacaggttaggctttggttaactggtttctcctgagggcagaactttgttaaggacagagtgctgcagtgtatttcagaattattccttttcctctatccatgctggaagtgcaaggggatttttctgtgatatttactgtggaagcctggtcaagttgctgaagataaaacttataaaagtgtggccccagcctccccaccccatgactcagccttcctggagtttttgactctcagacttgtcctttctgagcctaaaacagttttcaaaatacagttgaggttttcctacctcagcaatggttcccataaatgcttctgcttctgagtctttgttccagtaagccacgactccctgcattcacctaattgtccaatcctgggggcagtggtatgcccgatgtcctcacctttattatggatccaagatgaattgttgaattttcagtctgttctgctttttacttattaggagtgagtggcaactttaaagctccttacatgcagaaccagaaactagaaatcatctgttattgtctttttaatataaattttgaagaacattctctatattaagaaaacttgtcatataaccatcatataatgtatacctatatcttcttaaaaagtgtattatcattttgactttacttatgatcttgtttgtcatgcagaatttaaaaaatactatatagtcaaatttatcaaaacttttttcatggactgtgagttataagccctgcttaaaaatccataccactccaaaatggtaaaattttatactgtattttctttagtttttcagacttttttgtatttaaatttttaataagagtgtgtatgtaaaaaatgagattgatgtccagggatttttatttttcttatttttttggttcattttgaggctgccactcatgctcaacatccttttctgaataactcatttttcttcattgatttaaaatgttatatttgtccattttccacgtttcttatttttcgctattaaggttttcaacttaagcattaaaaaaatccaaaatggattgtttattgttaatggtgcataataccaatagcttactgaatatgagagtaatatgcagccagtcatcactgagctcatgctagaaataagtatgggattatgatgtgaatagaaggaatgttactagaaatggagaaagagataaactgtgagagtgtgtagtgaggtgtcacctaaggcaatgtaaactatatgcctgtaatctcaaacttgtcagttgtttccagttgagaggactcagacaaagcagtagaaaatcatgctcataaattgttcactgagtaagaagtagacaaccagctttggaaaacaatgacaacttggtatcttctttgttcttcttgaagaggagaaattaaatagtcaacacttggttttagagttctgacaagttccaactagttgaaatgccttggaatttgcagctacttcaagtttgggatgctgtcattgttctggaagaagatttttgaattttttctgttaccacatatgctccttgatgatgtttagttatatccactgtggaaactatcatagctctccgagaatgttgttgaaaattgattatatttcaaatatagtgcccctaatttaagcggaatgagtatggacaggtcttttttgctgagatttcttcttcctgcctctccctctccttcaccctcttgttcctctctctgtcctctgtcctcttttctttctcttccttgactttgctggactgattccatgatcctttcctgaagtaagcatctctgggggatcaacccttactttggactacaatgccattgccatcaatatttaaaagtaatctcaccataagataccatctcacaccagatagaatggtgattattaaaaagtcaggaaacaaccgatgccattgaggatgtggagaaataggaatgcttttacactgttggtgggagtgtaaattatttcaatcatcgtggaagatggtgtggcgattcctcaaagatctagaaccagaaataccatttgacccagtaaccccattactggatatatacccaaaggattagaaatcattctactataaagacacacaaacatatgtttattgcagcactatttacaatcgcaaagactgggaaccaacccaaatgcccatcaatgatagactggataaagaaaatgtggcacatgtacaccatggaatactatgcagccataaaaaagaatgagttcatgtcctttgcagggacatggatgaagctggaagctatcattctcagcaaactaacataggaatagaaaatgaaaaaccagccagtcacagtggctcatgcctataatcccagcactttgggaggccaaggtgggtggatcacctgaggtcaggagttcaagaccagcctggccaacatggtgaaaccccatctctactaaaaatacaaaaaattagctgggcgtggtggtgggtgcctgtaatcctggttacttgggaggctgaggtaggagaatcacttgaacctgggaggtggaggttgcagtgagccgaggtcatgccattgcactccagcctgggcagcaagagcaaaactctgtttaaaaaaagaaaaaaagaaaagaaaactgaacaccgcattttctcattcacaagtgggaggtaaaaaatgagaacacatgaacacagggagggaacatcacacaccggagccagtcgggggttagggggagagcagagggagagcattaggacaaatacctaatgcatgtggggcttaaaacctggatgatgggttgataagtacggcaaaccaccatggcacatgtatacctatgtaacaaacctgcacgttctgcacaagtatcccagaactttaaaaaaaaaaaagtaatctcattgtagaggaaagcagctgttcacaagagcatataaaactaacaatggatctatattatttaggttcacgcagatttaagactgtgatgtctacatgcaactctctgtatatatctatctgtattgatagagatatgtacatatctatatctgtatctatctatctatatagagagatttattttaaggaatagtttcacacaattttaggggctgggaagtccaacttctgcagggcaggtcgtcaggctgggcaacctgggaatcactgattttgcagtttgagtttgaagacaagtctggaggcataatttcttcttctttggagagcctaagtgtttttcccttaagaccttcaactgattgaatgaggtccattcacattatgcagaaaatctgcattactcaaagtctactgattcaaatattaatctcatctaaaaacaccttcacagtgacatctagactgatgttggaccaaatatctgggtactggggcctatctcagtggatgcataaaattagccatcacacggtctttacctctagcaaatcttttccaaaagcctactttgcttatacaactataatataccaactttctttttattgtttctcgtataactatttccattctttcaacttctctgagctttaaatttcaaacttaaaataaatcctcatatatctacactctcaaatgttcataagcttcttatttcactgagaaaatagaaacaatcagaagagaattttcaaaaacttcaacacttaccagtcacttgcatctatgctcaaatactctgtctttcctctcattagaatgtcatcccctgtgtgcagggactttgcttattctcagcacttatcatcatacctgaaaatgtaggcatttgaaaaataattgttgaattaaaaatgaataataaaaataactctgtcattaccagaacaaaactatcatttattcattccctcaataaaaatttattatatgcctatttattgacaggccttattctagtaactgacaatgtagcagagaatagaacagataaaagtccctatcctaagggagcttatatttcagttgaaggctaagttcatgttagccactacaataagcctttacatgaatcatctcttcaatctttcaaaaattgttaggtaagtgttatcatacctattttcagatgagaaagctaaggctcaactctcctatttaatatcacatagagccagaatgcagagcttcaaatatatgtctaaattactaatctactgtgctgatatagacatgaagggctttatcctctatatcatgctgcaaataggaggaaaaaagcttgatcaaaagttctaagcaattgtagctctgaccccaagagggcagtatttgcattcgtcccgcctgcaggtctgaatgtgtagtatgtgtaacatagcgaagctggtctctgattggctagggataccctctgagaaaccctttggttagtgttaaaaaaaaagagaagatgttgaatacacaagtcaacttctgggagcagatctctgcagaataaaaatgaaaaagcatctgacgaccttcttggtgattttgtggctttatttttatagtaagttagtggagagttttagcaaagttaacatagtaagtcaagggaatattttcttaggatttggggtgaagatgtagtccactgggataggaggaagggagaaaatgggaccattttctgtttcacttgggattcattgtggggagtaaggaagggatgcaaattagacagtattaatactggatgatggatctcttgaatctcacttttctttctgaataggggggaatggcaaaaaccaagtggagcagagtcctcagtccctgatcatcctggagggaaagaactgcactcttcaatgcaattatacagtgagccccttcagcaacttaaggtggtataagcaagatactgggagaggtcctgtttccctgacaatcatgactttcagtgagaacacaaagtcgaacggaagatatacagcaactctggatgcagacacaaagcaaagctctctgcacatcacagcctcccagctcagcgattcagcctcctacatctgtgtggtgagcgcactgtgctccacaggcacttgaagccagtatgcaaacctgcacctggaggttatcaaggaggcataggagttagagtagaccgttattttttatgcagaatatgatttcactagtgaatatttatctctccgacatgatttgatttgagcttgagcctaaagttctacttaggctcaagtagaatacatgtcctcaagcgaggataaagacattctcactcaacacacaaagttaattgctacatctgggtgttcccaagggcaagacagtctgtcatgctgtgttactattgctgaagtagatgacagtgttgtttggaagggagagactagcttggtttttgatctggacacctaccagcagaatgtcaactaagtgaaagagcaacaagtttatgtggctgatggaaatttttttttttttttgagatggagtctcactcagtcgcccaggctggagtgcagtggcgtgatttcggctcactgcaagctccacctcccgggttcatgccattctcctgcttcagcctcctgagtagctgggactacaggcgcccaccaccacgcccagctaatttttttgtatttttagtagagatggggtttcaccgtgttaaccaggatggtctcgatctcctgacctcgtgatccacccatctcggcctcccaaagtgctgggattataggcgtgagccactgctcctggccggaaatatcttgagaagtttccttcccctgaaagacattcagttgtcatttcatggctattcaagttctcagaaagcatcctgtgagaataaatctgctcttcccatttagctatgctccagatcaaggcttttgtccaggtgctgcatcaactctttattatcttccatcactgctcctttagaggacactggaaggccaggggatcctggcagacacagtcactctcaggcagcagaacaactgtgccaggcttttcaaccatcagtgttctagaaaagagacttagggacagaatgcctacctgcaattgtgaactctggttttcacaacttagctgtgaagttctttttgggacaattagagaaatgtacatataatttgagaattagatgagaaaagtacttatttaaaaggcagatatcaactgtaaaaaaatgggaagaatatatactaagatattaaaaatggtaatccttgtattgtgggaatataatgtttttactttttatctttccttgtcttctgtacttttaattttctatagttctcggatttttcttctgtcaaaataaagattattaaaaaataacaaatgtcttaaaaaatttaaaggaatgcatctcatctgtcactatcaactcacaggaattgatatttaaagatgatcacacatttcaggatattgttgaataagattgatttgttatgcttatgagcactgcaagtaagttcatttccaagttcagtgaattgataatttgtgaataaatgaagccaggacctggactgttctttgtaactagtctggagatagctcaagtgtcaagacatcaaaatgccttgacttctggagcaaaaagtaaacctagatatattcagtaatcagatattttttcctgtcctgtatctcctttcaagtctttagagtgaagaaattaatgttcagattgctgctacagcagacttgtgtgagtaatcataaactaattgaggaaaaagataaaatacatgaaaatggaatcaataggtaaaattccaagtacgtggacaaataagttttaaaggtattctcaggaggagattactgtgggacagaaaagataggagaaagtatcatggggaatagcaaatttagttaggtcttgaaggagagacacacattgaatttgttcattacacaattatttaattaaacaaataatgaggccaggtgccgtggctcatgcttgtaatcccagcactttgggaggccaaggtgggcgaatcacttgaagtcaggcattcgagaccagcctggccaacatgaagaaaccctgtctctactaaaaatacaaaaattagccaggcatggtggcatgcacctgtaatcccagctactagggaggctgaggcaggagaatatcttgaacccaggaggcggaggttgcagtgagctgtgattgcacatctgcactccagcctgggcggtggaatgagagtctgtctcaaacaaaacaaaacgaaataaaaaacaaataataagtgacaggtgtttttgtaggtagaaggagtagggtaataaacaaaatagataaatgcagacacaaaagaccttccattacgaggcttgagtctatgtttgtctattgcgttcactttcttttacaggaatatcttgggaagtttgcattccaatataggcatttccttgcttgctttagtttagtttagtttgcaggtttcatatggtgagtaaaaggcacaggcattgaaatgctctatctatcacttactaaattgcattactctggacaaaattacataacttcagagcacctacgcgccatcaatggtaattacacgtacatcacatggtcataaggattgaattaagttaagtgaatttaattaaatgattgaattgcattggtagaaaataatttttcaactaatggtagttattcttgtacataaatgataaaacaaaggtaatttaaaataagacaataagaaactttaagtatagattaaggtttacctttccactcttcttctgttgattatattcttttactacagttatggccgagagtcaccctttatttcacattggccttattccattcaattatttgaactgacagtattggctttcttgtttgtttgtttgtttgtttgtttttatctcataggttttctgcacagaaaatgaagctttcttgcttccggtgtaatttaatgtaaattctatgatgaatccacatgagctttatggagcaggactccgatataacaccattatactgacctacagtgccaataactagatccatacccaggagctcatttaacagagctctgcattggaaaggagagaaagtaacctttctaggtttgggggagaaatcctttttagttattcaatttataacttgtacatacatggtagatgcccaggaagtattacagaagaaaaaaggaaagagaaaaatctaagggacaaatgctagatgcagctgactgagaatcagcacctggttctgccagggtccttttccatgctacctcttcagagatcaggaggagctgtgtgatctgtgcaccggggagtaaatcttgtttctggctggttggggagactttcagcttcctgcaacaaagaactatgaatataaactcagagaaaccagagatttggcttgatagtgtttgagggctcccagaccccagccagagacctcactgagtctaagtgataaaaacggagaagcccttgggagtttcattcttgatttcctcctggcagctgtgctgtgagttgctgggctctggaaatatcataaaaaagagcagattgtagtttcttctttataagtctggaagttatagaagggtggttagggtctcagtgctcacctgtgggggctgtgaaaagagagtatatcttccaaatgaatgaatttccgtgaatgaatgtcctctgtctgtggttctctgtttaaacaggggtgaatagactacatacactggagcagagtccttcattcctgaatattcaggagggaatgcatgccgttcttaattgtacttatcaggagagaacactcttcaatttccactggttccggcaggatccggggagaagacttgtgtctttgaccttaattcaatcaagccagaaggagcagggagacaaatattttaaagaactgcttggaaaagaaaaattttatagtgtttggaatatcgcagcctctcatctgggagattcagccacctacttctgtgctttgcagtagtgtctccccagcacctgcagcctgtaccataacctgcagccgggacccttgacacaggctagccttgcaggtgggagtgaagattttttttttttttttgtatagagggaactttctttatgacccgcatctccaaaatagaagtgaaggataatgtatctttcttatgtaatgaaactgaatttatattaaattaaatttccttttgttattatttaaatttcattccttgatgcagtttgtacagattctgagcctgtttgcccacagattccttccactgctttactctttaagaggaaagacccctttgtggtgcaggctctgagtccatgaagcaagttttctccaggctataccctcatcaggaacattttacccatttgatcatatcttcatgatgtttttgtaccatctataccattatttacttaatttaatattaaattgatgtttatgttaaatagactttaaaaataactatgtaaaattgtcttcattttaccagataccatctgtgaaaccatgtatatgatataaataatatatttaaagtgctgcttatatttttcccaatataaattaaaatagcatcatatatgtaacaattgaaaaggctgtctgtatactgcctaataggacctcttgtatcaatcacactttaagaaatactgatccagcccatacccctcatttcataaatgaaagaattgagatccacaagtatggtatcatttactcaagcacgacttacagtaaaatgaaagctataaaaagagtctaggctttatgatcccttgtcagttgcttcttccaccaacgatgcaaagcaggatctaaagtttgaagaaaagagttgggtgttttacatttaaattaaattaaaagttttatttaattgtgtatgttcaacctaggtacattagaagatacgactacctatcaaagtagagcattctcataacttcatcgcctagaaataacaagtatttatttttcaaattttcttgtatacatatacaactacatttctctatgaatggggctgataatgtccccagtatttattaatgtgcttgcttctctcaacattatagatatttccatgccagggatcttatattgaggatataattttaaatgactgtctagttttcattatatattttttaaaaagtgaatcaccttttgataatatttctaattatccagtattatagacaatgtttttattaacatcattcaagtcacagctttcacagaatggagttgggtgaataagggaaaacacataacactgcatatctaattttcaggaagaaatttttcaccaaattgtgattccaacaatagcatgtaatgctttttgttttccatactttctttacctgttatgaacattattacttgaaagaagtttccactttgccaagtaaaatttttaaatgttttgactcttttactctatgaagttatacatttgttattaaaaataaatgaaacaggattagaaaacatacagagtaagagtgtttcacacaacataagtatcttcatacaataagatatgttaaagaagaactttgaaaaacactctcatggtcccatttaccttccaatgttctctttcctttcaaggctatctattctccacgtcgttcctactgtaagtgtggaccagcactatctgaacttgtgcggaatctcaggctgactgaatttgaatctgcattttaacagaccaaccgtgtgattctatccttcaaagtttgagaagcacccctttcatggggtgccagaatgattttttacaatataaagtaaaagctgtctctactagcccaaaaatgcttcaatggctttctattgcttctagaataaaaatgcaaatttcaggctgtgctacacaaagatatgtatcatgtgaacctccttttcaatctccccttttaactctcctagctctctatgtagcaataacactattctcctttcagtattctgaacttgccatgttcttttccacatttagtcaaactcgtccatttgaaatgctcttcctccaaatatgggcaagcccaattcattttcacatttcagatctcagctcaagtacacactatatagataaagacttctgacttctgttgatcttcgtgactaatgtagccatccatggctctccccacagctttatcacaaaaccctagttatttcccttatggtaataatcataacatctagttataatgttgatttacatgccaatgtgttcattgcctaaacttccaattaggatacaacttctatgaggtcagggatattgtttgtttaatcacacctttaactttagtgcctacctttagtgactgccccataatagtcagtgaaaaaatatcttctgcatgtggctgggcgtggtggctcatgtttgtaattccagtactttgggaggccgaggtggaaggatcagttgaggtcaggagttaaggaccagcctaggcaacatagtgagaccctcatctctacaaaaaacaaaaataaaatattaaatgagtgtggtggcatgcgcctgcagtcctagctactcaagacgttcagacagaaggatatcttgagcccaagagttggaggctgcagtgagctatgatggtgccactgcacttcagctctgggtgacaaagcaagacctcatctcttaaaaaataaaataaaataaaataaaaaagaactatatacagaatgaataaatgaatgttgcttggccttgcgttcttttttcctttcgctttcttctcactcccatcctagcaaatctgaacttcgtgtatgtgctccctgctcagatatctggtagagttctttaatgctggcacttaccccttgtctccggaccaggccttcctatgctcagtgaactctgtcaaataactagatcaactcagggtctcaatctgtcctcactcaattgacatcaggtgtaatctgaatgaactgagcaaactctaaacataatcccacagtaaaacatctgaaagaaaaaaaaggtatacttaaaagatgttggaaagtatgaaatcaacttcccaaatcaaataaatgataagcacatgtcaaagtttaatctcaaattattgcaagagaaaaattgcatcaggaaacacattcaaataattggactaagtagagacattttatagaaactagtttttttttttaaagtcaatttaaagataattattatggtcaaattattattggttcataatgactgtactctgtgtagtggttgttagactcatcatgagattaatagtcatctgagattataacactaatatctcagaatgagtctttattttagtaaagaatatcagaaaattgatcaaatatttgatcaggtatgatagttaattcccatatggggctatacattttatccttcaaaaaagtttcattcaagaccagttttgggaaatttattgttgtcaaaagtaattcaaaccaagtgtggtgatgtgtgcctgcagtcccaggtactcaggaagctgaggtgggaggatcccttgagcccgggagttcaagtccaacctgggcaatatagtgaaacctcttctgtcttaaaaaaaaaaaaaaaggtaattcaagtctttagtgtttactataatggagaggagggatttgtcaggttttggatgttttcccttcctacaagttactaatcttgtttgattgaggctacagtaaatatatgaaactacttagagacaaaggattttgttactcatgacacagcaaacagcataaacattgttatattcacttcagtcgttctttcccttaaatctaaaaaagatgatatgtatgctgacgaatactttgtttgaagtggtactgtgtcataactgaggaactttgagctcggagaattcactgcttttatagtaaggagtaaaccaaattgctctttgtctcagagggaaacagtacctcacccctcaaggtttcttgctgcaagcataactctggaaattggtcaggtagagtggtcatggtcgtaaaccactggcatacctagcaagacatttatgagtataagagattaaggatggtctggttttcaacaatatccactccatattcttacattgtgttattttctagaaacttttctcatgagtgtgccactccagaagccgttctgatcaatttgacggacagagattccgagactaaatacattgaatttgcctcaaacaatgtttaaataaggctactatcagcagaccaatctgcaacattaacttcacccatttagtcagctgtgacaaagtcccaaagtatagataactaggatataatttcttatccattatacatggaagtttagattgatacgctaatctttgttttaattctcaaaaagagtccaaaaagtagccaccattcctaatggaaagatgttctgtcccacctattcccagacataagcataacccaacaggttaatccagtttggaatttattgttaaacttgatttggatcagcattacatcacttttgttgtaggatccttggggtgttgcttttctgaccagaaacctctgtggttggtggtgcctttactcaagttttgcatgggccccctggactcattccacttacttggcctggaagactatgctcagctcatgctaccggcctggatcttatgcttgccaagggcgagtcaggcatggagcagtaagggatgtgtgaggaagtgtggggtcttgccactgcacagtcagacatgctggctgctgcagtgaggtgggcagtgctggcatgggtgccagctgtctacaagactgaggctagaccagttgcactgcaagcagcattgactgctggcactggggaacacggtggcactcaaaagcttggagatgccaggaaccatagggtcccaaagaggggggtcatagccctgacttggggagctctcaggtctgggcttcccacagggccacagcacttctctccttttttttacccacaatgtggtaaacacgggacatgtttcagccctgtttgtggaacagctcttttagccccaccatttgatgggttccaagttcttgtcctgcaaccaggaagaatgaggtacacagtcaagtggagggtgagcaagatgaagtagagctttattaagtgatagaacagctcagaggagacctgcattgggtagcttctttccacagctagggtgttccaatgagtgttcagctcgtagcagagaggagaccctggagtgggaaactcctctctgcaggcaggctgtcctgttgtctctgtagctctcagcacagaggaggccctggggtgggtagctcctctctgcagctggttgtcccagtgtctgcagctctcaatagagaggaaggcttgtagtggttagctcctttctgctgctggtcatcctgaggtctgctcagctctggctgagcctggggcttttatgggcctcagaagggaggaagtgcatgcccaatttatccatgggcagccatgggcaggcccagaaaaggcaccacaagttcccattccagtctgtgggactggcagcctgacatccagccttcaggccctccttggcctgaaggtgtgacctcactggggacccaccacttccacccagaaacctgtctgcctcctactgtcattcttagtgcccagatggtaggtgccaaggagtgccttcaggccagtgcccccttggcttccctcttatgcttgtcagtgcccaaaatctggagggtgtcaaggtggcagagggctggtgtgtgaacacttcccctagtgtgtgcacactctactgtgctgcaacagtgcctgggcttggcctcaactttgctctgagatcagagtggatgctgacaacaaggagaagccaggcagtgagagtgggtacttctgagcctgtgaaggcagggagggcttcccaggccctcaagagtacacagaagcctcggtccacagctgcagtttgggaagctgtagctgcccacagagggaggttgagggggcaatgctcctgcctgccccatggagcagaagtcctgggtttgcagccttgacttgggtggctgcagcttcactgagaagggtggggctcctgcctgctcctggtttccccaagagcatagggaggcctaggtctgcagccacgacttgggaagctgcagctgtgcctggaagggcagggttccctcctgctcctgggcagagaagacagtgatgcccctgaagctgtggcttgggcagctgcagggcacctggggagctcctgctccaactcagaaggggcagggctcctgcttgtccctggttccatggagtatgcagccccagccatgcctccctgctgtgatagtagtggccactccagatggcccgctgctgccatcacttttgttaagctatatgagcagtgccattgagtatttgcaacctctgtagccattcatggcataacccaagacttttcagacatcaggagaagcatatacatttgtatgagtcagattgagacaaagttgtactgatttctatgtttgtacacagacaaggatgaagaatctatgttgggaagctgctattgatgtatgtattgcagaaattttcaggacaggccatattcacaggagttttactatttcaaggaatgtggaagaagatgacaaaccaagagcagattggatagccagctgcagctgccgcttggctccagcagaccatataattgtcttgctaggctgtggtgcttgacctagaatacaaagagtgaattaattctccactcctccacctcccggtctaagattttcccttcctaggtgccagtgttgttgctctttgtccaccatcacaaaatcggttcatcccattctagtagctataactttgccttttttttgtagtcagttcctagtcacaccaaaatcatttgcctagaacaaatagaaagaggaacaggcatttgtatgacatttacagagattcatcataattaccaccttggccttcctggaaaactgaacgggaacttgtaaagctgtgcactcaaataaatgctggttatcctcatgatgtaaaatcatgtttaaccaagaaaagaatataggtggctgaactggaattcaatattaataccattctgacaatgttgctgcctggagagtgtaccaaccaggctgttctaaggtcgctgttcggagaaagaaagaagcatcatgcctttcacttctagaatgttagaggaggtgtactttttcctattactgttagatacagctaaaaattctggacattatagatgttccttgaattgaaatgagattacttcccagtaaactgattgtagtttaaaataccataggtataaaatgcatttaatacatcttatatactggacatcataagatttcctatcctatgttaatcatgctcagaacacttacattagcctatggttgggcaaaatcatctaacacaaagcctattttataacaaagtgttgagtatctcatctagtttattgaataaagtacccaaagggaataatagaaaggttgtattggtacacaaagtacagtttgttctgattgggtattgcttttgcaccatgaaaaaaatcataagtcaagtcatcattaagttagggaccatttgtatataaaatcaaaagataaaaagtttctaaaagatagagagaaaaagccagattgtctaagaaatttaggacctgaacaatgctagaacagtgagtttcatgagtttccttttgcctcatacaaaccagtggcatccaggagtagccagtaacctggtaatgccggtgggtacagaaaagaaatcccaaagaaatgccgttttctgtagccaaaggaccagggaaaggattgactatgaaggcagaaactataagaccataaccattctactctagccaaagaccacaaaaagttttatagcaaccaagcatacatttaatcaacaaaaagttaactgcaacgtagcaggagagatttgtgatagtgtaactttcttttgctccatctttccatcactggcttgaaaatagtctttaaatggcatccggcattcccagtgtgggtgtctggggctggaggaagcagagtagacccgttatcaaagaatagtgcctgactatgttgacctgtcaggtggttttctgaagggctaattcaaagggctttcctgtattcatataactcaaaaccctctcagagtggagaagaagtggctatgcagaggaaattttaaaaaaaaattgataaagggactcagtagcaggaaggagaaagaatctgcaaatgtgaagataggccaattgaaattattcagtctaagaagcggaagggaaaaaaattgaagagagcttaatagacctgcgggacattataaaaagtacagccataaggataacaggatttccagagtgagaggaaaggaaaaagcagggagaatatttgtaaaaatcatgactccaagcttcccaaatttgttggaagacatgaacctatacatccaagaagttcaacaaagaccaagtagaaaaaaggcaaaaaaaaaaaaaaaatctcattgggacacattataatcaaactgtttaaagaaaaagacaaatggagaatcttgaaagctgcaagagataagtgattaatcacatggaagagatcttccaaagattagcagtctattgtttatcagaaaccatagaagccagaaggcagtgggatggcatatttaaagtgtttaaagaaaaaaaaatgtcaaccaactattttgtatcaggcaaaactattgttctaaaacaaaggagaaattaagacagttccagataaacaaaaactcagagtattcatcacttgcagatttgccctacaagaaaatctaaagggaatctttcaggcagaaaagaaatggcactagacagcaacttggagccatgcaaaaataatgaacaatggtaaaggtagttacatagataagaataaagccaatatttttgtagtttttgtttgtaactcccattttttccctaacttatttaacaaactaatacataaacaataattataattatattgtggaaaattatacagaataatctcattgtgtataatgagaacacaatgagtcaaagtgtgtttttccatgtgtataaaaatttcctttgttcgccgttgtaatttttaacagcacaacttatgtatttcaaatagacacaaaattagtagcatttacagtagtatcttaagctaaattgcctttgaatgagatcttgctttcaatactttgatgtccacaaggcatatctagaaaattttatgctttggaagatgaagactgcttaatccagcggggaaggggactatgatttctctttgactagttgccataacactgtccttaaggcatatgaaggacttttatatgttatttagacatcagtaggcacagaagctttgcagtacaactttgacatataaattctgtcattttttttttactttaaaataaattttttttttaaatgtcactttgctagcattgataacgctcttaggtccaccacaacattatatctattcacccatactatttttgttacaaatgttaaaaaggtgatttcttcctgaaaggactgtgcttcaggtccccattcaattttagatgttatatttgttttttataaattttccaagaatgtagtggctgcattcttgggttgctgtcactcttcctttggtttttacacttactgagaagtggctgttgtaatttctgtcatgtgcaatgtattcctggaaaaagggatttcaatatcagcatgttattcttcattctatttcctatgcagttgttggtgggaatgggaagggcctgccaggccatcattgatgtatactgattacaaggctcttgagtagaaaagagcctgcatcattgccggcctacagccaccagcttcttcaaggacacagagcagattatggactagaggaggaacagtggttgttgtgcttgttactctgtagacccagttaagtttcttgcatagttaaccctccatagatctggtttgctttttaggttaggatgaaaaggcaaagagaaagaccaaattcataaattttggagatttattcctagatataaacttaaaacaagaaaagaaataagaggaattagacaaatgaacagacatataaaagtctagatagtgaaggtaggtccatctcttttgcaacagcccaaacaaatactgttttgacatgacatgcacatgtcattggtgtaagacagaatgacgaattccaagctccagtccttggctttgttaaaaaatgttgcccaggctgtgagctcaaatcatatttctttatctagattttaggtcattctattttgaaagaattcttttgaattataggaaatttctttaaaaattggagataacagaatgctatggggatgtatggcctgacatagagaagagctacgtaatgtgaaatgctccttaaattgcaagaatctcactcaaagttttggaatagaatgcttcatgactgattgttgtgtgcaggaaagtggctattagaaataattcctcttactcatacaagagttgccatttgatatcaaacacatgcatgcataaacatcccccacagacattgacttggagcatttgcttctcaaatttttaatttaactaatatgtcagatttttacatttacctgttcacataatacaggtctacatcttgagtacgtctttgattactatcatgattccacaagatggcagtgtgttcttagggaccctgaggaaagctctcaagtgctcgtgtgtatgtgtgtgtgtgtgtgtgtgtgtgtgtgtgtgtgtgtgtgtgtgtgtgcttgagagagagagaaggagagaaagagagagaatgggaagggcgataagaggaggggttagtgatataccaggggttgtgaaaataaccttttttttctaattggtaggacagattctttttatgattcctaaagtggaagaaataaagtatctctgctatgttcatttctttttggattgaaaattttaatcctcagtgaaccagggcagaaaagaatgatgatatccttgagagttttactggtgatcctgtggcttcagttaagctgtgagttgggcatctctataggaacataatgtacaatattttgagatattgtctatcctaggctgggggctagaagcctgaattttttctctaactaagagagtagaaagcctgtaaaaacatgatttgaattctggggagtaagcatttacctcccaatttgtcttctctgtctgaccactgtctttttcacaggggtttggagccaacggaaggaggtggagcaggatcctggacccttcaatgttccagagggagccactgtcgctttcaactgtacttacagcaacagtgcttctcagtctttcttctggtacagacaggattgcaggaaagaacctaagttgctgatgtccgtatactccagtggtaatgaagatggaaggtttacagcacagctcaatagagccagccagtatatttccctgctcatcagagactccaagctcagtgattcagccacctacctctgtgtggtgaacacacagtgctccccagacacctgcagtctgtacccaaacctgctgggccccaggaatgcctgatgtagagcttagactgcagggcagtaaagtcctctttgctctctagattcaagtggaaattaagagtactagtatggaggactgattgattagggaagtattattataattctgaaaataattgagaccctgaagaaaaatgaaagatacagtcttggtctggttaaaatattttccagtattctctttctactttagttttaaaatattttttatatttcttctggagagattaaaaaaataaatttttttgagatcattgacaaaccagaaggattacatattcatttcatacatacatcacaatctatgccataagcatatccatcatctctaaaagtttacttcctccctccttttttaaaaaatttaggtatgattgatatacagcaaggtgcctatatcacataatgtatacattttaatgctcactctagttttatgccacatctatgctttattagatcggttttatgattccttttatttatatcaagaaaacattttcatacaataacagatattctgtctctgtctgtaggacatcttattctttccccatttagttacccaagaagtttgatagacgttgctttaggaatgcaacagaaaaacacaaatgcaaaataaaaaagatcagcaaactactgtgaaaatcctgtaagtcataaattcttttagttatagaaccctcaccccatctccagccttagctgcagctccactcctgagttatataagggcacatttgatgagtagatggcagaactagagggagagggtgagaacacgttaaaaaaaagcctagatatttgcagagattgaagattagagagggtctatattgccattttggggtaaagtctgaattgaactcaaaaccttgtggaagagtatattgattcctatgtaactgagtgtggcttggagatggtagggagtcttagctctagtcacagcatgtcatatacccacagcacctgctggaatgacttaaaatttattgagaaggatctctaagtatctaaaagaagtctagacaccaagaggctttgttgtgatgaacaaagacctgtttaaatcagtgaccagagaccgtatggtattgagcatatttcagcaaatgttggaggagagttggaaacactgaagagcatataaatgcctccctcctctgactacctagcaatacatatttgccctgcaatatatactatgttcgggcaaaatatttgtgcctgatgaaaagaatactttttagtagctattaagttgaattacaggaaaaaactttgaacatcactttattataaaagtgaagttgtagtctgttggacatgatatagtttatgtagtcctcaaagtgggaaagtttagaaatggagagttaagatttctgtcaagggttgttcccatagtcactgatgaaaaggatgaactcaatccaaatttgcttcaaattcttaatctgaagaatgaaagactgaataaatctttccaagccttggaagaaagatttgaaaggcagtaaggaagagcagaaagttgcgccagaatcaagacccttaaattttacttccacatttgttttataccttttggcttcctggcattctggaaagaacctgggttgtgttttctgtttgaatatttatgttactaatggtccatttattaggctacatactatatatatttcaggatttgtttcagtattaaatgagataacatactgctttgggatgagttccttaaaagtagagactgcagttggaatctttctctgtaattgattgaggaaaccaggttgagacagggggaaaggctaagcatggacttggtccagtgggagtcttgatcccacctgacctcatagggagctctggagagtgaactacatcacaggggtgatccctcccacgctgaggcaagggagccagactgctctgacctattgtgggtaagaataaagtcataattggctgcagtgtttcttggggtagaggtatatgctactggacaatggtggctctcattggcagaggtcaactttctagggaaaggggcaaatgtgagccaagagtagccaacactcacagtagcgggggatggctacactgtcctgggaaaggagatctaggctgggggccagcagtgttcgttattaccagggaacttgcctggtatgtgggcagcattcaagaaataataaactttaatcatattctgaattttaatttcactctccttttgaagatgtttatacagctggccttaccaattttgaggagttgaaataatgtaagttaaagcacttgttaacagaaaccatctaagtaaacataaaaagcagatgaaaggaaaaattttttcaaagctaaaattcagaaatttttaaaagagtagtgaccagagaaccagtctactatcttagttgcttttgggaatgatgagataacattctatccatcactttctatccaggtagcaatgattctgatgatttacagttcataactctgggcttctatgtgtagacagagataccatctatatttatacatgattaatgctattttgttattaatttgtatttaagaatgaaggactgggtagcaggatggactccttatgtctttgtgtccatgttccccacaaagtttcttcttgaatggggtgcctggccagtagtgtgggtatgtgggtctgtcatgtgaattgacaggcttctttctaggatgaatgaggagggaactggtaattaaggtgcttctctttgttccctgaacctaatatcattggaaatggcctaattatattaattactcgtaataaaaactgaaaccatcccagatggctcaagtaaactctcatgaagattacatgccccaagttggcttcatatgcttctcacacacaaatacagaagcaggttggtgagaacagagagaggctagtgcagccattccacatgtggaccttcactacgttctcttgtgttcttttcctctcacccttcatcacctgctctctttctcagcccagaacctctccagggtcccacccagtaggttcccttcactcacgtttccactgtaatcttctcacagttcattctggcctggactttttccctctctgttttctccatcagtgtatttgcatccactttttatctacctcatgggaattgtgataactttcatctttttattagttttattattgatggattcaggtcattctgtttataattttacatttcatttcagtgggaattttagagagttaagaggacagcacatatgtttagtttgaagttttgtttcagaaccccaccctagtaacatttaaatttttaagctgactatataattttgtcttacatgtgataaaaaatttataggcagaatcaagaactagatcagaagcccaagggaaaactgatttcaggctggtacaattcaatggagtattcagaaagcagtttttgttctgaccttgtaaaatcccattttacctgagatttttctccttactgggttatttcatttttaggatccaatgatctctatgctacaatagattgggtggggaaggctttttgctcaaaagcttcattttattattggggcacagagcagtctgttcttgttcgctattgtctcccacccacatggcactgctgtttgctttgctctgttgagcgtcaccgtcaatatctctcaccatttctacacctctcacaggttcctctcatttctggtctgctgcttgcactccttccacctgtattgagttcatgtaggtttactttttaaaaatctctttaactattttgataatcacttatttatatgttatattttcttccatttatcattctgttcaagtttctttatagatggagaaacttaattgtggagatagaaaaactgcattaattttttttagtgtcagattctcataatttggcacaatatatcagtctattctgaacactgacagttggaatagtactctcactttctctttttaaatataagttatctaaattattttctcctaggttcacaaatattaaacttgttgacctgaaattaggaagtcttttccacactttccacttgacaaagaaaattcttgcctttaatcgtttgctttgattaattaatgatatgtgatccaggctgactttaagtatgagtctctgatctaatttattttttaaagagtcaactaaaggaataatctctttcacccactgtaatgctcacatccagctgcacagggccatatgaagctcagcccagactgagacaactgatcaccacccctcttcttgatgaacgactttactaatatagagtgtctcaatggttttccaaagtctacaacgttgtcttctgtgactaatttctcagggaagtaaattactcttctatttctacataattctcatttctcatgtatttaaaattaaaaccatatactctacggaagatgacgtcatcacagattcgggaagaaagaaacactttctgttggttttgatatcacatctctcaaatgagaaggaaacagttcacttccttggatctgtggttccacctgtgccctccagggggcgacgttgcactaaggaggcatctgtgttcattgccgaccatcctcatccactgagcctcctccctgcagctggctgatgtagctcactgatgtctgtgtagacagggagctgtgacgagagcaagaggtcagaacacatccagactccttaagagaaagcctttctgttttggaaacttttcaaagccagggacttgtccagcccaacctccccattgctcctagctcctgaggctcaggacccctggcttctgtcctccctgctcagggtcctgcagcgttgcctctgctcagccatgctcctgctgctcgtcccagtgctcgaggtgatttttactctgggtgagtaacattccattctttttcctccttttgtaaatgtgactgtgttgtaattgcctctaagtagacttcttagcgaagtcagcgctgcttttgcttacacagcattggtgttgcaggaggaaccagagcccagtcggtgacccagcttgacagccacgtctctgtctctgaaggaaccccggtgctgctgaggtgcaactactcatcttcttattcaccatctctcttctggtatgtgcaacaccccaacaaaggactccagcttctcctgaagtacacatcagcggccaccctggttaaaggcatcaacggttttgaggctgaatttaagaagagtgaaacctccttccacctgacgaaaccctcagcccatatgagcgacgcggctgagtacttctgtgttgtgagtgacacagtgcttgagactgcaggagagctgaacacaagcctcctgagatgctgagactttctgtgactcaagaactcgaccttgaagtctgttttataatattaaatagcaattccaagtttctgatgcttattgatgtgtgctgtatctttttcatctatttatttttaaactatctatgactttaaatttaaagtgtgtttcctttaggtagctttatatataaggtctttctatccactatgtcaatctctggttttgcactggcaagtttagataattataatttaatgtatattgatgaaattggattttagtatactatgttattattgtgtttctgttcctcccttattttttgttgttctttttttttgctgacactttttggattatttgaatatttttaacactattttaatctatggacttctttggttatatttccatattttttgagtggttgctctggagattataatacatatgactaactctccagggtcttctgtgatgttgtacctctttatgtaaaatgtagaaatttttgtataatatgtctctttattatacaataataattgtctcttcaacaaacactgaagtttgttgtagtcgttcatgtatatcgaagctacctatattggaaagctcaccatataatggtacaatttttgttttaaataattgtatggaccgtataaagctcactaggaataataatatttcgtgtttaacagctatttactaactctggtatccttcctttgtttctaaagtaagttttcctctgacaccaggagatgtgtttgaactgatgtcattcccttcaaacttaaaaaactccctttaacattttttctagagtaggtttgctggtaatggtattttttagtcatttgttatctgaagatgtctttattcttaatttgccctttatttgtggaagatatttttactgggtctgtaattctgtgccaaccattttcccccctcactttaaagatactgtttcattgtctgctggtctccatgttctggttagaaatctatggtcattcaagtaattgttccccaatgatattaatatgttgtttttctctagctgcttcatatatatgctatttgtacacacacatacacgcaagtaaaatcatatcatcttttgttgtcctcagtataattatgatgtttacatgtggttccctttaatttgttcctgtttggggcttaaattcataagtttgtctttctttgaatttggtaagtttttggccattcttctttcaaatatgttttctggcgcaatctctttctcttctccttctaggactccaattagttacaacttagactttaggacactttcccactagctctccatagctctattttgttttctttcaatttttttcttgattttaaggtctgcctctactcactagatgcctgtagcattacataccccatgttgtgacacccaaatttctatctagatttgtcaaatgtctcctgaggggagcaaagtcaaaattagttaggttagataacctatactggtctattttcaagtttgttattcttttctctatcactttcattttgctattgagcccttactgtgacattttgattttggatattgtatttctcagttctaaaatctccttttttttttttttttttgagacggagtcttgccctgtcacccaggctggagtgcaatggcatgatctcggctcagtgcaacctccgcttcccgggttcaagccattttcctgtctcagcctcttgagtacctgggattacagttgcgtgccaccacccctgggttttctttttttttttggtatctttagtacagatggggtttcaacgcgttggccaggctggtcttgaactcttggcctcgtgatgcgcctgcctcggcctcccagagtgctgggattacccatgagccaccatgcctgggctaaattttcccttttttaactttgtggtacataatcaaagagctactttaacgtctttttctattacttctagcattttagtcatcttgacctttcatctgttgatcttttacttaaatattagtccacttttctgatcctttgtatgtccaataattttgaaatgcatattaaacattttaaatattaagggtgtagactctgttttcttcttctccttctcatccttattcttctttacaaagcattcctctgaagaattttgatgcttttgctttagcaggaaatcaacctagtttggttcatactgtaaattttctcctcccttttgtggaatttggtagctcaaaatctcagttcagttctctaatcatttgcaatgttggtttggatttatccaagtcatgtgtagcttagggattagtgtgaaacctgtttgggtggctcaaatatcaggtcagccctgagctctctgctacattggtttttttgtcctgcattggtgccactcaggaggtagtctgagactgaaatagtggttcaaatatcagttgaataacccaagctttgttgatctggtttgagtcagtcccaggtacatggagctttgggattagcctgagacttgagctgttttccatttcttccttggggtctgtcttttctagcctggtccacagaggcagaaagattgtgtctctttctgcacaatcttttggtctcctgcacaatcttccgcacctcttttggtctcctataccattgttattgccaccctaccatacaccaggggcctttctaagggcaaagacaagagagaaaaacaggaaaaaatatgaaataaaaggcttgcacaagttgcttctccaacgtttgattttgtctgctttgagtaatttcagaggccacagatagttatttttttgtgtgttttgttcagttttcacttgtaacctgtaggagagatgggctgtaggcgtcttaaagctgtctcctattttactatgttcctgcattaacttatggtctaccataatatgcatcaagaattgctatttgatattttcttttcccacttttattttttattacttctttcagtcaatcttattcattttttatatatgtacttttttttttgtcattaggattataagaatcatctaattacggtcttgattctttggatcttttttctccaaactcacgaaagtctttctttgatgctagaaaatgagcctgtgcacttgtttttaatatgagcttaaagaactattttccccaaaatataaaatcttctggattctgaacaatatctgaacccaagagcataataaggtgtgatacgactatccaaagactatgcttttccagtacctaaagcagagctattttattttcaattttctgctctctctgtgtttttcatttctgaattttcacttattttaaatggaccatgcattttgtgatttatttatttatttatttatttatttatttatttttttgagatgaagtcttgctctgtcgctcgggctggagtgtagtggtgcgatctcggctcactgtaacctctgcaccccaggttcaagcaattctcttgcttcagtctccctatactagctgggattacagacatgcactaccacgcccagctaatttttgtatttttagtagagatgggattttgccaagttggtcaggctggtctggaactcctgaccttgggtgatgcacctgcctcggcctcctaaagtgctgggattacaggtgtgagccactgcgtccagcctggaccatgcattttggtattttggggtgtgtttggagactattcaatctccctgacaatcaatgtatttcttcaaatgctgtcaacatcctccgatgagagcattctatttctgatcctattcctcttcaactatgagatgttgcctctaaatcaatagagaattgagaaattcctttgcattcttttagtgcagagcaaaaggcagtattccaaggcatcatacaatcctgtctttttcactttgaacacactgggatttgcaaacacccagcaactttgagagacattaaaatcatcaccagcctgaaagtcagcagaaattgctcctcatagtttattttgactatgtttttcctgccctgactttaaacttcactgtgatcccatctacttttgtcttatggaaacatggataaatctattctttccagatgatctttgtttttactcttttggattttggtttgttctcatttatatttctatttttttagttaggaagaaatttggtagatatgggatgtgagtatatagcattaggaatctaaagtccacactcaaagtctatgtatttacaaaatgtcagccatactctttctacacaaaaaacaatctgtacaggcagtaacaaatgaatcaagaacccaaggagagaactggccacatgctcctggaatcaaagaaaataagtattctgactctgtaaaagattctcattggccacagagaacctgtcgaatttctcctttctcttgttttcagagattgcttgtttggtgttggtgtatttccttcagccctagaggtttctgtagttgcgtttaccttagctctaggggcaaagcctttccatcctgtgttacaccttgtcattagtcatatagaggcactactcccattttaagggtcccgtcttttactctatggccgcacaagcatcttccaagggaaatatctctatcatcctccaccaccaacaaggcaactctgaaccatcaaaaactcatcccgaagcagctagtctgcgtccaacgattctcagaaacacagcttaattctgatatatttttaaaacctgatttctcaatgaggtaacgtattactctatttttacatgacatcttattgctaatggactataggcctaaaacaccgtcatagacttgggcaggaagaaacacatggtgtggatgttttgatacatctcagaaattaggagaaacacactaatgagctctctctgctaaactggttctgcacttggcctccagagggcgatgctgcacacactggagcttttgtttctgttgaagatcaatccactgctcagtttcttcttcctgcagctggttgagttctttccagacaaagacaagtgacaagaattagaggtttaaaaagcaaccagattcatctcagcagcttttgtagttttaaataagcaaggagtttctccagcgaaacttcctcacacctcttggtcttggtctcttcagacactttccttcctgttctctggagatcttgcagaaaagagcctgcagtgtttcccttgttcagccatgctcctggagcttatcccactgctggggatacattttgtcctgagtgagtaaaatttctttatggtctctagttccacaggttctgactagaaatgcttgctttttatactgagtctgcactgctttcactgatagtacattgtttttccaggaactgccagagcccagtcagtgacccagcctgacatccacatcactgtctctgaaggagcctcactggagttgagatgtaactattcctatggggcaacaccttatctcttctggtatgtccagtcccccggccaaggcctccagctgctcctgaagtacttttcaggagacactctggttcaaggcattaaaggctttgaggctgaatttaagaggagtcaatcttccttcaatctgaggaaaccctctgtgcattggagtgatgctgctgagtacttctgtgctgtgggtgccacagtgcctgggtctgcagggggagctgaacacaaactgcctatgctagagaagttttcagagtttcagtatatctccctgtggtgttttcaaagatctccttttttatgatggcgaatgaggcaaagagggctaagccgacccaggcatttctatgtaattctgcagttcctgttatgctccatgtcctgataaattttgtttcagaagctttttgctcattgtagaaactatataataggaaatagtattcttgaatgatggaagagatagtattcttataacaatcaagtcctccatgacttaccttgatgttgtctgcattagggggttgaccatgtgagctgtgacatggcctcagagaaaattggttttcatttataatttcatctgtcatctaatctggaaaatagaagatgattttctcatgtttttaccttgcaaatttgttttcaagttggtcattcataggttattttttttagagtttctttttttgcctctaactgtggtatttatgtgtctaaatattttgtctgagtttaaataactctatttaggaagaactgtgagaagttattagtcaacaataaaagagtcattagaatcatgaaggacttagaaaaatgtcaggtgatgttagttccgacaactatttaagaatagtgcagaagaaaaatgaagattaaaaattcatcagtgtttctccaaatactttttcaccgtgagaaaagtagtttcctattcttttagtctcagaaatgctgcaaatctgtatcagaaatttgtggctataatccctttcatttttcttctagctactggcatttctattcattgctttcgccctgttgttatatgatttcagctattggaatattaaagatggattcttataacattttgataatcaatcatgtgataagtttagcaatgccaaactgtgctggaaacactgataagaattacaatgcatggtagagagtcactggacccagtataaatttatgactttcttttgtctaggatggaaagaactgttgaagaagcttttatacttcttgtttgcttgaagccttggagggtagcaagtagtctggagaaaaaggagaaggaggatgaatctttccagctgctacttggctcacgctataatgtattagagggtaggtacgtaggaaccctcaaatatagagagaataagaaaattgtggccaatggtacacgttagccaaatggtgaaccagcagatcagcagtagtttttaggacctagtgagatgattatatgggatagatgtatttcaatgattgctggatgggtataaggaaggtaaatggaacattatagatgtaaaattatgaataagatatgtactcgtgtaatgtcccctgcctcagtccctccattcttttctatttctaaagcacactgtcttctacctttgataagatggctaacttcaggtgactcactgttatcagctcagccacattgcccacagggactgtgatgggcactttatgcgaatcttaaaggaggtaggaacatagaattgttttgttgttgtatgtgtttcaaatgtatgtagaaagttgtatatagaagtcgaatagtccaaggggtggattgatttattgactctcagctccaaattcaccccttgcctcttccgtgaatgtggatctgtacccttcaactatgttccttgccagttggcataacgttatgctttgccagtagaggatcagggagaaaagattttgatttttgctttctgtgtgcacatgccacaggttcctgcagcatgagaggcttctccagcgtccggctcctgcagtgcacccacaccaggttcctgtgctgtacagtggccagcagtgtcctccagcacttccatttttgcgtggtactgcagaacagagcctgcagtgagacaccttcctgtatccagctttccccatattcatccctagattcatgaatcggcaccctagattatggttttctggtaagtatgagagggtgaatttctctgtagaaaattcacagcacaacagtgacttctgtgtcatctagtgagacacagttgtgcctttcccaataagatctgggtctcacccctggggggtggggctaggggtcccttcttggggtgttgtacccagccctaggagtagggactgcaccttatatctgctattcctacaggaataggaatagcagagttttcttttctttgtattacctatttccttgttactctaaatcctgttataattaataattttttatattaatattaaattttcctataattataaaaagcattttctgttcaaattattatatggtctatctttcctgattggaccagatttatacatgcaccaaggatctcaagccactgaagagcatctccccacccagtcacctgacaaatctagttgcttgcttgttttatttattgctcatttgttttatttatttatggtttattattttacttatttattgttttacttatatgattacaagaaactttatgcaataaagaattacattaagaagaatttggaaatatgtttttatattaatgaaattaattttgatttttcacattttgtgcatgtttgacacaaaattttattataccattgaggcaaattataattccttttaaatgtattttagcttacaacacaaattgtctttcattcactaatgagactgtgtctgaagattttaaattccaagtcatttttcattcatctaactctgttaattatccttatttttgatttctttaaaatggagggaaaagaccatgataactttaaaacaatctgaagacagaatacttctaacacccagaaagtttttgtgtgtgcctttccagtcaacccaccttctggaggcaacagatgttcatatttctagtattacagagactttaaccgttttaaaacttcgaatcaatgggattattcagtaggaactctcttctgcctggtttctttcactcgtcatgttctggaggttaatccgtgttcattaccgtaattgttgagaagtttcctattatatgaataaagcacaatttatttattcatttggctgtgcacaccattggctgattacagaatcttttagggattaaagctttggtagcattcttttttttttaattagattcaggggttacatgagcaagtttgttacatgggttcactgcgtgatgttgaggtttgggcttctaatgatcttgtagtgaacgtagtaacctatagatagttttgcaacactttaccctccccccatctcctcccttttggaatccccagtgcttattgttctcatctttgtgtccttgtgtactcaatgtttaactcccacttataagtgagaacattgtgtatttggttttctgtttctgtgttaattcccttaggataatggcctccagcttcatccatgttgctgcaaaggacatgatctcatgctttttatggctgtgtagtattttgtggtgtacatttaccacattttcttcatccagtccaccactggttggaatttggtagcattcttggtgcaaggtataggctgtcctagatttttatatgccgttcaggcaatggtagggtgtgtctctgaagttctatagttgaaatccatatcttaaatacttttatttaaaaaccaattcctaaatttcattatgctatttaacatgtcactaatttttctaataaaaacccaatatctgatatttcctgtgctacttataaaagcttcaggtatcattcaagctgtgggtagctgaactgtagtttcctctgttgtggccttacgtgttgataacaacagtagctgaccgccttggagtttgctttcttgactaagtgaattgactctccttagagttgagacttaagttaaccagctcatgcttgatattctgtggtttctgttgaaaagatttaatgtaaattatataacctagcactttagtatatttattcttacttggtaacatatatatatatatatatataaaatgaacaatattttgataagtgttcctgcaaatcctgaagatctataagtcatgtaattataatccttgctcaacagtcattccagagaactcatttaatatttagaggcattttgctatatacagtacatatgaaaatattttaaagcttgttaggtaacttataaaggaaatttcgctgttatttaatatcacatatgcagcacatccaatacaaatttccaatcgtttaagcacaataataaagttgtcaagataattagaggtctgtacagaattctcatggggatatctaagacaagggagcacttttattcaggaaacaagtgcaccaaaacatgagtgtaaaaggtagaatgttaagatgctgaagatactttatatgtatatttatgacttcaagttgctctgtgtgatatatttcatataactggatattaaaaatttaccttcacattaattttctagagctgccatgacaaataccacagacggggtggcataagcaacagaatctgtttttctctcaattctggagatagaaatccaagattaaggcattggcagggcaggttgttattgaggcttgcagatggttgccttctcaccgtgccttcaggtggtctctcctctcatggtgcacatgtctgtatctggatttcctttcttacaagaacaccaattatgttgagttagagcccagctatataacctcattttaccttaatgacctctttaaagatcctgttttcaaatacagtttcattctgatgtactggggataagggcttcaacatgtaaattttggatgagacacggtttattctgtggcaaccctccagggaaataaatatcaaattaatgaagaagacaattaaagcctctcttgacacaacactttgctaattgctggcgcacacaatgatcatatataattttgatgatgaattttccctgctttcttttgtgattctagagcaattagaaatgtgcaataacagatgcagatacttcctaaatatttcaaattgtaaaggaagtagagagtacaatgataaaaatgtaaaagctattatttagacttgccttctttctctctgctacattaggatatggaattttctcatgttaggtttgtccttttctgcagctaaatcttaatttctttttggttttccatctcagatagttttcctttctttctctactcttttctgtatgaatgttgagttttttaccttgtcttttttttcctctctcttgtctctgatctcaactttgccagagctattttagcagactaacttgctattcttatcttgcactactcttttactacctaatcagcagaagtgacatttaaaagaagcgaaaaggattgaaattcttttggaagttgtttatggcaggtgcagtgggttaagtagatgagggaggggtgctatagtccttgaatacagaggcagcaggaagaatcccatcctatatgctcagctttcttggggcttgttgtctgttttttcaagcagtatgtggcaagatttttaattttgattgaatcatagtctttttaaaaatatgtttcgattactgatacatttggattcattttaacattttggctctgctcagcatgctcttgatttgttctttcgtgttttagtctgtcttctgttgcagtgatagttttcttttttctttctattgttttagaaagtgtaaattgtattttttgttcctaaaagtatccttatattatatatgtatacatatatataatttttaaatacccaaagttgttattattttttcctgaagttattccgtaacattttttccttgtatgtccccctctttctccttgggtatatttttttctccttttgacttactgtctttagaattacttctgtagctaattggaagaaactatacacatactatatatatgaagacagtaattttagagtttatcaaattagccaataaactagagctccaatgcacactaacaaaagtaataaaaaagaaaaccattcaacacaataatgggaacatgaattcattcccttcttcctcagagcctttgcccgatcttccctctgcccggagtgcttttcactactagccacactgatggttctttcactagttcctagtctctgctcctgaagaaacatgagcacatgtgaataaaaagaggaattctttaaaagctttattgccattttacattttatggttaaaaaacaacattttaagtgttgatcaataggagaaaggctgtataaactgaagtatatccctaatatgatgcagtatagcagaaggccccatatgaattaatacaataagacctaaagatttattattgagtttataaagtgagttacaaaaaggtatgcacaagatgtatcatttttattacgttttaaacctataaatgaaatgccgtatatttcagctgtttcatatattttgtatatggatgtagatagagcatcaactccaaattgattagatgaaacaataaaggtaataagggatgaacggactagaactgggagtagtggtcgaaggagattttagtctatctggaatgctgtattactttaaattatttcatatatttgtgaattctttctagtattaaaccaaaaaaagtcataaaagccatcacaaaggtttatctacattttttccttgtctactcatagaaaaagggagagaggagaaaacgatcaccttcttcattagcttttgttcagccttcctacgtattttttttctgcctctgggatcatacagcttctagtttacactcctcttaggttcctactatgtgatttatattatagatatgtatttttgtccactccagtagaccataaaactaatattacatctgcttttaagtattcttaaaacctaataaattattcacttagagtaaaactttaatacatgtttttggacttactttgaactaaattaaaggaattaagtgaagagtacaaaaagggaattgccaaattaagatactgatttccacgaaatgacattttaaagtggtaattggttcattcttaatccccatccaatctaggcagttgtattgttttctgaccacctccatttccttcataggaaacagtaaatggggctgtgtgtgtgactactgaggaattagttggtccgtagtggtttttgttgatgggttcagtccactagggggcactctaggatttccagaaatgaagactttttctgatggtcccaaagggtggaacaattaaaagagaagacaagggggcatgtgagtcagtcaaatcacagataacaaggaattgcagtggaatggggggcagtgtgtgtgtaaagttcatcttcggttttcagctctgacattctatatagaacctcagaaagctggagttcataggtctacgaatccattgtgaggatgattctataagcagaggtaagggaattggagttttactgggaattgggaggatggacactcaatagaaaacatctctattacatattttcagtttttaaatttttatgactaaaattcctgaaattcactggcatggaaattattccaaaatacccctgatatctgatttcttcatatatcttctctgagaccaaaaggaacaagaataagcagaaaagaaaaaaataggaaggaaataaggaccaaaaccagaaagagaatagagaggagaatatttaatttggccagcagtatgtggtctgatcgtaacagctgtgtgggcctgcagggtgtgtagggaaagggttggacagagtgggagaggtagaaattaaatcagggtggatatcatacacacatcctatttttcttttaaccaaacaaactctagttggaaacattttctatgcagacaatctcctgatttcaagaaattgtatttatttctaaatccaccatacatgctaccagaaagttttccttattaaaattttcatataattgaattttgcaattttctgtccagctatgtaatttgggcttcccatgattctttaaggctctactttccccagctgagacacggattcttctcagacgtatcatcctctttcttcacatactattctacaatttctcttatataaagtactttaaggaaaaaaaaaccctgtaacttcatacactggaaatattgactcttccccccttgcactattcacacccagagttttggagagattactgtgcggtctcaaaggccactgctggtggagtttcctattcagatgaatgacagagctcaggtgtgattggtgctcagggagtctggtgcaaactattgactgtaagaacaagtttgtctggacccaagacttgaccccttccagagcagcggcaaaggcaccccagcaaccaggcaaggagccatggagaggagactgggagctctcttggggcttttgtgggtccaggtttgctatgagttgggccgtcctagatgggggctgacaggggaagggagggaagggagagctgacacaaatctcctggactgtcctacagcctcataagtgtttctagggatattttacaggcttggaaactgcatcagtgattccttagtgacataatacatatttgcttttctctttccaagcaggggtgagacgagtgaaggtggagcagagtccttcagttccgagtctccaggagagaaccagctctactctgagatgcagtttttctacctctgtgaacaacgtgcagtggttccaacagaatcctgggttggcctcatcaatctgtttttcatggcttcatggatgaagcacagtggaaagttatggtcaaaaagaaactgaggagctctgtggtaccctacacatcacagccgcccaactgaaagactcaggcacgtacttctgtgcagttgaggcacagttctcccaggaaatctgcagcctggatccgaactgcagctgggcctgcagccccaaccccttccgtgagagaggcatgttgcccccacagtatcacttgcacagcttcgggttttctgattgacgttgcgcttttatctctgctaaaattagacacttcaggattgccatttaacttttttatcctacccttttgctctcagaaatctctttgcaggaaaaagctttgatatggaactactggagcaacttttaaagatatcaggacccaatgtactgttaaaacagatcctctagcaaagagcatataaattacatataaattactgtgataaaaaagatttgaaaaaatatatcctggtcaagaaatagcaaagagcatataaattacatataaattactgtgataaaaaagatttgaaaaaatatatcctggtcaagaaatagcaaagagatgactcaatgtttcatccaaatgcatgttgttcacttttctagtaaaagggaagagagcatgtgtgatgtatattatatataattttttactcctggaacccataaaagataaaattttaaagcacgtaacgtcattggatgtcagacattctctgaatttacatatattatctgggtgctgacaatacctctttactctacacatgaataaactgaggattatagggcacacatgtcttgcctgagctcagatggttatgaaactagcaatgaagctgggctgggattctccttctcgatgtttgaaagcagagtgtgtactctaagctacacacaatagaagacccttgagaatcacaaaataccaattatttcaattgataaatttgtgcaatgtgctcacatacatcactggcaaatatatccgttgggataatttctaaattgcatctagtaagaaagagttcattaaacttttcattttgttacattaaaatccatttttcttccttgcattactcatgattttgtaacatcattcaaggtctcgaaaagagaacagaaacttctagggttgccccccaaaacttacctgctgtagccgcagtccaagacttctgagaagcaaagccaaagtttaaacctaaatgtggatcagttacaacacatgtagaatttcagccttacaaggtctgttatatgaacgtaagagaatggactaggaaggactggggccctgagaaccaagatgaagacaagctggcagtctccggtgaagctgggagcagggccagcttcctgggtatgtgatctgttgcagcccacaggaccctagttaatgctctgctatcactgccttgacatttttaatagttttgtttttaaacttgtgtgagtaaatgaagttcaatgagaggacagagcatgtaggtgagcagaggagatacacaggacagcaggacacaggacagaatcatatgcaggctcaggttcatgggcacagtgggcagcatgtgagccgagcagttggatgggctattttgagtgcatgagcacacagggctctctggtgttttgcggctctccaaagtgagtggcagtaaacttttcagtaaattattacacaataaaagcatatacatggacaaggcaataaggtatattggagagttattagaatccttcaaaaagtttagagactgtggttttgaaagttgatataacattacaatttggatatctgctggtttagaaatagaaattacatgtaaggatagcagcttaatggaaaagagcatcattttctcaccttttaatgctatcttcttttgtttttttccttaacatcttttttttcaacttttattttagaattgggggttcatttgcaggtttgttacaatagtatattatgtgatgctagagtttggagttataatgaatccattacccaggtagtgagcatagtactgaaaaggtgatttttttcaatctttaaccccctccctctgtcccctctcttgtattctccagggtctactgttctcatttctatgaccttgtgtgcctaatgtttagcccctacttataagtgagggcatgtcatatttggctttatgtttcagtgctagttcacttagttatcctaagttatcctaatggtttccagccacatccatggctgcatagtagtccatgttgtatatgtaccgtgttttccttatcaaatccactgctgatgggcacctgggttgattccatgtctttgctattgtgaatagtgctgtgatgaacatatgggcacacatgtcttttggtaggatggttcattatcctttgggtatgtagccagtagtgggattgctgggtggaatggtagttgaactctcagttctttgagaaatctccaaactgctctctatagttgctgaactgatttacattcccagcaacagtgtataagtgttgccttttctccacagcttcatcaacatctgctattttttttggctttttaacaaaagccaaacattgtggttttggtttgcatttctatgatgattagtgatgagcattttttttcatgtttccacttgtatgctttttttttttttttgagaagtatctgaagagcattattttcatgtgaagttttgaacagccacgttttaacatagaggataatattgaaattaattaactttttttttttttttgagacggagtctcactctgtcgcccaggctggagtgcagtggtgcgatctcagctgactgcaacctccgcctcctgggttcaagtgattctcctgcctcagcctcctgagtagctgggattacaggcccctgccaccatgcctggctaattttagtagagatggggtttcaccaagttggccaggctggtctcgaactcctgacccgtgatccgcctgcttcagcctcccaaagtgctgggattacaggcgtgacccaccgtgcctggcctgaaattaattttttaataattgaagatacagtgataaaattaataaacaaggattttgaattatatctatatcattaagccatttctagtttcttatacagcttccacaagttactaaaaatttcagaggaaacattaaaacagcactgtgtaaatttacattgaaaactgagttcagacgtacataaaactgatttgtggtaagaaataaattgttttagaaaaattgtttcacagggaccatcaaccactgatttactaaaatttatatttcagttaatccatcagataagtatgctaatgttgtcacagtatataaaatacttttaagagctccagtatcagttgcatcagcagaaatatccttctcgcagttagaaatgaaaaattctagttaagattttgcatttaataagagcacttgatattgctttcatttatatgcttgaaaatgaagttgctccaggcatgaattttgctaacctcataaattaatttgcagcaaagtgatccataaaattttattaatcaagatatcatattaaagtattattatattaatttatgacaccaaatttttaaaccaattttatgttttttcttatgtatcattataaaccctattgcattttataagtaataaaatattttaagaaaaaaactttacagtttattacctaatggctatttttcctgccttttgaataagaaatcctaaattttcgttttgcactgagtcccacaaattgtacagccagcccagctgggaatcttgaatccccaaactaaattttgaaggagagattttgaagtctgaaagcaatcaggatgtttgagaaagtgccttttgctttacatattagtaaactcctatacttcttccatgttctccaagttgctgaggtgtgtgtgtgtgtgtgtgtgtgtgtgtttcctttaagacagacatgatacgctataaagataagaaatcgatatccagaagggagaatcctgcctccctatagcccagccatggtgtccaccctcatatcactgcttgtgatggcctttatacttagcgagtaaagtctcatttgatttcattttactatggatttaggcttccgttgatctaccatctatcactaatgttgtaggaggaatgaaaactcacataggaactcatctggaggaccttgtcttttcttctgaaggggcccaaggattggttagggtaacctcagacccactagattgcatattgatgtgaaaatggttttggggttccatgatgcaagacaatttctccttgcattcccatactttacactgtacacaactagtccttaataaatatttgctctgttaaatagaataaaataattttacagctagaaaagcacttagaaatcttttagtccaatttcactttacaaagagagaaaccatatccaagatgccagtatggaaccattagatgagccgggagtagaaagaaactggatttcctcccttcctccttcgtattgtttcctctgcctcattcctgcaggaccacattgctgagcaaagagaaactgaggaaaatccagccactttgacctctgcagtttgggtctgggaaagacttggtccaatcagtttgaccatgagaatggagagttccaacttgtgtaagtaaacatttgccactttgggccacagagatactcatgaggctgagccattgttattctaccagcaaatcagtccatgactcactggcttctgtaggagtgagccaaaagtgatggtgccatcctcaacccctggatgtatttctgagaattttcctaaaaatagcaagatgtgtaccttatggtgggtggatattccttgaaagaaggatgtgaacataaggagcatcactctacattgtttaaaaatgatcactgaaattgggaagctaaggggaacattgcccctgtgtagctggcagttcatgaaagtgctggaaaagcttttccgggccaaccctttgataatgagtctggcaaaaaacgaaataatcaccaggctgggaattttgtccagggcacggctatattcaaggtacagttaatatacggaacgctgtgctccatgtgagtggtcatattcagaccattacattcagttctggatgtcgtaactcaaaaggacaaatattaacctatgtatctgtctccaagaagaaagtaatttgctcaatgaaggatttgataattgtatgaggaatgggtgagataactgaagatccttagaatggagaaatttcatatatgtaaaagcacacattatatatatacatatatttatgtattgagttgagattcttaatcatagctgtctgtaaatatttaagggtgtgagatgtgaataaataattagatttagtctctataactccagcagactagtgagtacaaatcacaggaaaggggctttcctcctggaaatgagaaagtcttggtttcccaggtaccatttctcatgatcagtattttactgtcagttttctatttgtactattctgctaacaggcacaggaaatatttagccttccattaatttattcttacagaagtaattttaaaatttcaaaagttaaagtagattagaaagttttttttttttttggcagaaacagataaacctggaaacatacaggactgaaggactttctcaatatcttggagaaaaacattatggtggagtttgggagaaaaatgatagatatggaatctgtgccagcaatggctgagacaacagcagttcatgacagaagagttgactcatactttagaggaaattccactaaagatatgagtcagtcactgtgtttaagcacatatcatattgatatcatccactttgatatcaaaaaataaaattatctcaataataaagttacatatgcttacattttttgaatctgcagcctgatgttttctgagaatttcttcttgttttttcaacactttgcagaaagcaagccacatagccataggaaaagacttcttaaaacatgccagatttctccttgcaaaccagcccagtctatgggtcaaactattcctattgttggagtattaataactcatggaacttgtccccctcctcctttatcattgtactttaattctttaccttttattaaagccatctttactgaagaaatattcaacattttgattgtcggtaccgtcaattctctgggaatagcaaggtcatggcccaggcttgagaagcagaacctgagataatacgcactcgaaatattgagtggtcctctctctcttgctctgatctttggcttacatattgcctaaagaaagagttttcttcataacaaacgagtcatgatagtagacttaacctaaaaggaaggcattattttttcttgtttatgagagcgaattatggtattttcttaatttcaaacataaactcagcccatcattgaataaatatcaacagcatctacttctttataatttatgaataatgactcagtagtgtgcataattatagagttagatctctacattcttactgtgcatttaatctctgattgaacacccagtctgtttgactcattgctgcttttgtgcacctgagtgcctcatagggttagagaaaaacattcaaccagcaagttcagtagttagggatgtggccacaagatggcagtgctcctctgctgaggcagaatacagggttcactttagtgtgtcctgaatgaataggtttatggtagcagcagagcctttttcttattggttggctacacagtgtgagaaacccctatggctgccagaggagagaagagacaacctgatgatagaagtaactcttataactggaggttgcaggtcaatgactgatcttaattgggaagaacaaggatgacatccattcgagctgtatttatattcctgtggctgcagctggactgtgagttgagggtatttgggtaacagagtatattagtgaatattcttcagcagttcaaagaggagacttgctttattcaggtttcctctcgttactatgaaaaataattctagagagtaatgacctaacaatccctcttctttctctgattttttctttctgcatagtggtgaatggagagaatgtggagcagcatccttcaaccctgagtgtccaggagggagacagcgctgttatcaagtgtacttattcagacagtgcctcaaactacttcccttggtataagcaagaacttggaaaaggacctcagcttattatagacattcgttcaaatgtgggcgaaaagaaagaccaacgaattgctgttacattgaacaagacagccaaacatttctccctgcacatcacagagacccaacctgaagactcggctgtctacttctgtgcagcaagtacacattgcttcccaggcacctgctacccgtacacaaacctgagactggagctgaagctgcaccccctttcctttgtcatagatcgtcaattatagcatttgtcatattgtttgtttgcaagttgaaactaacatattgacatttaaagcatataataaaaaggttaggttcaatgtttttgtatttttagtagagactgggtttcacatgctcagctaattttttctatttttagtagagatggggtttcaccatgttggctaggatggtcttgatctcctgacctcgtgatcctcccgcctcggcccccgaaagtgctgggattacaggcctaagccactgcgcccagcctaatttttgtatttttagtagagacgggatttcactatgttagccaggctggtctcaaactcctgacctcaagtgatccgcccgcctcggcctcccaaaatgctgggattacaggcgcgagccaccgcaaccggccctatcttacacattcttattagtagattacaacaggactttggaccaatggttaatttacagacagcttgctaaaaatctccctgcctcattttcatgttttgactggattaaacattactaccacaatttcttttaaaagagttatatcttttagtgttgtagataaatcagtggaaataaagaaggtgcataaataattaattccctatttctcccacctgtggtcaagagtaggctaatttcaagatctcttgtattcttcctaaggatggatctaatcagcagttggaatgggagaacaattcctcctggctgagttttggctgttatggcttgttcttatagggaaagtagttagattaaattagggttaaaacagctggacaagaaaggtcagctgttccttgtctcttccggctctgagggctgcctgcatttcttggcttgtggctccatcactctgatctctgcctctatggttgcactgcttctcttcttctatcatctccctctgcctccctattataagcacacacgtgattatatttaaggcccatataacataggataacttctcatcccaagatccttaacttaatcatatctgcagtgtcttttttcccttggctatataagataactttcatggattccagggactggggcctaacttttttggagcccttattttgcctaccacagttggcatgcctggtgctatctttttcagaagttgagaaagaaaatcagagttccagatagaaaaatagaaaccacatcaattgctttattttattttctcagtttttacaattttcagtttttaaattatcacttaaaaaggaacacattttgatatgcagttcaatgtgtgaaatttgaattttgatatattgcatagtttgatgtaaccattacataactatgatacgaaacagattgctcatcccaaaaactcccttgtgtgatctgtgtgaaatcacacctccatctcaaactccttgcaaaccttggtctgttcttttatatttttatttttttctggaggtcacatggatggaattatacaatatataatcttttgaaaagtctgaatcttggttacagaaagcacacaccattgggcacatacatgatcatcatctctgctaccactcttttttttctatacctgaatgttttaaacttttgtcattttacaggaataactcaacatttcaaatgtttgaatttctttggaggtttgatttacagtttaaagagacactatggcaagtatagtgtttaaggaaacggtatggcaattgataatggagaggttcagttgaggattgaaccaactcctagaatcagagttaaacacatcaagtttagttgtaccaacactaccctaaatttttatcaatagatatttctctaacattttaaggctaagtgtattgaccgaaatgtattttagtcatattaattgggtatggttaatacttggattttcccaggagttagcatagaatgacatatctcacaattatttaaattttttgcactagctgtggctttgtagaggtgaaaagtgttaggatggttattacctcaagtaaagcctgtacctaagcaaattgttttattaacaaaataacaaagtggaaaaaaattacaaatatatgcaacgttgtaccattagagttgaaaaataccaccaaatggatgaaaaagaaaagaatgcaaagatagtataacaaccactggttccagtcatctagataatactgttcgattatacttgcatggagctgtctactttatccacttatacatgtgtttcaaggacctcgagtctgcactcattttctgaaaagcccctaaatagtctctgaagaaattcagtttaatatctgtaatatgaataacttctcaattcttgccatttaaggatggataatgtcaaactaattggtacaaagtaaccacagatcaattcctcgtactttaactgttgaactggtaataaacagtacctaataaggtcattttcacaaggttgaaaggcagtctttctctggaatttttttccaaataccaactcatccaagcttaggtcatgtaaaggctgattaaatgaaaggccaggaaagaaaactgtacctgttggtataaggactgagtataatgggtttatttatctagataagtttgtgaaagaatgaactatataggattccagatactaggagtaatatggacctacaagtcaccagttgatagtaagacaacctatgatggcaaggtgaacaactcagggccatgaaagtgaagggtaataatatattagatcatggaaattcaaggatgtctgataccgtaattaattttagttttaatatttctcatgtgttgtgtcttcatttatagaggataaggaggtgataagaaaagagaagttctgagtgagggcaaagcattatataacttcccggaaaattgtgttcccctatatatagataatttgaagtgtcacatattcaactgtttccttaggacagtattccagttcatattccatttttacacttttcatggaatcttataggtttcaaaaaaggcatgaactggccactttctgtgttctcctagaaaagttttccccaactatttgtataatattgcagccagtacatccctactgtgatgggctgtctctggaaggttgctaaaacaagtattcactggagatcatttggtcccaccaggcagcctttctggccttgatatatcttatcctcactgatcaaacaaatcaataattgatccaagatgtagttactaaaattttccatggatttttctgcatgttctgtaagaggtacttgcatgaggacgttagtcagaaaggcatgtttagcatgattctctgctcatgtatttcttcctggcttctatagtgtctttcctactttggaactttgtctttctttgagtagtatcaataaatcaaataattttcgtatttggtatctattttatagcgatacatgagatgtatgaaaaggttaagaaggttaagaaatctcatcatctccatagtatttgagagttgtgaactatgttaaaacatataggctatcactgtatatatttttcataattggacatagcaaagagagagccacaaattcagttactttaatttgttttgcttcttctaaggaattagattttataatggagtctggagcagtaaatgcattataaaccttgtgttatttcttttcagttttgaagataagacattaaaaacaaaattaattcagaattaggtatgagactgtccaaaatatctgttctgggatggacacttcttgagttacagaaatgcaatcataagattcattgattgagaagtgtaatggagttaaacgctatgaggagaaattaataatattgtatagttagtccaccaactggtaaaaaaatggttgtttttacagagtagatcatttgtgctgtatgtggcatcataagacttaatggtgatttcagtgaaagatctggagatgcttcaacaaatttagacatagctgaaatcattttaagacaaggaggataggttgtaatcattataataagaaataggctataataggcaatgggtctttgttgtttttaatgtaattgagtaatatccctaggacatggccttactgctaatattcacaaaacgaaagccttatcacaatcaattttcctataatagtttttccttgggagacgtatggagacacctaggattcatacctttcagcagtggatgtacagaatgtaatggcttgttatggctcatttggggtcccagatgacataataaaaatgcataaattcaaaggtttgataacttaatgatcagagtctggtgtctaatatggcctgtataaacagagctgggctgtctaaactaacttgaaaaaggaagaaaacttttaagataggactcaatgtctgagggcttcattctaaactctcagaaaaaagagattagtttttttctgcgtagaaaagagaaagagagattagtttttttctaccgtttgttccccagataagcaactggacagactttgggaataggacaaatattgctatattaacatgtaggtccgatgatctgcagtgattagtgcaaacagcttttccttcttagcataatgtgattaatttctaccttaggagaaacaacaacatacatagatgtgaggatacataattgttacatcttccgttgccttcattattcattacatgtagtattttaaagtaagtgccaacctctcaacctcattgctcagttccatcacagatgcaatgactgaacatagcaattggtcgaattatcaatttcccttctaacccgaccatgtttattttcatatttaagttatttattatcaaattaagggtgggtaagtgcaaaggaagtttgcattgggtgaggttcttagccagtacatagagaagtgttagataacacaaactagcttgctacaccggaaaacctccgtttcctattccagggcagcagcagcagcagcagcacatagtccagtaattcttctcttacttcatcagactcacctcacaatgcagagccctgaattttaagaagaacaaaatatattctctctagagaaagaaccaaacatgttgctctccagctgcctgagggtggtcacagcttcaatgtggctaggtagggatgcccctggtgggaatggtcttcctctaagacccaaggactgggaaacgtctcatcaaaactttgggacagaagaagtaacagggtgtaaaaatagaatttctttgttccacatcactcatccctaaaccttttggttctttgttttctccttcagaatctggttttgctgagaagtaactcaaattaaaccatcagtattggtgcatgagaaggaggctgtgactctggactgcaattatgacaccagtgctggaagttatagtcctttctggcacaagtagcccaggagtggggagatgattttccttattcatcaggactcacgatcagcaataagcaatgggtcactactcattgaatttgcagaaggcaagcaaatccatcaacttgtcatctccacttcacaactggagaactcagtgatgtgtttctgtgcactgaaagaggctacagtgagagaactgttggagtgaggtacacaaaatccccaagggtctgcttgagacatccacttgctggagagaccaaagaaaggattcaccatcacagacaggaagtggctatggttgtgacagcacaggtgtagcatcgggggaaaacactgtaagaaaatacctctctaggcttatagaccatttccagaattatcattcatcaaaaacatcctaatccctgagtctttggtttgaagttagacacaccaaaattttgaccaatgattgagagaaagaactgccacaataagcaatttgccatctggccactagattgagctggaagaattggctaaggtaattcagaaacatatgactgaaagatgaataaaaacaaattcaacactctttgtgaattgttggattttcagatcagtttattcaataaatgctaggtgtcttcaaaaagtttatggaaaaaagaaattgcgtattatgaaaaacggtgcatggatttcaaattttctggcaccaaaataaacttatactaagttgttataacatatctgaacaggatttagtttgaggcactaagaaggataagacatcagtttgaaaggagcccctatcagagcaacatgaattctgttaaacttgaggcaagaacaaacatcaaatttatggtgaaacttgggtggaagaatggtgaaatcactgatgctttatgaaaaatttataggctcaacactccaataaaatcagccatcctcttgtctgtctgttcttaaacaaaatggataatttgtttaagaatagacaagaggatgccgatgaagcccacagtggcagacattccataacaatttgtgaagaaaaaattaaccataagtgccctaatcaaaaaggacggatgattaacagtggaaacaatagccaacactataaatgtctcaactggtttagctcacacaattctgactgaaaagttcaagttgagcaaactttgtacttgatgggtgccaaaaccactatgctcagatcagctccagaaaagagcagagctttcaatgaaattttgaataagtgggataatgatcttgaaccatttcttcaaataattggaacaggagatgaaacatggctttatccttttgattctgaagataaagcacaatcaaagcaatgattagcaagaggtggaggtccagtcaaagcaaaagtggcccagtcaagagcaaaagtcatggcaacagttttttgcgatgctcaaggcattttgtttattgagtttctggagggccaaagaatgacagcatctgcttattataagaatgtttagagaaagttagccagagctttagcagaaaaatgcctgggaaatcttcaccagagaatccctttccaccacgacaatgctccaacttattcctctcatcaagcgaggagaatttaggtttctgtgggaaatcattaggcatccccctcacagtgctgatttggctccttctgacttctttttgtttcttaatcttaagaacatctttaaagggcaccacttttcttcagttaataatgtaaaaaagactgcattgacttggttaaattggtggctaatcatccagtaagtaagcaagaagaatacatattcaccgagaataaatatgtatcccctatgtgtacaacgtactgtattaggacctttgactatactgacagtagtataaaatgttactcttaagcagaatgaacttaccagaaaaatcttgcaaatcaattgaggaataagatgaaatgcatgaaaacttaaccaatagataaaattccaagtatgtgggcaattaagttttaggggtatttttaggagaatagtgtggcaccgaaaagacacaagtaagcatcatggagagatagaaaacttaggcattaaacgacagacacacattgaattcattcattatacacttacttatgaaacacacaataagcaacaattgtttttgtaggtatgaagagtagaataatgaataaaacagacacatgcagacaacaaagaccttccctcatgaggtttagatctacaattgtctatagtgttcccttcttttacaggaatatccaatataggtatttccaatatatctgtttcactataggcatttgtcttgcctattctagtgattggcaggttccatgtgaccattacaaggcatagtcactgaagtactattaatatatctgtcatttactaaattatttgaccattgacaaaattacttaaactcaggccacctagacatcatcaattgtaataacaataacaatcacctctccacatagttgtaaggattgaattaaatttcatgaatttaattaaatgattgaattgtagtggtagggaacaatttctcaccaatggtagctatacttggatataaatgagatattgcaacaaagacaatttgaaataaaataacaagaaaatttaaggatagataaggcttaaccctctactctcctgctattggttatattattatattttactatatttaggactgagagtcactatttcacactggcctgattccatccaattatttgaactatttctttatctcataggccttacgggtagagaatgaagctttcttgcttcaggtataacttagtgtaaattctatgatggattcacatgagcgttatggagcaggagtcagatatacaccattttatactgagctacagtgccaataactagatccataactgggagcttatttaacagagctctgctctgggagaaaataacttttctaggtcatccttgggggaggaatcctttttagttattcaatttacaacttgtacatacatggtagatgcccaggaagtattacagaagaaaaaaggaaagagaaaaatctaagggacaaatgctagatgcagctgactgagaatcagcacctggttctgccagggtcctttcccatgctacctcttcagagatcagagacagctgtgcgatctgtgcatgggggagtaaatcttgtttctggctggatggggagactctcagcttcctacaacaaaactatgaatattcactcagagaaacaagagatttggcttggtagtgtttgagggctcccaggccccagccagagtcctccgtgagtctgagggataaaaatgaagaaggctttgggagtttcattcttgattttctcttgggagctgtgctgtgagttgctgggctctggaaatatgaaaaagagcgagtgtagtatcttatttaaaagtctggaagttatagaaggttggttaaggcctcagtgctcacctgtgggggctgtgaaaagagagcatatcttctaaaagctgtcagccatgaatgaatgtcatctgtctgtgcttctctgtttaaacaggggtgaacagactacatacgccggagcagagtccttcattcctgagtatccaggagggaatgcatgccattcttaactgtttatgtgtagggggaactttctttataacctctgtctccaaacagaagtgaagaataatgcaccatctctcatatgtgaagaagctgaatttatatggaattatgtttccttttgtcattattgaaatttcattcctcaatgtagaccatacagatcctgggcctgcttgcccagagtccttccactcctttactgtttgctctgagaggtcacagtctctgagtccatggagcaaagtttcccctggttgtacacttagcagcatttaacttatattttcataatctttaaatgatgtttgctgtatctgtgtatcatctactccataatttacttaatttaacattaaattgatttctctattaaatagatgccaaaaatatgtaaaatattgtccttactttaatagatactatcagtgggaccacatatatgttataaaatgtgcatttgatgtgcaagatattttttcctaatacaaattaaaataatgttacatatataacagtcagaaagaccatctgtgttctgcctaatatgacctcctgtatcaatcgcactttagaaaatacatttccagctcatgcccctcatttgatagatgaaaaaaagcaggctccacaggcatggcttcactttactcaaagcatgtgttgcagtgaaatggaagcctggagtagaagccaggcattctggccccttgtcagttgctttttccatgaaagatgaaaagcgggattcggtgtttgagaaaaggagttgtgtgttgtaattttgaactaaattacatttttattacttatatgtatatataaagatataaaatgatatataaagacataaaacacccagaaaaatagaacacacctataatttcataatcaagaaattataactattatcctgtaaaaaattttggtatacatatgtagctattttttctataaaagtggtttgcaatatatccagtatttattaccatgcttgtttttctcaacattatgtttaggtgttttcatccctggaagcatatattgaaggcacagttttattttattttcttttattttcaacctttattttagattcagggggtagtacatgtgcagatttgttacctgagcatattgcatgatgctgaggtttggtgtataaatgatcccatcacccaggtactgagcataataccaacagttattttctcagtccttgccccttttctccttccccctctagtaatgctcagtatctacatgtagtctttatgtccatgtgcactcaatgtttagctcccacgtatcaatgagaatatatggtatttggctttctgtttctgcattgatttgcttaggaaaatgatctctagctgcatccatgctgttgcaaaggatatgatttcattcctttttatggctgcatagtattccacggtatttatgtgtcacattttctttatccaatccacttttgatgtgcacccagagggcataattttaagtgattgcctagtttccattatatagatatattttaaaaaatttatcacttttggtattatttcctcttatacagtgttatagataatgcttcttaaaaacataattaaatttgtaattttaatggaaatagagttgcttgaataagggagaacatataacactaaatgcctaatgttcctgaagatatatttcaccaaagtgtaatttcaacagcagcacatggtgatgctgatttttcaatactttatcaattatgaccattattatcttaaagtagcttccattttattaataaacactttagcaatgttttagttttcttttaaagtgtgagtttatatattttattattaaaaatgtgatttaaaaacagagtccatcacatagaatattctttcatacaataagattttttaaaaggtttgaagaatactgttctggcccacattaccttctattaggctggtgcaaatgtaattgtggctttgccattactttcaatggcaaaaaccgcgattatttttgcaccaacctactaactggtctctttttcctcaaggcaatctattctccatgcttttgctactcagagtcggggccagcactgtctggacttgtgcagatgctcagcctccacccaaggctgactgaatttgaatctgcatttcgttaacattcccaggtgattctatcacttcaaagtttgagaagcacccatctgatgggttcccagaacgattttttaaagtataaataaagagatgtctctaattggcaaacatgcttcaatggctttctattgctcctggaataaaatgcaaatttaggctgtggcatacaaagatctgtatcattcaaacctcccctgtcccttcagctttaaactcttttttcctggctttctatgcagcaaaaacactgacctcctttcagatttctgaacttgccatgtcctttccacatttagtctaactctctcaatcatctgcagtgctcttaccctaaatcttggtgagcctgactcattttcattcctcaggtctcagctcaaataccactgctatagagaaaacctgctgacttctgctgatcatcctgactaatgtggccatcatggcttttcccctaactctattacaacacccttgttatatttcattacggtaataatcataatgtgcagttatattgttggtctacgtgtttattgtcaatgtgtttattgtctatatctccacctaggatacaggctttacgaggtcagaggtattgtttgtttagtggacagctttattcttagtgcttagaataatgactggcctataatagtcagtcaaaaaaatattcactaaatgataaatggatggatgttatttggccctcctctttccttttttccttcctctcagtctcaccctagcaactttgacctctttttgtgttctctctgcttcattatgtggggcagctcagttctttctcacccttgctcccagactcaaaacccagcctttctgtgctcagtgaactctggtcaaatagttagatccattcagggtctcagcctttcctcactaaagtgacctcactttatcagatgtgatctgaagcacttagtcaactctaaaggctagtaacacatgatgaaatatctaaatgaagaaaaaaacacttaaaacattttagaaagtataaaagtaacttctcaagtccaataattatgagctgaagtcaaagttataattcaaattactgtaagagtaaatgcccctcaggaaacaaattcaaataaatagccttggtagacgtgttgtagatcagatttttaaaagatctggtttaaagatatttacgttcaaaggactggttcataattaccctgcttttgaccatctgtgtagtggctattaggcttctcaaaagattaatagtcatttgagttggtaacactaatttcccagaaggagtctttatttcattaaagtatattataaaattgctcaagcattttattggaagtgatggttaattacctatggggctatatacattacatccttcaaaaaaaggtctcttccagactagtttggagaaacttatctttctcacatgtagttcaagcctttactatagtagagaagggtgttatcagttcttggttttttttccctcttcctgcaagctaataagtgtgttgtttcatccaggttttcagtaaagacatgagactccttagtcagagacaaaggattttgttacttatggcacagcaaacagcctaaacattagtaagttcacttcagttgctctttccttaagtccccaaaagatgatacagtgagtgctgatgagtagtttgcatgcagtggtgctgtgtcatagatgaggaactctgagcctgggaaatttatagcaacagtaaacagtaagccagcttgctctttgtcgtacagggagtcattaactcatcccttaaggttgattgctgcaagcctaactctgaaaagtggtcctggtagggaggtcatggctttacactattggcatacccagcaggtcatgtaggggtacaagagactcatagtggactgtctttcaacactatccactccatggtcttatgtcatgttagctgctggaaatttttcttatgagtattccactccatcagtcattctgattaatttgactagagaggtagagagtaaacgcatagaatttgtcttacacaagatttaattaaggctactgtcagtagaactctaagcatgaagaggagaccaacctgcaatagcaacctcaatcatgcctcataggatcctagattctcccagctgtgaataagtcccaaagtacagacagctaggatatagtgtattatttaatatgacctacacatggaaatttagactgacatgctgatctttgttttaattgccaaaaagttaactattattcccaatatagagatctcctatggtccctattccccagacataaacataaccaaaggtgccgaaattaatccagtttgaaatttattgctacactttatttgggtcagcattagttcactttggttaggctatatgagcagggtcagtgagtatttgaaacttctgtaggcattcatggtataacccaagacagtccagacaccaggggaaaaatacacgtttgtatgaatcagattgagaaaatgttgtgctgattcctgtgttttcacacttaagaggatggggaatctgtattgggaagctgccattcatgttgtagaaatgttcaggagaggccatattcacaggagtttttctgttttcatggaatgtggaaggagatgacaaaccaacacacaaccaaactatatggttgccttgccaggctgtgtgcttcatctagcatacaaagagagcattaatcctcactcgcttcacctccagtggtccaagattttcccttcctaggtgccagtgttgttgctctttttatccacaatcacaaaatttgttcatcccattctagtagctaaagctttgcctttattgtggtcggttcctagtcatactcaaactttttgtctagaacaataaatagaggaaaaaggtattttatgacatttatatatacccattttatttattacctgggccctcgtggaccattgtacaataattcctagagcagaacactcaaattaatgatagttaacctcataatatatgaccatgtttgtccaacaaaagaatccaggtggctgaaccagaattcagttttaataccattctgaccatgttgctaccaggacagtaaacctaccaggctgttctaaggttgctgttaggagaaaaaaagaagcatcatgccttccacttctagaaagttagagaaggtatactttttttccattcatctcgttacatacagctaatgattctggatattacagatgttccttgacttacaatgggattgcttccccctaaatgcattataagttgaaaacactgtaagtaaaaagtacatttaatacacctagtatgctgaacaacataacttagcctagcctatcttagatgtgctcagaacacttacagtagcctatggttgggcaaaatcatccctaacaaagcctattttataatgaagtgttgaatatctcatgtaatttattgaatactgtaccaaaagggaaaaacagaatagttgtatatgtacataaagttcagtttctactgattgtgtactgctttcataccactgaaaaattataattcaaaccatcataatctgtgcataagataaaaaaattaaaagattctaaaaagtggggagaaaaagcccaactggttaagaaatttcagaaacgctaaagcagtgagttccatgagtttccttttgcctcatacaatcaggagtagccactgacctggaaatgttagtgaatatgtacaaaaaagcccaaagaccaggcttttgctttctttagccaaaaaaccaggagaataacagactgtcaagacacaaaactgaaagactataaccagtttactccagccaaataccacagaaagatttacagctaccaagcacatctttagtcaataaaaaagtagttgcaacctggtaggagaatttgtgttatttttaacttacctttgctccatctcctcatcactggctttaagacagtctttaaattacatcctccattccaagtatgggttcctggtgctagaagaagcagagtggaccttgttatatcaaagtagtgcttgattactttgacctctccagtggctcattgaagggctaattcaaagggcttgcctgtgtttcacacaactcaaaatcccctcagggtggagaattggctacagagaaaagtttttttctaaaaaacaatttgctaaagggacttaacagcaggtaggagaaagaatctacaaatgtgaagataagccaaataaaattattcagtctaagaagcagaaggaaaaaagaatgaaaaaatatatacctaagagcttaaatgacctgtgggacattaacaatagcacagacataagtataacagaattcccagaatgggaggagtgacagaaagattcaggaaaaatatttgtgatatgatgaccctaaactccccaaatttgatagaagacatggatctacacatccaagaagttcaaaaaggactaagtagaatgaaggcaaaaaaattcacagtgagacatattatgatcaaattgtttaaagaaaaagacaaattgagaacttgaaagctgcaagagagaagtgagtagccacatgcaagagatccttaataagattagcagtcaattgttcatcagaaaccatggaagccagaaggcagtaggatggtataaagtgtttaaagaaaaaagttgtcaaccaccaatttatatctggtaaaactattgttctaaaacaaaggagaaattaaaacagccccagataaacaaaaactgagtgtattcatcacttgcagacctgctctatgagaaaatctaaagggaatctttcagacagaaaagaaatgacactagacacttggagccatacaaaataatgaacaatgatgaaggtaattacataaataagaataaatgccaatatttttgtagtttttgtttataactcccattttcccctaaattatttaacaaactagtggataaataataattatagatacatattaataggagcacaatgggtaaagatgcttgtgtttttgcaggtgtataaaaatctcctttgttgtttttcatagtacaacttctgtatttcaaatgaacacaaaattagtagcatttgcagtagtatcttaaaataaattgcctttgaataaaatcttgctttccaatactttgaggtccacgagacatttctagaaaattttatgccatggaaaatgaagaccacttaatccagtggagaaggggagtgtgatttctctttgattgattgccataacactgtccttaaggcatatgaaggagagttctatatgtcatctagacattattaggcacagaagctttttcagtacaactttgatgttatgtaaagtgtgtcatcttgctagcactgatatcgctcttgggtacaacattagatctattgacccatactatttttgttacaaatattcaaaaggtgatttttttctacaaggactgtgcttcaactccacattcaattttaaaagttatatatttttttaaataaattttccaagactgtggcgactgccatcttgggttgctccttctttggtttttacagttactgagaaatggcttttgtgatttctgccacttgcaacgtactcttagagaaagggatttcgatattagtatattctctttcattctatttcctatgaagttgttggtgggaatagaaaagacctgcccaagccatcattgatggatactggctacatggtccttgagtagaaaagagcctgcatccttcatggcctccagccacaagcttctgcaaggaaacaaagcatgttatgaacaagaggaggaacagtagttgtttgtgcttctttctctgtagacacaattaagtttcttgcatagataacccttcatagatctgattttctgtttaggttgagatggaaaggcagaaagagacaccaaatttataacttttggaaattaatttgaagatatgagctttttacaagaaaggcaacgagagaaactagaaaaataaacagtcacacaagatgtcattgaaagtctatgtactacttcctaaacatactttgtgtactcacttcccaagggtaagatgggtactgcacacagaggcagcccaccctaagggaaggatcatgggaaaggggaaagcctataaagctctagggtcaaggttaaacactgcgctttacctcagtgccgggcttggctctcttccaagtgtaccttcctttctttcctattctaaagccttttaaaataaatttccacccttgctctgaaaaaaaaaaaaaaagaaaggctatgtactgaaggcaggtttatctctattataccaacccatgtaagtactgttttgacatgcatgtgtcattggtgcaagatgcaatggctattcccaagcccctctattccctggtcttgttaaaaaatgttgctaaggctgtgagctagaaccatgcttgttaagctagattttaggtcattctgttttgaaagaattattttgaattacaagaaacttctttaaaaattggagataacagaatggtatagggatgtgtggcctgacatgaagagctatgcaatgtgaaatgctccttgaattgcaagaatctcacctaaatttttataatagaatacttcatgactgttatttcagtgtaggaaagtggctattagaaacaactgctcttactcatacaacaattgccatttgatatcatacacatacacacataaacatccccacagacattaacttggagcatttgcttctcaaatttttaactgatgtgtcagatttttaaagtgacttgtttacataataaggctctacattttgagtatatgtttgatcactatcatgattccacaagatggcagtgtgttcttagggaccttgaggacagctctcaagtgctcgtgtgtgtgtgtgtgtgtgtgtgtgtgtgtgtgtgtgtgtgagagagagagagaggaggaggaggaggaggaggaaggatgaggggaggggcttagtggtgaattaggggtgttaaaaagagcatcatttttttgaactggtaaagcagattctttttatgatttttaaagtagaaatatccattctaggtgcattttttaagggtttaaaatttgaatcctcagtgaaccagggcagagaagaatgatgaaatccttgagagttttactagtgatcctgtggcttcagttgagctgtgagtttggggcatctttatataggaaaataatgtacagtatctggagttactgtctattctagatctataggtagaagcatgattttttttctaactaagggaaagtaggggcaccagtgaaaagaggatttaaattctggggagtaagcatctattacccagccagtcttctctgtctgaccactgtctttttcacaggggtttggagccaacagaaggaggtggagcagaattctggacccctcagtgttccagagggagccattgcctctctcaactgcacttacagtgaccgaggttcccagtccttcttctggtacagacaatattctgggaaaagccctgagttgataatgttcatatactccaatggtgacaaagaagatggaaggtttacagcacagctcaataaagccagccagtatgtttctctgctcatcagagactcccagcccagtgattcagccacctacctctgtgccgtgaacacacagtgctccccagacacctgcagtctgtacccaaacctgccatgccccaggaatgcctgatgtagagcttagactgcagggtagtgaaactccccttgctctctagtttcaagtggaaattataagaaccagtatggaggattaattaattagggaagtattttcataattctgaaaataattgaaaccctgaaaaaaataaaaacaaaaatcttggtctggttgacatattttttagtcctgtttttccactatagttttaaatatttttttaattgaggtctgactgataaacaaaaaagtatgtgtatttactttatacatacagcacaaactatgccataacatatccataatttctaaaagtttacttcctccctccttttttaaaaattgaggtatgattgctatataaaaaggcacacatatttaatgtatacatcccgatgctcagtctagttttatgccacctctttatgagattggttttatggtttttaaattacataacaagaaaatattttcacacaatgacagatattctctcatagttcccaggacaccttcgtctttccttctttagttactcaaagtgtttgaaagtcattaatttgggaatgcaacagcaaaacaggaatgcaaagcagagaaaaactcacaaacaaatgacttcaaaaattctacaagtcaaaaattctttttttttttttttttgagatggagtctggctctgtcgcccaggctggagtgcagtggcgcgatctgggctcactgtaagctccgccttccaggttcacgccattctcctgtcccagcctcccgagtagctgggaatacaggcgcctgccaccacaccggccaccatgcccggctaatgttttgtatttttttttttagtagaaacgtggtttcaccgtgttagccaggatggtctcgatctcttgacctcgtgatctgcccgcctcagcctcccaaagtgctgggattacaggtgtgagccaccacccccagccaaaaattcttttaattatagaaacctcacctcatctccagcctcagccacagcactactcctgatttatgtaagggtatatttcatggatagatggaagaactacagtcagagggtaagacctggttaaaactagaagtctagatagttgcagtgactaaatattagaaaaggtctatgttgccattttggggtaaagtctgaactgaactcaaaactcctggcttgagccttgtaaaagaatatattaatacctttgtacttaagtgtggcttggagatgatagggagcattagccctagccacagcatgccatatctccagtcagggcatgggagcatggaacaatctaaaattcattgagaaggatctctgagtaagtatcttaaagaggtccagacactaaggggttttagtataatgagcaaagacctgtgtgaatcaattcccaaagactatatggtattgagaatgtttcagcaaattttcgtcaggagagttggaaatgctgaacagcatataaatgcctccctccgctgactacctggcattatagatttgtcctgcaatgtatgccaagtccacgaaaaatatttacttcctaatgaaaataatgccatttaatatttagtacattgagttataggaaaaagcttgaaaagtgacatttattgtaaaaccgaatttgtggactgttagtcatgacattgtttaggtagtacaggaggtggaaaaattttggaaatgaagaatcaagatttctattcagttagttcacgtagttactgatgaaagatgcaagccaatcaacagttgcttcaaactgttaatttacagaactgaagatttaagaaatttttccaagtcatgtaagatttgtaaggcagtgaggatgatcagaaagttgtactgaaataaaaatacttaaattttagtgccacttttatcatatgccttcaggcaccctggcactctggaaagaccctgggctgccatgctcgtttgaatatcaattatgttgctaacaggccgtttatattaagctgtactattatatatatttcaggtttggatttaggattaaatgagatgaaatattgtcttgggataagttcattagaagcagagcctgaattggaaattctttatccataattgattgagaaaaccgggtcgagatgggaaaaggctaagcataaacgtgccagctagtggagtctttatccaccctgacctcatgggagctctggagcatgaattgcatcacaggattgatcctttccacactgaggcaagggggccagaatgctgacctattgtacgtaagaataaagtcgtcattggctgtggtgtttcttggggtagaggtatactctactggacaatgatgactctcattggcagaggtcgattttctagggaaaggggcaactgtgagctgagagtagccaacattcccaacagtaatagcgacaggagacagacaaattcctacgcagacatggacagatccccggtgaaacccggccttcaagccaaggacagttcaaagccttaaaaccgatctgccagttctggatagaatacatagccagagtgagaacttgaatccccactcttgcccactctctcgattggttccttctggatgatgccttttaaccaatcaaatggtgctttttccaagaccacctatggaccaatcagcatgcactcccccattctaagcccataaaaacactcggccttagcctcacagagggctacacactttgggtcccgtcttgcttaccagaggtttcctgtcactcagtaaaattctcctctgccttgctcactctttggtgtctgtgtacctcattcctcttggccagtgggacaagaatctggaatccaccgaactgtgggagtgaaaagagctgtaacaccctctcccactcgctgaactacgggagtggaaaagcctctggatgccatttcctcctgctctccgaactacaggaagaaaaaagccatgacagtagctggggatggcgacactgtcctgggaaaggggatcttggctgggcacaagcagtgttcactattaacatggaactcacctggcatatgggcagcattcaagaaataatagactttgtaattatattctgaattttaatttcattctccatttgaaggagtttatatagctggctttcccgatcttgaagagttgaaataatgttaggttaaagcacttcttcttcttcttttttttttttttttttgcactaatcacatgtagtgattttattttttatatatttttatttttttctttatttcttctaaaaaaaaacaggatacatgtgcagaacatgcagtttgttacatatgtatacatgtgtcatggtggtttcctgcacctattgaccggtcttctatgttccctcaggctaaagcacttcttaacagaaagcatctaaataaaggtaaagaaatattattcaaagctaaaactcaagatattttaagaataatgactaaggaaccactatgttatcttacttccttttgagaatgattacatgacattctgttcatcactttgtattgaggtagaaatgactctgatgattcacagttcatgactctgggcttccatgtatagagacaacaacagaaagagatcccatctatacttatacatgattaatgctattttgttattaatttgtatttaagaatggaggactgggtaacaggatggactcttcatgtcactgtgcccatgttccccacaaggtttcttctggaatggggtgcctggccagtagtgtgggtatgtgggcatatcatgtgatttggcaggcttctttttaggatgaatgaacagggaagtggtaattaagttgctcctctttgttccttgcacctaatatcattgaagatggcctaattctgtcaaccactcataataaaactgcagtaatcccagcggttcatttaaactcttgtgaaaattaaatacccaagtaaaagttggcttactatgcctatcacacacaagtacagaagcaggatggtgagaacggagggaggctagtgtagctattccatgtgtggaccttcagtatgttctcttgtgttctgttcttcccactctccatcacctactttctttctcaacccggaacctctccagggtctcacccagtaggttcccttcacttgcatttccactgcaatcttctcatagttcattctgggctggacttctcccccttctctgtttcatccatcagtgtgctcacatctacttttcatttcatgggaattgtgatagctttcatcttttcattattacttttaccattatggattcaagtcattctttttatacttctaaattttatttcagtgggaatattggaaagataagacgagaatacatatgcttcttaggaattttgaatcagaagcacatcctagtaacatttaaatgttcaaactggctatatgattttgtcttacacataaaaaatctataggcagaatcaaggaatagatcagaagtgcaagggagaactgatttcaggctggcgtgagtgaacagagtacacagaaaggagggattttgttctgaccttgtgaaaagaatccttgttggccaggttctcatttcacctgagatttctctcctcatttggttttttaagttttagggtccaatgatctctatgctaaaataagttggatgaagatggcttcttattcaagagtttcatctttttaggccagaggcgaccgctccagttcaatacagcctatctcccactcacaggggactactgcttgcctagctctgttgagtatcactgtcaatctctcccagattttctatacctcccacaaggtcctctcatttcttgtctgctggttgcattcctcccaattttctgagttaacacaggtttattttacttttcttttcctaactcttcccaggattatttatttgttatattttcttacactcatcattccactcaagtttttccatagatgggcctctgttaatgttctttttagtgtgagatataatttggcatgatgtatcagactgtaggagctttgacaattggaacatgattctttttaaacatgaagtacctaagttgttttttcctagagttacaaatatcgaagttattgacctgaaaccaaggggcctctttaacatttttgcttaacaaaaaaaattttgctttatttgtttgctttgattaattaattagtgacatgtgatccatgctgattttaagtatgagactcaggtctagtttgtttatttttttaagaatcaaataaggaataatctctttcacccaccgtaatgctgacattcagaaacacagggccatatgaaactcagcccagactgaggcaactgatcacctcccttctccttgatgaatggttttacaaaataatatagagtgtctcaatggtattccaaagtctagaatgttgtcttctgtgactagttgctcagtaaagtaaattagtcttctatttttacattactctcatttctcatgtatttaggattaaaaccatgtactctacagaaggtgacgtcatcacagatttgggaagaaagaaacactttctgttggttttgataccacatttctcaaatgagaagcaaacagttcacttccttggatccgtggtttcgcctgtggccttcagggggcgacgttgcactaaggaggcatctgtgttcattgccgaccatcctcatccactgagcctcctccctgcagctggctgatgtagctcactggtgtctgtgtagatagggagctgtgatgagaacaagaggtcagaacacatccaggctccttaagagaaagcctttctttaaccatttttgaaacccttcaaaggcagagacttgtccagcctaacctgcctgctgctcctagctcctgaggctcagggcccttggcttctgtccgctctgctcagggccctccagcgtggccactgctcagccatgctcctgctgctcgtcccagtgctcgaggtgatttttaccctgggttagtaacattccattacctttcttccttttgtaaatgtgactgtgttgtaattttttctgaatagagacatcttttcttcatagcaaagtctgtgctgcctttacttacacagcattggtgttgcaggaggaaccagagcccagtcggtgacccagcttggcagccacgtctctgtctctgaaggagccctggttctgctgaggtgcaactactcatcgtctgttccaccatatctcttctggtatgtgcaataccccaaccaaggactccagcttctcctgaagtacacatcagcggccaccctggttaaaggcatcaacggttttgaggctgaatttaagaagagtgaaacctccttccacctgacgaaaccctcagcccatatgagcgacgcggctgagtacttctgtgctgtgagtgacacagtgcttgagactgcaggagaggtgaacataaacctcctgagatgctgagactttctgtgactcaagaactcaaccttgaagtctgttttataatattaaatagcatttccaagtttctgatgcttattgatgtatgctgtatctttttcatctatttatttttaaactatctgtgactttaaagtgtgtttcctgtaggtagcataaaagaccatcttttctttttatctactttgttaatctctgtttttgcattgtgaagtttagataattaaaatggaatataaatatcaatcaggttggatttaagtatacttcattattgtgtttcacccatgttcctttttttgttctttttttctgactccttttggattatttaaatacttttcaatttacattttaatttatttatgaactttttggctataactctgtactttttgagtagttgctctgaagatggcaatgtacatgcctaaatatccagggtcttatgtgagcaaatactgtacctccttatgtgaaatgtcaaaatcttacacaacgtctctttatctaccaacactaaagtttgttattgttgttcatatatattagtcacatacattgaaaacttcaccaggcctggcacagtggctcatgtttgtaatcccaacactttgggaggcagagatgggaggattgcttgaactcaggggtttcagaccatcctgaaacaaagtgagacccccatctctatgaaatataaaaaaaatagctgggtatgatggcactcatctgtagcctcaactactcggcaggttgaagcattatgatagcttgagcccaggagttcgaggctgcagttagctaccatcatgccactgtattccagcttaagcaatagagcgagatccttgtctcaatttttttttttaaaaatcacaatatatagaaaacttcaccatataatgttataatttttgctttcaacaattatatgcactttataaaatttaaggggaagaataagaactattttatacttaacagctatttatcatttctggtatccttcctttgttcctgaagatctggattttctctgataccaggggatataactgaaattcccttcaaacttaaaaactccctttagcatttcttctagagcagatttgctgggaaacatatttttcatttgttcattacctgaaaatgtatttttaacttgccttttatttctggaagatagtttttactgggtctgtaattctgtgtcaacccttccacccctcccgctttaaagataccatttcattgtcttttggcctccatgctttctaatagaaatccattgccattcaagtaattgtccttcaatgatgtaatatattgtttttctctagctgcttcatatataagctatgtacacacatacacacacacacacacacacaaacacatgaaaaattatacaatcttttgttgtcagtggtttaatcataatgtgtttaggtgtggttctctttgattttaccttgtttggggcttgaattgataaatgtatgtctttcgagagaagaatcaaatagacacaataaaaaatgataaaggggatatcaccaccgatcccacagaaatacaaactaccatcagagaatactacaaacacctctacgcaaataaactagaaaatctagaagaaatggataaattcctcgacacatacactctcccaagactaaaccaggaagaagttgaatctctgaatagaccaataacaggagctgaaattgtggcaataatcaatagtttaccaactaaaaagagtccaggaccagatggattcacagccgaattctaccagaggtacaaggaggaactggtaccattccttctgaaactattccaatcaatagaaaaagagggaatcctccctaaatcattttatgaggccagcatcattctgataccaaagccgggcagagacacaaccaaaaaagagaattttagaccaatatccttgatgaacattgatgcaaaaatcctcgataaaatactggcaaaacgaatccagcagcacatcaaaaagcttatccaccatgatcaagtgggcttcatccctgggatgcaaggctggttcaatatacgcaaatcaataagtgtaatccagcatataaacagagccaaagacaaaaaccacatgattatctcaatagatgcagaaaaagcctttgacaaaattcaataacgcttcatgctaaaaactctcaataaattaggtattgatgggacgtatttcaaaataataagagctatctatgacaaacccacagccaatatcatactgaatgggcaaaaactggaagcattccctttgaaaactggcacaagacagggatgccctctctcgccactcctattcaacatagtgttggaagttctggccagggcaatcaggcaggagaaggaaataaagggtattcaattaggaaaagaggaagtcaaattgtccctgtttgcagacgacatgattgtatatctagaaaaccccatcgtctcagcccaaaatctccttaagctgataagctacttcagcaaagtctcaggatacaaaatcaatgtacaaaaatcacaagcattcttatacaccaataacagacaaacagagagccaaatcatgagtgaactcccattcacaattgcttcaaagagaataaaatacctaggactccaacttacaagggatgtgaaggacctcttcaaggagaactacaaaccactgctcaaggaaataaaagaggatacaaacaaatggaagaacattccgtgctcatggataggaagaatcaatattgtgaaaatggccatactgcccaaggtaatttatagattcaatgccatccccatcaagctaccaatgactttcttcacagaattggaaaaaactactttaaagttcatatggaaccaaaaaagagcccgcatcgccaaggcaatcctaagccaaaagaacaaagctggaggcatcacactacctgacttcaaactatactacaaggctacagtaaccaaaacagcatggtactggtaccaaaacagagatatagatcaatggaacagaacagagccctcagaaataatgccgcatatctacaactatctaatctttgacaaacctgagaaaaacaagcaatggggaaaggattccctatttaataaatggtgctgggaaaactggctagccatatgtagaaagctgaaactggatcccttccttacaccttatacaaaaatcaattcaagatggattaaagacttaaacgttagttctaaaaccataaaaaccctagaagaaaacctaggcagtaccattcaggacataggcatgggcaaggacttcatgtctaaaacaccaaaagcaatggcaacaaaagccagaattgacaaatgggatctaatgaaactaaagagcttctgcacagcaaaataaactgtcatcagagtgaacaggcaacctaaaaaatgggagaaaattttcgcaacctactcgtctgacaaagggctaatatccagaatctataatgaactcaaacaaatttacaggaaaaaaacaaacaaccccatcaaaaagtgggcgaaggacatgaacagacacttctcaaaagaagatatttatgcagccaaaaaacacatgaaaaaatgctcatcatcactggccatcagagaaatgcaaatcaaaaccacaatgagataccatctcacaccagttagaatggcaatcattaaaaagtcaggaaacaacaggtgctggagaggatgtggagaaataggaacacttttacactgttggtgggactgtaaactagttcaaccgttgtggaagtcagtgtggtgattcctcagggatctagaactagaaataccatttgacccagccatcccattactgggtatatatccaaaggactataaatcatgctgctataaagacacatgcacacatatgtttattgcggcattattcacaatagcaaagacttggaaccaacccaaatgtccaacaatgatagactggattaagaaaatgtggcacatatacaccatagaatactatgcagccataaaaaaggatgagttcatgtcctttgtagggacatggatgaaattggaaatcatcattctcagtaaactatcacaagaacaaaaaaccaaacaccacatattctcactcataggtgggaactgaacaatgagatcacatggtcacaggaaggggaatatcacactctgggaactgtggtggggtggggggaggggggagggatagcattgggagagatacctaatgttagatgacaagttagtgggtgcagtacaccagcatggcacatgtatacatatgtgactaacctgcacaatgtgcacatgtaccctaaaacttaaagtataataataaaaaaaagataaatgtatgtctttcactgaatttggcaagcttttggccattctttcttcaaatatgttttctgacccaatatctttcttctctccctctaggactccagttagatataacttagactttcgaatattttcccacaggtctccagggctctgcctttttttctttcaattttcaaattgattttaaggtttgtcagtgtttcctgaccttggcactactgacattttggtcctcataattttttattggggtgtggggctgccctgtgtgttgtagaatttttaacaacaccactggcttctccacactagatgcctgtagcactacataccccaagttgtgaaggccaaaattgtgtccagatttgccaaatgtctcctgggggaagacaaagtcaaaattaattggattaaataatctgtattgatctttttcaattttgcatatgctttcctctatcattttgctactgagcccttactgtaagatttttatttttgatattgtatttttctgttcaatttctatttttttctttactttgtggaacataatcaaaagagctactttgacatctttttctatgagttttagtatcttagtcatcttggtatttgaatttgttgatcttttacttaaatattagttcatttttctggccctttgtcaaataattttgaagtacatcttaaacatttcaaatattatgtgtgtacactctgttttctcctcctcttccttcttcttctttaaaaaacaatcatctaaagaatgttaatgtttttatttgaggagaaaatcaacctagtttggtttatactactagttgtgtctccccttttgtggaatttggtagctcaaaatcacagttcagttctctaatcatttgccatgttggtttgggtttatacctgtcgtgtgtagctcagggattagtgaaaccagtttgcatggctcaaatctcaggtcagttcctgaactctctgctacattggttttagtttgtcctgcatgggtgccacttgggggtagtctgagactggaatagtggttcaaatatcagttaagtaacctaaaatttgttgttctggtttgagtcagtttcacgtatgtagagccttgggattagcctgagacttaaactattttccatctcttccctagggtctcccttttctagcctgacccacagaggcagaaaattgtgtttcttgcagagttttgacttcctacaccattatcatattgctgtgtgcattggggcctccctcagggcaaagccaagagaaagaaacagaaaaaatatgaaattcacccttgtgcaggttgtttctccaatttttgacttccctacacaatctgctagcttttgggtaatttcagagtccacaggtagtttctttttttaaatttttttattgtttatttattttttattttgttcagtttttacttacaatccatggcagagattggccgtaggtatcttaaagttatctcctattctactgtggtcctgcattaatttgtggttctcgataatattaatcaagaatggctatttggcgtgtgcttttaccaccatctttagttgtattaccctttttagttaatctaattcattttttatatttgcaaatttttctcatcaagattataagaccatttaattaagctcttaaatttttttgatatttcatttcttattttccaaatttatgaaggtctttctttggtgcaaaagaattgagaatgcatacttgtttttataaataattcaagtactatattttttcctaaagtctaaaaatttttgtattctgaattatatctggatttaagagtatgttaaggcatagtaggactattcaaacactattttttttagtacataaaacagagctgattagtttttaattttctctatttttttcatttctgactttttgcttcttttaaatgaaacatgtattttggtatttggggctgtgtttggagacccttaaatcttccgggaaatcatgtatttcttagaatgctgccaacacccttaagtgagaatattctatttatgatcttattcttatttaactaagaggtgttgcttctactactatagaggattgaagaattcctttacattcttccagtgcagagcaaaaggcaatgttccaagacatcacacaatcctatggcctttgactttgaacatactgggctttgcaaatgctcagcaactttgagaaaagttaaaatgaccaccattctgaaattcagaaggagttgctccttatagcttattttccaattttttttctgctctgactttaatcttcaatatgatcccacctactttctgtgtcctagaaatatgtgtcaccctttcctcaccagatgaccttcattttttttttactcttgtgaattttagtctatttccattttatttctattctttaatttaggaagaaatattcaagagaagggaaatgagcatatagcattaggattagaagttcacactcaaaggctacacttttacaaaatgacagcattactcaattttcttcattcaagaaaatcttttccaacaggaacaaatgaatcaagaacccaaggagagaactgggcttatgctttcaaatcaaaggaaagaagtattctgactttgtcaagggtcccattagccacagagaaagcagtgactttctgcattctcgtgttttcagagttttatttttttccccatgcactatctacatttattattatttgtttttatttttaaatttcaacttttatttctcgcttggtgtggttgtatttccttcagccccacaggtgtctgtagttttattttctttacccctagaggcaaagccttcccatcatgagttacgccttgtcattagttgcatggaggcactactctccttatgtgaaatcttttcctctatggctgcacaagcatcatccgagggaaatatctctaccatcctccatcagcactgtggcaacactgaaccatccaaaactcagtccagggcaattggtctgaacccaaactctcatggactcatatctaaattctgatatgcttttcaataacgattcctcttgatgtattactccatctttacatgaaatcttattgctaatggactctaggactaaaacaccatcatagatttggtcaggaagaaacacgtcttgtggaagttttgatacatctcagaaaacaggaagaacacactaatgaacagtctgtgctaaactctggttctgcacttggcctccagagagcgatgctgcacacactggagcttttgtttctgttgaagatcagtccactgctcagtttcttcttcctgcagctggttgagttctttccagacaaagacaagtgacaagaatcagagttttaaaagcaaccagattcatctctgcagcttttgtagttttatataaacaaagagcttgtccagcaaaccttccccacacttcttgttcttggtctcttcagccgctttccttcctgttctctggagatcttgcagaaaagagcctgcagtgtttccattgctcagccatgctcctggtgctcatcccactgctggggatacattttgtcctgagtgagtaaaatttctttatcatctctagttccacaggttctgactagaaatgcttgctttttatactgagtctgcactgctttcactgatagtacattactttttcaggaactgtcagagcccagtcagtgacccagcctgacatccgcatcactgtctctgaaggagcctcactggagttgagatgtaactattcctatggggcgatgttgtgggaagtcagggaccccaaacggagggaccggctgaagccatggcagaagaatgtggattgtgaagatttcatggacatttattagttccccaaattaatacttttataatttcttatgcctctctttactgcaatctctaaacataaattgtaaagatttcatggacacttatcacttccccaatcaatacccctgtgatttcctatgcctgtctttactttaatctcttaatcctgtcagctgaggaggatgtatgtcacctcaggaccctgtgataattgtgttaactgcacaaattatagagcatgtgtgttcaaacaatatgaaatctgggcaccttgaaaaaagaacaggataacagcaatgttcagggaataagagagataaccttaaactctgactgccagtgagccaggcggaacagagccatatttctcttctttcaaaagcaaatgggagaaatatggctgaattctttttctcagcaaggaacatccctggggaagagaatacgtgcctgggggtgggtctatagacggcccccttgggtgtggccatcttctatagtcaaaactgtaggggtgaaataaatcccagtctcccatagcactcccaggcttattaggaagaggaaattcccacctaataaattttggtcagactggctgctctcaaaaccctgtctcctgataagatgttatcaatgacaatggtgcccgaaacttcattagcaattttaatttcgccccagtcctgtggtcctgtgatctcgccctgcctccatttgccttgtgatattctattaccttgtgaagtacatgatctctgtgacccacacctattcatacactccctccccttttgaaaatcagtaataaaaacttgctggttttgcggcttgtggggcatcacggaacctaccgacatgtgatttctcccccggactcccagctttaaaatttctctcttttgtactctgtccctttatttctcaagccagccaaaacttagggaaaatagaaaagaacctatgtgactatcggggcaggttccccaatacggcaacaccttctctcttctggcatgtccagtcccccggccaaggcctccagctgctcctaaagtacttttcaggagacactctggttcaaggcattgaaggctttgaagctgaatttaagaggagtcaatcttccttcaacctgaggagaccctctgtgcattggagtgatgctgctgagtacttctgtgctgcaggtaccacagtgcctgggtctgcaggggagctgaacacaaactgcctatgctagagaagttttcagagactcaatgtatcttcctgtggcattttcaaagatctcttatttttatgatggtgagtgaggcaaagagagctgagcacatccagccatttctatataattctgcaattcctgctatgtcccatgtcagataaactttgttttagaagctttttgttaattgaagaaactgcataataggaaatagtattctagaatgatggaggagacatacttcttatcacctaacaatcaggttctcaaggacctttccttgactgtgactgcattaagtggttgactatgggaattttgatatggtctaggagaaccttggttttcatttatcatttaatctctcaactaacccagaaaacaaaacataagtttctcatgttcttaccttgcaagttgcatccttgagctggtcattcacaggatattttcttagaatttatttttctggctctaactgcgcaattcagatttcaggatattttgtctcatacctctatttaggaggaattatgagaaattgttagctaacagtgaaagtttcattagaatcacgaaggacttagaaaattgtcacagtgatgtgagttctggcaactaggaatagcacacaaggagaatgaagatttagaattcatcagtgtttctccaaagactttttcagttataaaaatagcttctattctattggtatattaattatgcaaatctacattgtaagtttgtctatggaattccattcatctcttctagctactgacacttttacttgttgctttcactctgttgttacatggtttcactattgaaatattaaagattgattctcttttttgagatagagttttactctttcacctaggctggaatgcagtggcatgatcatagctcactgcagccttgacccatgcccccaggctcaagcaattctcccacctcagtcagcttcctgagtagctgagactacaggtgtgcaccaccatgcctggctaattttttttttaatttttatttttagtggagacaagatctcactatgttgcccaggctggtttcaaactcctgagctcaagcaatcctgcaacctcagccccccaaagtactaggattacaagcatgagccactgtacctggccaaagattgattcttatatagtaacattttgataatctgtcatgtggtaagttttgcaatgccaagctctgctagaaatacggataagagttacaatggtactggattccaggcggctgctggaaagtataaatatgtgactttcttatgtctagaatggaaagaactgtataagaagattttatactccttgtctgcttgctgcctcggaggataaccagtgcttcggaggaaaagtagaaggagaaggagagagctctttagctgccatttagctcacactataaatgtctaagagggtaggtgcatagggaccctgaaaatatagatcgaataagtaaattgtggccaatggcactccttagccaaatagtgaaccaagatatcaacagtattttttaggatgtagtgttatgagtacatgtgataaatatgtttaagcgatttctggaatgctgtgaggaaggtgaatggagtgtcagatatataaaattatgaaaaagaaatgtatgctcatttaatgttcctgcctcagtcccttccttcttttctgtttttggaccacactctcatctaccactgataaggcaaataatttcaagtgactcattgtcatcagctcagccacactgcccaaaggtacttgtcatagtatcatgagcacttcatgcagatcgatttgagaaagaactgcccgtttcttttgattctgatctcaaactgaatattaaagaaaaataaattccataccaaggaccctgagcagctgggagagcattccccatctcccctacctcacctctgcctgaaaaatcaaagtaatcttccttccttctattaataatttgttgcttttatatgagtacgtgatttgtaggagaaactttccaaaataaggaattatattaagaaagtggagattctgagttattttatcaatgatatcaatcattctgacttttcagaaagaattctgacttttcatgaaattaactgatcttaccacatattccatcaccgagaagcagctgccctaattgaaaggcggaacactttactgaagaccaagctagagccctgactgggagacaacagcatgtatgctaaacattttcttctctccctacatcgtattttttatctgatatacaagctgttggaaacaaactttataatttagtgtaaaggtaacagaattttcaggctgggtgaggtggctcacagctgtaatttcagcacggtgggaggtttaggtaggaggatcacttgaggcaaggatttcaagaccagcctgggcaacatagcaagaccacatctctacaaacaattaaaaaaattagccaggcatggtggtgcccacctgtagtcctagctactcaggaggattgcgtgggcccaggagttcaaagttacactgagctgtgatcatgacactgccctctagcctggatgccagagcaagatcctgcttttaaaaaaaacttaggaaggactgtcactgaatttgaagaattattaatataatcagtgatgaagtcaatgacttttgggattgtgcatcttctcattttggagaaaggatgaaaagttcttcagttgcaagatggagttctgtatcttgaaggagatagaggaatagaattattttgttgttgtacatgtttcaaatgtttgtagaagaatgtgtgtgttgcatagggaagcttgaagtagttgaaggtatcgatttattgactctcagctccaaattcactccttgcctcttctgtgaaggtgaatctggaaccttcgaccatttttctttgccagttgacacaatgttaagctttgtagtagagagtcaggaagaaaaagttttgctttctgctttccatgtgctcactcatcaggatcctgcaccatgggaggcacctgcagtgcacagtgccctgcagtttcctccagaacccccccattttagggcgattctgtgaaagagatcctgcagtgagacacctccctgtgaacagctttccccagtgtcctagaggatgattttctgccatgttctagagggtgaatttctagcaagttctgctgggacagcaccacagcaacttccctttcatccagtgagccacagctgtttcttttcaataagatctgggtctcagccctgagggtggggctacaggcctcttccctggttatcctaccctgccctaggagtagaggctgcaccttatgtctgctattcctacaggaataggaatagcagaatttcttttcttcatattattcattctcttgttactctaatactctgtttattaatccttaaatttttttctgttgaaattctatggtttctctttcctgattggactcgacttagacatgcaccaaggacttcaagcaactggagagcatcttccatctccccgcccactcctgcctgagatatcaaagtagttttcttgttttatttctctattgatttgttttgcctgcttattgttttatttacattgttgttatataattatgagaaaattttacaataattttattaagaatttggaaatattgttaatatattaataaaattaattttactattaaaatttttgtgcacattatacacagaatgttattataccattggtgcaaattgaaatcaattttaaaaggtttagcatactgcacaaataggcattaattcacctatgaggatgtgtctggagatcgtaattctaagtcatttttcttgcatgtaactctctcaatacatcattattttttgattttctatttccttcagatggaggaagaagacaatgataattgcaaaactatctgtagacagaatatttctgtcaccccagaaggttttatgtgtgcctttctagtcaactcaccttctggaggcaatagatgttcttatttctatcaccttagatttactttacccattgtagacttcaaatcaatggaatcatacagtagttactcttttgtgcctggtttctttcattcatcgtgttttttagattcccccatgttctcatgtatatcagtcattcattattgctattgctgagtagtatcttattatatgaataaagcacaatttgtttatccattcagctgcgcacaccactgactggacatagaatctttcagggattaaatctttggtatcattcttaagagtgcaaggtacagttgttctagatttttctatcctgtctttcaagggtagggcgtgtctctaaaatacttcagttgaaacatgtatcttaaatacctttatttaaaaaccaatttctatcattcattatggtacctactgtatcattagttttgcaaataaaaacccaacatctaatattccctatgctatttagcaaagctttgggtattatccaagctgtgggtagctgaactgtagtttcctctgttgtggccttacgtattaataacaacagtagctgaccaccctggaatttgctttcctgactaagtcaattgactctccttagagttgagacttaactagtacatatccaatattctctggcttttgtcgaaaagatttaatgtaaattatacatcctaacactgtgatatatttatttttacttggtaactgatagatattatgaacaaaatttagatcattgttcctgcaggtcctgaagatctgtaagtcatgtaattataatccttgctcaacagttattctagagaacttatttaatatttagaggcactttgccctttacagtacatactaaaaccttttaaagcttgttaggtaacttatgaagaaaatttcactaatctattatttaataccaaatatacagcatatacaatacacattttcaatcttttaagcacattaacaaagttctcaggatagttggatctctgtacacagttttttacaggaatatctaagacaagggaatacctttatttaggacacaaatgcgccaaaacatgggtataaaagtagaatgtggccaggcacggtggattatgcctgtaatcccaacactttgagaggctgaagcgagagaatctcttgagtccaggagattgaaaccagcctgagcaacagaatgaaatcccatctctacaaaaagtaaaaaaacatcagctgggcatggtgacacatgtctgtgatcccagttacataggaggctgaggcagggagtattgcttaagcctgggaggtcaaggctgcagtgagccgcaattgcaccactgccctccagtctgggaaacagagtgagaccctgtctcaaaaaaataaataaataaaaataaaaataaaaggtagaatgttaaaatgttgaagatagtttatatgtatatttataacttcatattgttttttgtgatatgtcttatataataggaaaataaaattgacctttatattaatattctaaggctggcataacaaaatatcacagactaggtgacataaacaacataatttattatctcacagttccacaggctagaagcccaagatcaagttgtcagcagggttaatttcttctgaagtttgcagatcatgttgccttttcattgtgtccttacacggtcttgcccctgagggtacgcatgtctgtgtccaaatttacttttcttataagaagagcagtcatattgaattagagtccacttatgtgatgtcattttacattaattatttctttaaagagcctattttcaagcaccattacgttctgaggtactgggggtaagggcttcaacatgtaaattttgggttggatagagctcagtccataacaactctccaagtaaatattacattcacaaacaagacagttgaaacctttctttgtgcaatgctttactaacttctcgtgcacacaatgatcgtgtataactttgatggagattttcctgtattgagtttctttctagaggaaggagaaatgtgcaattacaaatacagatagcttataaaacattgcaaaagaccagtgataaaaattaaaagctgtttttcagacttgccttctttttcctctgctccactggggtgcagaattctctcatgtttagatttgttcttttctgaagataaatcttaatttctccttggtattttatctctgacagttttcctttctttccccattctgttttctgtctgcatgttactttttttttacctctgtcttatcgtttgtctaatattagattctacctgtgcagaagccaatttagctaacttgctgtttttctcctgcactcctcctttaccacctcatcagcagaactgacatttaaaaaagaaaaaagaattgaaattcttttgaagttgtttagggcaagtgaagcgggttaagtggatgaggaaggtggctacagtccttaaacacaggggcagcaggaagaattccatcctatatgctcagctttcttgaggattgttttctgtttttttttcaagtagtatgtatcaatattttaaattttgattcaaccagataatcttttttaaaaaatatatgctttggttgctgacatgcttggattcattttaaatatatttgttttatgcagcattctcttgatttttttcttatttctttttagcctggcttctcttgcattgataaagtttgatttttcttcatactgctttgaaaatgtaatgtgtatttctgttatgataagtacccttgttatataaatgtatgtatagaaatataaaatacatatgaatgtatgtatatatgtgtatgcatatataaatctaatttttatgcccaatgttattcttttttttccctcagtgttattctgtaacattttgcttgtatatcccagtccttctcctttacctcctgctgacttatgaattttagaattaccttcgtggctgattggaagaaactacacataagctatatacatcaggacaataatttcagtaagatattatgaaatgaacaataaactatagctccaatgtacattaagaaaagtaataaaaaagaaaagcatctgacacaataattgcaacatgaatttgctcccttcatcctcagagccattgtccctgatcttccttctgcctggagtgtttttcaccattagccacatagatcccttcactggctcatagtctttgctcctggagaaacatgggaacatgtgaataaagtagaatgctcaaaaagtttattgcagcattgtatttcatagttaaagaaaaatcattgtattagtccattctcccactgttataaaaatgctgagacatgataatttataaagaaaagagatttaagtggctcacagttccacagaccatacaggaagcacagtagcatctgtttctggggaggcttcagggagcttttactcaagatggaaggtaaagagggagaggccgtcttacatggcaaaagcagaacctagagagaaagggaaggtgctacacacttttaaacaaccagatctcaggagaactcaggactgtagcaagtgggaaatccacccccatgacccaatcacctcctaccaggcctgacctccagcactgggtatggaatcctgattagggaaaaggagtcaggctagcaggaccaggggaaagcaaagggataaagaaaataagctataggtctgcctttttttcatggtccaggacatataaacagaaagaggaagcagataagctataggtctttctttatggctcaggacctatagctctcctgagcaaataacgtacataactcacagacttcctgcttatcatcaaacacctctatctatcatcaaaaacctcagttgacagaagaatgcaagttagttccttgctaccttggcattaccagtactgcatgcagcactcggcaacccaaaaacatcctataaaatctccagcaggcctttgtttccttgccatcagctcctcttcggctgattgctccctggcaactactttcatactttctttaatagatctgcctttctttatctacaacagtcttggtaaattattttatccccacaccaccagcccaggtagtcatcactcacctgggacattggggattacatttcaacatgagatttgggcagggacacagatccaaactatatcacacatcatcttaagtcttcatcaatagggagaggactatataaaccgaagtatatctctaatagggtgcaatgtagcagaagttcccgtatgtgttaatataataagctctgcaagatatattattgaatttatagtgtgagttacaaaaaggtatacatgagatgcatcatttggtattaaattttaaaattataaatgaaatactatttattttcagcattttttgtatttagtacatgtatataatgctatagtaaaacatttggaagtatcaactccaaattgataagatgaagggagaattagggtaacgagtgatgaaagaatcagaactgggagtggtagtaaaagtggattttcgtctacctggtatgttgtattacttttaataatttcaaatgttcatgaattctttataatattaaaccaataaaaagtcataaaagccatcataaaggtttatccatattctattctattatcctcatgaaaaaggagagaaagagggaaatgaccaccctttttataaggtcttgtccaaccttcctaagtatttctcccacctctgggatcatatagcttttagttcacattctgcttaggatcccactctttgattctattatagacatgtgtagtttcgtactcttcagtagattatgaactaatgtctcatcactttttacatactcttaaaacctaataaattaatcacttatggtaatacttcaaaaaatctttttggattttctaaaacaaaatcagagaattcaaataaatagcgcaagatgggaattgtcaaattattttaagatattaatttccatgaagtggcattttaaaagtggtaattggttcactgttaatccccattcagtctaggcagctatattgttttctgaccgcctccatttccttcataggaaacatgaagtgaatggggctgtgtgtgtgactactgaggagttaagttggtgcaaagtggtctttgttgatggtttcagtccactagggggcactctaggacttccgaaatgaagactttttctgatggtctcagcggacggaacaggatacaaaagggcatgtgagtcagtcaaatcacagataacagggagctggggcggggtggagcgtgatgtgtgtgtaaggttcatcttaggttttcagctctgacattctatataaaacctcagaaagctggagttcataggtctataaatccattgtgaggatgattctgtaagcagaggtaagggaattggagttttactgggcattgcgagcatggatgttcattagaaaacatcttcattccatgttttcagtttctaaatttttatgattaaaattcatgaaattcactgacttggaaattattctaaatacccctgatatctgatcttttcatatatcttctctgagactagaaggaaaaagaataaacagaagagaagaaaataggaataaaataaggatgaagaacagaaagagaatagggaggggacaatatttaatttgaccagcaatatgtggcctgatgagaacagctgtgagggcctgcagggtgtgtggggaaaggtctgggaagaggaaggggagaggtagaaatgcaattagagtggatatcatacgcacatcctatttttcctctaaccaaccaacctctagttggaaacattttctaatgccctgatttcaagaaactatttatttctaaatttgcaatgcatgctatcaaatagttttcctttattagaattttcatatatttgaattctccaattttctgtcaaactgtgtaatttgggaaatgggatctctcttcccatgactctttaaagctctatttaacctagctgagacacagattcttctgagaggtatcatcccccttcctcacatactatccataaactagtcttacataaagtgcttcttttttttaaaaaaaacctatatcttcatacattagaaatattgcctcttcctctcgtgaactattcacacccatgaatttggagagattgctgtgcagtctcactgggccactgtgggtggtttcctcttcagatgatttttaaaacttatgtttttaaacttaaaaacttttaaataaaagactgatcatgaacattgcaataaggcaagttgaagagtacctgaatccttcaaaaagtttagaaactctagtattgaaaattaatacattacaatttgaatatctgcaggtttcaaaatagaaattaaatctaagtgtagcagcttgatagaaaggaacattattttcatgcaaagttttgaatgacccagttatcgacatagaggctaattttcaaatcaatttttcttataattgaagatacaatgataggatgcacaaacaaacatagtgaatcatatacatatcatgaagccactttgttacttttttaaacaaattttttttttaagagaagtggtcttgctctgttgcccaagctcaagtgcagtggcacaattatagtttgctttagccttgaactcctgggcccaagtgatcttcctgtctaggtctcccaaagtgctgagatcacagaagaccctgtctctgcttctgaaggagcccaaggattggttagggtaagctcagacccactagattgcctgtgggtgtgaaaatggtcttgggagttccttgatgcaggataacttctgcctactcccatgctctatgctgtacacaatcagtcctcagtaaatatttgccttgttaaatagtataaaagaattttagacctataaaagcatttagaaaccttttagttcaacttcattttataaacacagaaactatatccaagatgccagtatgaaaccattagatagtaaatgatctagcagtagaaagaaactggatttcctcccttcctccttagcttcttgctcttgcctattcctgcaggcacatattgttgaacaaagagaaactatctaatggcagccctgccaggttgacctctgcattttggttccgggaaaggcttggttcaatcactttgaccatgagaacggagagttccagtttgtgtaaacatttaccactttgggcaagaaagatattcaggctgagccactgttattctaccaggaaatccagtccatgactcactggctgctgtaggagtgagccaaacatggtggtgccaccctcaacccccagaggtatttctaaggactttcctaaaaatagtaagatatattcattatgctgggtggatattccttgaaggaaggatgtggacatagtgagcattactctacattgtcaaaaaataataattagaatagggaagctaagggtaacatgtcctcaagtggttgatagttcataaaggtgtgagaaaatcttttctggaccaacacattgacaatgagttaggtaatattcaatgaaataatcatagggttgggaattttgtccaggggatggccatacctaaggcatagttaatatgtggaatactatgatccatatgagtggtcatatttagaccattacattcagttcttaatgctatactcaaaaggccaaatattgacctaaattatctgtcaccaaaaggagggaaactcatccaataaaggatttgagaattatattgtatgaggaatgagtgagaaaagagaaaatccttagaatggagaagttttacatatgtaaaaacacacattttatgtatacatatctatatttatatgttttagttgctatttttcatcataactgtccttacatacttaagggtgcaagatgtgaataagaaattatattcagtctttataattccaggggcctagtgagtacaagtcacaggaaatgcacttttcttctggaaaccagatagtcttggtatctgaggaaccatttcccatggtcacttatttagttttgcactctccctcctagcagacacaggcaatattttggcttccatagatttagttttatggaagtaatcagaacgtatcaaaaattaaagtagataagcaattttttttgcaagaagagataaacccagaaatgtacaagactgaaggactttatcaatatcttagggaagaacactgtagtggagtttgggagaaaaacggcagatatggaacctgagctagcaatggctaaggcaagagcagtccatgccagaggagttggctcatattttagaggcaagttccactgaagatatgagtcaatcattgtatttaaggacatgccatattgatatcattcattttggtatcagaaaataaaagcaccttaatagaaatttacatgtggtttcatttttggagcctgcagcctgatgttttctgagaatttctccttgttttttctgcactttgcagaatacaagccacatagcaataggaaaaggtttcttaaaacatgccagatttctccttgcaaaccagcccaatctatgggtcaaactttcctattgttggagtatttaataactcatggaacttgttcccttcctcctttatcattgtactttaattctttaccttttattaaagccatccttaccaaagaaagattccacatttcgactgttggtactgtcaagtctctgggaatagaaagtcatggggaagaccagtcttggagaagcagagcctgagataatatgcacgtgaaatattgagtagtcctctctctcttactcttatctttggcttacatattcctttaagaaagagtctttctccataacaaacaaatcatgatgaccgatttgactgcaagggaatgtattacttttgtttgtccaggacagtgaatcatggtgttttcctgatttcaaacatgtaaacttggtgcatcattgtataaacacctgcaacatctacctctttctaactttttaacaatgactcattagtttgcataaatatcaatcttgatatctacattcttactgtgaacttcatctcagagtgaagactttatttgtttgacctattgctccttttgtgcatctgagtccctcctagggttatagaaaaacattcaaactgcaagtttagtagctacgaatgtgaccacaagatggcagtgcttctctgctgatgcagaacacacagaggtttcattttagtggattctgattaaataggtttatggcagaagtagagcctttttctattggctgagtagacaatgtgagaaaccactatgattgttagaggaaagaaaggaatacccgatgatggaagtagctcttatggctggagattgcaggtttatgactgatcctatttgggaagaacaatgatggcaggcattcgagctttatttatgtacttgtggctgcagctggactgtaagtttagagttttgggtaacacagtatattagttgatgattttgagacatccagggggaagtcttgctttatttaggcttcctctagttactatagaaaaagaaaattctggagaataataacttgataaacctttctctttttctttctgcacaggggtgagcagaggagagagtgtggggctgcatcttcctaccctgagtgtccaggagggtgacaactctattatcaactgtgcttattcaaacagcgcctcagactacttcatttggtacaagcaagaatctggaaaaggtcctcaattcattatagacattcgttcaaatatggacaaaaggcaaggccaaagagtcaccgttttattgaataagacagtgaaacatctctctctgcaaattgcagctactcaacctggagactcagctgtctacttttgtgcagagaatacacattgctttccaggcatctgtaaccatcacccaaacctgagatgggaggtgaagcagcatccctttcctttgcaataaattttagttatagcacttgtcattttgtttgttcataagtggaaactaacatatagatattaaaaccatgtaatgaggttagattcaaagtgacccagaaaggtttagagcattttgttggccagttgatgcttaatggattccgtttttcaaaaaaatatatggtacgcatttaagttaacaacatgaagttttgacacacatgtacatagtaaagtaaagagtcagctaaagagacgcatagggcaaggtatgggaaaaatggccctgagcttccatgccttctctggctctgccacccaccacgtgttcagcaatcaggaggttctgctcaagggatccttacagagatttagtgatgttggattttgtaatctagtcttcaaaggtgactttacatttgctattcagacttctctcctatgaataaccccttagtgtcaatattgcaatccctattatggataaattttaacttttagttttcaaaaattgcttttgttatctttttcttattgtaaaacattacatgccaaaaccagatagtgtaaaatataaaaaatacaaaattgataattctgtacccagataggttttgctaatattaggttggtgcaaaagtaagtgctgtttttgccattaaaagtcatggcaaaaataacaattacttttgcaccaacctaatatttagatttgtttcttgatagagtcctattataattaggatcatgattttttcacctattcttatatctcgaattgagcttttctcacttcgtcctctcctcaaacacatgctttttaatagctccgtgagaaattttcactagtcacagttatttttattttcttactctctgtatctgtggtaaaatttggcagtcccttctacctgctgtttcttgttgggaaaacgtgatgagttttcctttagagtctagtttggacatatactctgtgtgtgcgagggaaattaaaacaggaagtgattttaaaatgtgagcttcagattagagtcatcagtatattcttcaaaatcttattggtatctcttcatatttactctctcacataattgagaagagttatgttttttaatcactctgtttctgcagaacctagcataagctttttcacattgttaataatcaatagatgtttgttaaagaaagaaaaaatggattaaactattgtatattcaaaattttaacttaggctttgtggttgaattaaacgtataattttatgtgtgaataattaaactcctgaaaatgtatatttgaataagttgaatatttgagagcatatttctttccatttatctatgtcattcttttccataaaactttatcgttttaagataattaaatttttttctagacatttcatttttattgctacctttatctttctttctgaggtatgtggcaatgtttttaataaatatttttcagctacattattcaattcttattagtaaattgcaggaggcatttggatagttaatttatgctaggttgttccaaataccccgcctcactttcgtgttttgactgctttaaacattacgagtgcagtttccttttcaaaagttgtatcttttcgtgttgttgataaaaataatggaaataaagaagttgcataaataattaattccctaattctcccacctgtggtcaagagtaggctaatttcaagatccctcatattattcctaaggatggatataaccggcgattggtagggtgagaatgatcccttctggctgagttatggctgttagttattagctaggtcttataggaaaagtcattagattaaattggggtttaaaaacaactgaacaaggaaggtcagtattgtagcccagtaactcaactggcttttgttatttccctgtctataccactagctcctctccggagaagcaagctgactcttgatcagtccatttcctccaagaatgaaatggagtgattgggaatcatggcttatagtctatttattttttgcttgtttagaagaaagagtgtaattgctattggcttaattgctgtatcttacttggttgtcaatttttccaatgtaagaaaaaaaattatccagctagagtgtgcaaagtcagtacccagcttagatccagacacattcaagcattaaactttaaatggaaaagagtactgatgaggagagacattagcaggtaataaaatttactataaaattaccttctgaggttggcatacaatgaaacagatcaatggagctaaataaaacacattgaacaaataaaccaaggtttatgtatttttttgttgcctctgtacaaacttgctgtcttaaaacaatagatacatatttttttaaatcatcttcactgggctgaaatcaaggagtcagtaaggcccgcttcagaggctgcagagaagaatctgttccttgcctcttctagctctgccagcatttcttggcttgtggtgccatcaccccaatccctgttgctatggtcacattggcttttcttcttatgttgtcaagaacacatttccacaagttcaaaggcaatatttctttgaaaatttttttgaataccaagtcacccaggtttaggtaaagtaaaagctgattaaatgaaaggccaggaaggaaaacctgtacctgttggttaaaggactgaatataatgagtttatttatctattaatagttaagtgtgtcagaatggaatatgtgtggttcagaacattctgagtaatatgggcctactagtgaccagttcatagtgagatgacacatgactttgggatggggaagaatgcagggccactagagctaagggtaataatgctttaggccacgggagttcacagatgtctgatagggtaactaattttattcttaatagtcatacattgtttcaacattttcagaggaccaggaggtgataagaaaagcagtttctgagtgagagcaaaaccttacataactgtcctagaaaaaacatgttcctctacatatagataatttgattggcacagataaaaaatggaaatcaattgatttagctattgtgagtgctgtatctttatgacaggtgagtgcttcaacccatgtagaaaataaaacaactcttactagtgcatactcacaaccccttagggagtagaactgtctaaaacatactcaactgttcccttaggacagtattccagttcatattccacttttacagttttcatggaattttggagcttccaaaaaagacatgaactgtctgcattccctagtattctagaaaagtctccccacaaatgtttaatattgcagtcaacatgtccctactgcgatgggtggtccctggagggtattaacaagtgttcattggcaatcatctggttccaccaaacagcctttctggctttgatatatcttatcctcactgatcaaacaaatcaataattcatctaaggtggagttattgacattttccatggatgcatctttaagttccataagaggtgcttgcataaggactttagtcagaaagccatgtttagcatgatcccctgctcacgtatttttttctagcttctaaagtgcctttcatacatggaactttgtcttcattaggaaatttatttcaatagcgtcaagacatcaaataatttatgtatttggtgtccatttttataaagatacatgaaatatatgagaaggttaagaagaggtaaagaaggttaaggaacctcatcggctccattatatttggaagttgtgacctgtgttaaagcattgactatcactgcttatatttatcataatttggcatgcaaaaatgagagtcacaatttcagctacttgcattaattttacttctaagagattgaattttataatagagtcgggtagttattacataaaaagttttgcgttattccttttcaactttgagtttaatacattaaaacaattaattcagaagttgatatgagactgtccaaaatatctgtttgagtgtggacacttcttaaatgacaaaagcacagttaaaagatttattgattgagaagtgtaatggagttgaacactatgaagataaatttgtaatatttcataattactccaccaactggtagaacaaataatggatgcttttacaaaatagataacttgtactgtatgtgatatcataagatatctgaagacgcttcaaccaattttgacaagaaagatctgaagacgcttcaaccaattttgacaaggctaagataagctattttaagacaagagcgataagctatggctactatattaataaataaattatggtaggcaaggcaatgacctttgttgtttgcagtgttgttgagtagtatcactagggcatggtctttaatgtttacacagaaagaaaatttgtcacaatcggtgatcctgtaatcagttgtcctgtatatgggatcgtccagaacacattctcttcagagcggggcatacagaacggcgtggcttgctggggcttatttggggtctgaattgaagtcatggaaaaaatataaattcgaaggtttgataacctaataaccaaactctgtaatctaatatgatctgtatgaacagagctggctgttgaaactgaatagaaaagagaatgggacctttaaaacacaacttgatatctgaggggttaattctaaactcttcgtcaaagagagattcgtttttctgctgtttggccccaagattggcaactggataggcattggaattgaggaggaatactgttatatcaatagataagtcaaaagatctgcagagatttgtacaaaccttcttatcataacatgatgtatttgtactttaggagaaacaacaacatacatagatgtgaggctagaggattattgtatcttacattgtctgtataattcattacaggtatcaaatatgtgtcaatctcccagttccatcacaggtgcaatgataaaatacagtagttggtcaaatgatcatttttcctctcaatgtgaccatgtttattttcagatttgttaacaaattaagagttggttgatccaaaagaaagtctgcattgggtgagcttctcagccagtacatagagaagtgtgaggtgacacacactagtttgctataccaggaaacctctgtttcctgttctagggcagcagtagcagcagcacatggcccagtaattcttctctcaccatgccaggttcacctcacagtacagagtcctgaaaataaagaagaagatttttttttatctagaaaaggaaccaaacatgtcactttctagcctgctgaaggtggtcacagcttcactgtggctaggtacgggtggcccagtgggaatggactttctgtatgaactaaggactttggaagtatctttatggaaactttgggaaggaggggtaatggggtacaaaaattgaatttctttgtcccaatccactttatccttaaatcttcaaattctatcttttttccttcaggacctggcattgcccagaagataactcaaacccaaccaggaatgttcgtgcaggaaaaggaggctgtgactctggactgcacatatgacaccagtgatcaaagttatggtctattctggtacaagcagcccagcagtggggaaatgatttttcttatttatcaggggtcttatgacgagcaaaatgcaacagaaggtcgctactcattgaatttccagaaggcaagaaaatccgccaaccttgtcatctccgcttcacaactgggggactcagcaatgtatttctgtgcaatgagagagggcacagtgacagaactgtcggagggaggtgtacaaaagccctggggacctgcttgagacctccacctgctggagaaccaaggcgggaaatcaacatcacagacaggaagtggctacagctgtggcagcccagatgcagtgttgtaggaaatacactcaactctaagaaaatacctctttaagttcatagaccatgatcaaagttatcattaactaaaaactttcttatccctgaatctttggtttaaagtttagacataccaaatttgtgactgaagattgaagagaaaaaactgccgcaataaacaatttgccatttggccactaaattgaactggattcaaaaacatgtgactgaaaaatcatttaaaatctctgtgaattttcacatcaatttgttcagtaaatactggagatctacaaaaagttcatgaaaaatatgtattataaaaactatttttggatttcaatttttttttgcaccaaaataaacttacacttaaattgctataacatatgtagacagaatctactttgaggcactaagaaaaataggacagcaatttgaaaagaacccctattagagcaacagattctgctaaaatgaagcaaaagaaagcgtcacatttatggtgaagggtgggtagtagaatggtgaaatcatcaattctctatgaaactttacgaggtcagtgctccaaataaatcagcagtttgcaagtggataactcattttaagaagggatgagacaatgttgaaggtaaatcctgcagtggtagaccatccacaccaatttgtttggaaaaagttaaccttatttgtgccctaattgaaatggactgatgattaacagcagaaacaatagccaacaccacggacacctcaatcggcccagcttacacaattttgattgaaaattaaagttgagcaaactttccattccatgggtgccaaaaccattgcacctagatcagttgcagacaagatcagagctttcaataaaaattttaagcaagtgggatcaagcccctgaagcatttctttgaagagctgtaacaagagataaagcatggctttaccagtataattctgaaggcaatgcacaatcaaaacaatggctaccaagaggtggaagtggtccagtcaaagcaaaagtggaccagtaaagtgcaaaaattatggcaacagttttctgggatgctgaaggaattttgcttgttagctttctggagggccaaagagcaaaaatatttgcttattatgagcatgttttgagatatgtagacaaaactttaggagataaatgcctaggaaagctccaccagagatttcttcttcacgatgacaatgatcctgctcactcctctcatcaaacaagggcaattttgtaagagtattgatggaaaatcgttaggcatctacatagccttgatttggctccttggacctctttttgtttcttaatgttaaaaaaatctttaaaaggcacccattttcttcagttagtaacgtaaaaatgaactcattgacataattaaattcccaggaccctcaattatgcagcaatggaccaaatggctagtatcactgcttacaaaagtgttttgagctcaatggagcttatttcaggaataaagtttatattttttattttaattttactttacacgaaccttttgaaatctccttgtatttattgtgttatagacattgttttaaataggaaaggcattgaaatcttttatatttcccttctaaatatattatgttgtttatattgtttaatggattaatttgatttaggtttgtttgctgtgagtaaatggtacttaaacatttattttctaaaggtgtctactatgtgctaagagctcctttcatcttattaacaccttgaatgtggaagaaatcagtctccatactacagatttacctgcctctcaacattcctatccatgaagtgatcattatttagtggcttccagaaggacatgtggagaatgttcctcacagaggcacaaaccttttcatttatatattaataagacatcttttcttctaaaatgaatcaccatttttgaaatatatgaaatttccctttccctataatgtttccacatggtttatttcgttccactgatctatttgtttcactctatgacaatctcagaatgtagttttatagtaaattttataatctcttagggtaaatcacttttcaccaaaaatctttttcaagattttaaaaaataattcttgcacatttacttttcagtatgttaaaagttctgtcacattttcctcatgttcaatacccttctattaaactgacaaaacaaaaatgtctaaaaaccagacagttgaaattgcatttaatgaatatgttaacaaatatcaacttgttttcgtatgtttttattcagaaaaatgatattttttctaattgtaaaggatcttttatgttctctattacattgtgaagtttcttacttttatcttcatatggatttgtatataactgttcccacacgttcatctatatatatgcattttaaatgaaattatcttttatatattcatttttactgatattcccagtacaaacaaatgctatttaaaaatcatcttggttatatagctaagagtttctaactttaaagtacagataatttgcaatatattcatactacttgaaccattaaagtttattttatgaacctagcctaaccttaacccaacacctaaaaaatagcatgataaaaatatttactctccaatttttttttttagacagagtctcgctctgttgctcagactggagtgcagtgccactatctcggcttactgcatcctttgcctcctgggttcaagcgattctcctgcctcagcttcctgagtagctgggattacaggcgtgcgccaccaccacacccggctagtttttgtatttttagtagagatgaggtttcaccctgttggtcaggctggtctcaaacttctgaccttgtgatctacccgcctcagcctcccaaagttctgggattacaggcttgagccaccaagcccagcctactctcctattaaaaagtcaagaaacaacagatgctggcgaggctgcggagaaataggaatgcttttacactcttggtgggaacgcaaattagttcaaccattgtggaagacaatgtggagattcctcaaagacctacagccagaaataccatttgacccagcaatctcattactgggtatatacccaaaggaatataaatcattctattataaagatacctgtacttgcatgttcattggagcactattcacaatagcaaagatgtacaatcaacccaaatgcccatcgatgatagactggatgaagaaaatgtggttcatatacaccatggatactatgcagcaataaaaataaatgagatcatgtcctttgcagggacatggatgggggtagaagccattatcctcagccaactaacacaggaacagaaaatcaagcacctcatgttctcacttataagtgggagctgaacagtgagaacacacggacacaggaaggggaacaacacacactggggcctgttggggagggaggcggagggaaagcatcaagataaatagctaatgcgtgtgaggcttaatacctagataatgggttgataggtgcagcaaaccaccatggtacacgtttacctatgtagcaaatctgcatattctgaatatgtatccaagaacttaaaagaacatatttaaaattcattgaagaaattgaacatatatttgcaagtgtcccatgccaatataaaacacattataataagcatgtatacatcttattaaatcagaatgaatatccatatattcatattcatataacttgatataaaatagcagttggatacatagtattaatttaaaaattctagttttaaaatttataattttagatttttaatttaaattttaaatttcaaatttttaaaatacctcattttatttctgatgtctggaatcttatttagttgaaaatgtctctttgaattctctgagtaccatgagcttgtatagcttatgctgctgcctctaatgtagctgctattgttttcaatatggaatgaacaaggtgattggatttcttgaaccacttactataatagaacctctagatatttctaccaaataaagagtagagaacaaattaaaatacgccaaatgtatttttacagctactttcacatctattagatggagtctttcatagacattttatgaaagagtttcataatcctcacacttgttacaacatacagtctaaacaggcaagatctattcactctaacataatatctaagggatggtgtgaaggatattgcaagcatatacacacacacgcacacacactcacatctcaccacaagttagagtttacagatagcggtttacctttgaggtagttagagagaaccagtaaagaagtcacacatattcagcctaataagtaatgagttcaaatctaatagaaatgacatctaaaattggaatcttagaaacaagactctactaaaagataactttggaatgcaccaaaaatcagttttttaattgagaaatattgcctttcactaactcttcagtcattatcattgtatttcttggcatctacatctgggaaaacctttgtaaccacaggtaaaatgtaatatggaaatggtcactctaccttagtttaataaatgtattcaattgtcaagtgacagaaaatttactcttgaatagagatgcaaatatttaaattaagtaattaaaacccagaaggcagtgtattaacaaaataatgcagcttgatttttaaaaagttattattattattattttttttattattatactttaagttttagggtacatgtgcacattgtgcaggttagttacatatgtatacatgtgccatgctggtgcgctgcacccactaacttgtcatctagcattaggtatatctcccaatgctatccctcccccctccccccaccccaccacagtccctagagtgtgatattccccttcctgtaaagttatttattcacttatatatccatttatttttaaaaaatcattcagcacctacagagtgacaaactttgtgctgagaactcagtccatttaacaatcttattgcaatctctagcatgtaatagctcaatttctatactgtaggtttacctgccccataccagatttatccataaaatgattaataaattagtggctcttagagggacattgtagagaggcagaatttgaagtctttcttttctctgcttttgtgcttcattttacccctctttcaaaaacatttaatgccatcatgtggatcaactttgcacacccccagacctgttccaccatccaaaatcctcattcttttcaatcttctccttctacctccaacaccattttctccttccctaagctttgaatggtaatggttggttggtaagtgatcttgtattgtaacatcctcttgtatttgcatttgaaaagtagatgtgtatagtataaatcttaaagagaaatatgtttaaaaatttttaaaattatttttaattgtggaaaaatatatataacataaattttgccatgttaaccatttacaaatggacacttcagtagtgttaagtacattcctttgttgtgcaaccatcactaccatccatcttgagaactcttttcattttggaaacctgaaactctgtgactactaaacaatagctctctattttcttctccacctaatccctagaaaccagccttcctttctgtctttataagtttgactactctaggtactttgtataactagagtcatacaatttttttttgtgactgccttatttcacttagcgtaatgtcctcaaagttcattcatgtcatagtatgaagcaggctttcagaatttccttcctttataaggctgcatattattcaattgtgtgtacataccctattttgttaaactatttatctatcaatggaaatttgagctgtttctatcttttggctattgtgaataagctgctctcaacatgagtatgcaaacgtctcaatatttggggtatatcccccaattctctcaactttagaagtgatatacccagaagtgcaattgctgaatcacataataattctatttttaattttttaaagaactgccaaactggtttccacagtggctgctgtaccattttacattttcaccaacaggacacaggtgttttgatttctccacatttcatcagcacttcttttactatcattatttttgatatgaatagtagccatcctaatgggcatgaagtagtatgtcattatgatttttatttgcatttccctaataattcgtgatgatgagtatcttttcctgtgcttattggccaattgtatatcttccttggaaaaatgcctattcaactactttacccattttgaaatggggtgtctgtctttctctctctctctttctctctttctttctttcaagatggtgtttcaccatgttgcccaggctggttttgaactcccgagctaaagcaattcacctacctcggcctccaaagtcctgggattacagatgtgagccaccgcgcctggcctgggttgtcttttttttctgctgagttgtaagagttctttatatattctggatattgatcttttgtcggatatatgatttgatatttttttttccattccatgggttgtttatccactctgtcactccattaattgtgccctttgatgcacagtagtttttaattttgatgtagtcaagtttatctaagttttcttttgcatcctatgcttttggtattatagccaagaaattattgccaattccatgctttctgaaggctgaaaaaaaagaaaaaaagaaaaagaaattattgccaaatctaaatcgcgatgcttttcctgtaagataagagtgcagtttcactcttttgcatgtggatatccagtttttcccaacactgtttgttgaaaagactttcctttcacccttaaacagtcttaggaccctttcctaaaataatttggttgtaaatgtgaaggtttaattttgggctctctattgtattgcattggtctatatgactgtcattatgcaagcaccacacagcttttgctatattactgtagctttgtaatcagctttgaaatcaggaagtgttagaccttccaaacttgttctttttcaagattattttggctatttggggtttcacaagctgccatatgaacttttggatggatttttctattactgcaaaaacactattgggattttgatagggattgaattgaatctgtagattgctttgggtagcatcgacattttaatgatgttaaattctccaatccataaatatcagatgtctttcaacttatttgtgccttatttaatttatttcagcaacatttttgttttcattgtgcaagtctttagcattgttgtttaagtttattcctaagtattttattctttttgatgctattgcaaatggaattattttcttaatttccaaagtgttcattgttagtttatagaaatgcaattgatttttgtgtgctgtttctgtatccttcaagtttgttgaattcatttattagttctaactacaagcatatttaatggtggaatttcaggtgttgtgacagcagattggagaacaggacatttgtctcatgtccctcaggataactcatgtaggctgcaaaacttcaagcatacatagaagcatcaacttcataatgtaatcattttatatctttaatacatcaggcccttcaaaatttagtttaaatgttgagaagtcaaagaatgatgtccttctaagaataaatattctaacacatgatgatgtgctgaacaagatgaagaatttgtatttggatacatatttttaaagcaatgtttagttagtaattgaaaatactaaaccaggagaaaataatgtgcactctggtttccatactagagagatatagaagcagaaagttttacctcagtccacagttctagtaaataaacatccaacacttaaacttgggtcatttgactccaattgatgaattttcagcaaacaatgaaatataaaagtaagccaattcaatatacaactccagaagttataaaattaacagtaaaataaaatggttgagagtagattgaaggaattaaaaataaaagcaagaaattaatggctcaaaggaaaataacaaaatcaatgataaaaccacaacatgatattttgaaaataattacaatactaacatgatccagaaaaaaaaagtgagaagggacaaatgcatgcacaaaaaaaaacaacataattaagttgaatttattttgggaatgtaaagatgatttaatacttgaaaatctattaatataatgcttgaaattaacaaactttaagaaggccaaagatgttctaatgcctggtttggtggattgtttcatttggatctaggatgattcactgtacctgtgcatttgtgcaagctcatttaatttggttggctcttaaaaatattcggattctttctcttaatttgaccccaattatagatatagtgttattgttcttaaatttcttgttgcatttagattatttctatgaagaaaggggaaaatgataaatttattcaatcatatttatgacaaagttttggcttccatattattgtttttatatttttcttttattgtgaagtgtaccaagttttattttagaaattgctggaccagtaaatattgttcaagttgatgggttgtatagacttcagatttttggaatgttcttgaaaattattcccatttatgtccttaaaccttgcataatcttgtgaaataatgcttcataacaatgactgactgtgcacagattaaacaatgctttaaataatgttagtcattaggaagaattaagctatgatcctgtatgtgagaaattttcatactggttaatttgaacaactatgctttagactcctttatcacaagcaagtttccaggaacagaaagagagtggtcactggccatgaataaagttccagtactctggtggttcacagaagtttaggaactttttcagccttgctaccatgcattgctcatcaggtgtttaataattggtctgaaaggaatgcttatgccactacctggtggtcagctcctaaactgcagtttattcatcctttaaaatatgttttctttcctcttttagtcaaagaatgagacctgaaattatttaattattttaaaaaatttcatttggataaatagagcacctattaacttgctgtcttaaaatatttcaagggcttgggaaaaagtcacgttggtgtcttctaacttctctctgaaatttctctgaaagcaatttatactggaaaaaatagggaacacatgttttgctattaatgagatttatgttcaaaactattaactttgccatgtacttacttgctgaatacttttgtgttttgttacattttttttgtaaagtgtgatagtgatagcttctttagtatttgttgtgagaattcatcaataatgtatcaaagaagattaacaagtagcagatgatctaacaatgagaatattctcaatagacccagaaaaggcatgtgacaaaatccagcatccattcctgattaaaaactctctctaaatgagaaattaaaaggaactttctcaacttaatataggaaacttacaacaacctatgtcaagtgtcatacttggtgaaaaactaaaggcttctccctaagatcacacataagaaaaaagttattgctctcactgtttctgtttaatattgtactagaatgtctatccagtgcaataaggcaagagacagaaacaaaaggcatacagtttggaaaggaagaaataaatcaagctttatttgcagacaacataattgtttaagtagaaaatccaaagaatctgcagaaaatataccagaacaaataagtaagattgtaaaggttgcaggataaatgatcagtttgcaaagattaattgtatttatatattttcacatgcgacaatcagaaattaaaaataaaaacacaataccatttacaatagcatcaaaaatattaaatgcttacagataaatcttacaaagtatagaagacttggtaacttaaagccacaaaacctcatgagagaaattaagacctaaggaatggagagataaactatgttcatagattgatagactcaatattgttaaaacgtcagttctgtttcaattattctacagattcaatataaccacaataaaagttctgtcatttttttggttaaaattagcaggctcattataaaatttactcagaaatataaggcacctagagtagccaaaacagggttggaaaagaaaaaatttggagggataatattatcttacttcaagttgttttccacagtaatcaaaacagtgtggcatttgtatacagatagactaacagattaatagaacagaatagagcccaggaatagacccatatatacatgaacaactactttttgacaaaggtgcaaaggcaattcaatgtggaaaggatagtcttttcaacaaatagtgcttaaataattgaatatccatatacaaaaaaatgaactttgacactctcataccatatacaaaaagttacttaaagtgatcataaacataaatgtaaaaccccaaatcataacacttcaagaagaaaataggaggaaatttttgtgaccttggcctatgcaaacatttcttagatatgatagcaaaacatgacccataaaagacaaaaagttgataaattgaaaaattggttttcattacaacttaaaactgcctctggaaacaattctgtcaacagaattaatagatgagctatagactggaaaaatacttgcaaattgggtatctgagaaagtcatttatttgagttatgcaaagaacccacagaacccattaacaaaaaaaaatagaaaagtaaataaaaggggcaaaagatttgaacaaacacttcagcaaagaaactatatgaatggcaaataggcatatgaaaacatgcttagcatcattagtcattagggatatgcaaattaaaatcacaattaggtactactgcatacctattagagtggggttgacaaggatgtggagcaactgcaactctcaggtactactggtggaaatacaaagtaatataataactttggaaaataattgggcaggttttaaataagtcaaatatacacctgatatccgatgcagccattctactccaagttatttgctctaagagaaatgacagaatacacctatacaaaatcttgaatacacgtttgtagtaactttatttgtaacagcctcaaactgggactaactgaaatgtacatcaacagataaataacaaacacattgttttatatctatataatgtaatagtactactcagcaataaaaagaaataaaccattgtttcaaatgacaccatgaaagaatctcaaaataattatgctaagtgaaagaagataaaccaaaaaaattgtatatgatttaatttgtataaattataaaatacacaaactaatatatagtgacagagaattgcttggaaatgggcatgggagataggaaggttaagagaaaaagtacaaagaaatatgagaaacttttggggtgatgtaaatattcatcatgttgattgccataatagcatcacaagcctatatgtatgtcaaatcttataaaaatgttcactttactttggcgcagttaatttttatgtcaattatacatcaataaaaccatttaaaaatccaatttaaaagtacatgtcttcaacatcacagaagtattctgatatggtccaagatgcaaactgttctcactgggtttaaactatttttcttaagtatggatgacaacagtctacacccatgtgctctactgtttattttcaacccagcatcattccagcttattttgcattcccctttgtatatcagaatagaaatttgtagctgattttccagaattcattttcaacatagttctaggcttgtttctgacaaagtgatttggaaggtggaggagaaggagaagagatttgcaaacccaaacaatatctgggcctgaatttcttaatgaagtctgtatctgagaaactattcatatgctgactctggacgcattctttatctgaatctggggagagtgaactccaggaaacagactgaactaagtgtctgttcttagctatgtgtctaggtataaatgtttacaggtccttgcagaaagttagatccttctcccaaattttactctgataacacttctggaggttttttcttttctttttcattttatttttagatttacatgcggaggtttgtaacaagagtatgctgcgtgatgctgaggtttgggctcctagttggtcacccagatagtgaacatagtacgcaacaggcagtcacctggatagtgaacatggtacccaataggatgtttttcagcccctcccccctccatctctccctccttttggagtccacgatgtctattattcccatctttatgtctgtgtgtgcccacagtctggcttccacttacaatgagaacatatgatattttgttttctgtttctgcactaattctgcacttaagataatggcctctagctgcatacatgtttctgcaaaggatataatttcattcgttttatggctgcatagaattccatggtgtatatgtaccaaattttccatagtctatcacaattgatgggcacctaggttgtttccatgtctttgctattgtaaatagtgctgtgataaatatatgagtgcatgtgtcttttggtagaatgatttatattcctttggatatatagccaggtatgggattgctggcttgaatcataaatgtttttttagttttctgagaaatctccacactgctttccacagggctgaactaatttgcattctcagcaacagtgtataagcattccattttccctgcaaactctccagcatctgttattttttgaattttaataatagctattctgaccggtatgagatggtatctcattgtgattttgatttgcatttctttgatgattagtgatatgaaagattttttcatatgcttgttggccacttgtatgtcttctgctgacgggtgtctgttcaagttctttgtccgttgtttaatggaattatttgtttatttcctgttgatttcttaaagttcactacagattctggatattagtcctatgtaggacgtatagtttgcaaataatttctcccattttgtaagttgtcttttaactatgttgatagtttcttttgctgtgcagaagccttttagattaaataagtcccacttgccaatttttgtttttgttgtaattgcttttgagaacttagccaaaaattctttgcctaggctgatatccagaagtgcgtttcctaggttttcttttaggatttctatgaggtgttacatttaagccttcaatccctcttgaattaatttttgtatatggtgacagataggggtccagttttattcatctgcatatgtctaggcagttatcccagcaccatttgttgaatgagtcctttccccattgcttatttttgttggctttgtcaaagatcagatgatcataggtgtatggctttatttctcggttctctattctgttccatgggtctttgtgtccgtttctggaccattactaaggccaagttttagttacttagccttgtactacaatttgaatttgggtaatgtgatgtctctagttttgttctttctttttgttaaggattgctttggctattcaggctcttttttggttccatatgaattctagaatggtttctactaattctgtgaaaaatgactttgacaatttgataggaatagttttgaatttgtagattgctttgggcagtatggacattttgacgacattgattcttccaatccataagcatggaatgtttttccatttgttcgtgtggtctatgatttctttcagctgtgttttacagttcttcttgtatacttctttcacctctttggttagctgtattcctaggtatttgggggcatgtggctattgtaaattggattgcattcttgaactgactctcagtatgatcactattggtttatagaaatgctcctgattttttaatgttgattttgtaccttgaaacttcgctgaagtcattcattagttctggagtcttttggtggagtctttagtgttttctaggtatagaatcatattgtcagtgaagagagataatgtaacttcttctttccctatttggaggccttttacttctttcttttgcctgcttgctctgggtaagacttctagtactatgctgaatgggagtacagagagtaggcattcttgtcttgttcccgttctcaaggtgaacgcttccagcttttgcccattaagtatgatattggctatgggtttgtcatagaccactcttattattttgaggtatattccttcaatacttagtttgttgagggtttttatcgtgaagagttattggattttatggagtgctttttctgtatctattgagatgatcacatgggttttggttttaattctgcttatgtggtgaatcgcatttactgatttgtgtgtgttgaaacaactttggatcccaggaatgaagcctacttgatcccaggaatgaagattagctttttgctgtgctgctggattcaggatgctagtttttgttgagaatttttgtgtctatgtgcatcagggatttgatctttagttttcttttatcattgtgtctttaacagatttttggtatcaggataatactggatttgtagaacgatttagggaagaatctcttcttgattttttggaatagtttcagcatgattggtatcagttctttgtatgtctggtagaagtcggctgtgaatccgtctggtatgtggcttttttattggtacattttttattactgataagctgcacttcactaaaatttaaaagttacgctcttatgaaatgcaatgtcaagaaaatgggagacaaaatgcaaactgagtaatccattgcacttgaacaaatctttcttgatattttagtttctctccatgtaagagacatatttcagctgcatttagtctgccatcttaccaaaaacaggtttttgttttcttttgttatgttataaaatgaaaactcacaggaagtaagcataatgaagtgtttgtttttactgcagacacttcataggaaaagaccagctttaataatctgtgtaatcatggggacatttttttgtgatgacctcagagtgttatctctgatagttgataaccgtcttggtataggacagtgttcacaaataaaatcttgtaaacaactatcaggctggcagcaacaaaaccatcagggaagtttttaaaaaatgaaaccctttgaatcttggaaattgtggtttgaaatgttggaaatcgtgattcctaaagttagtggtcttgtcccaacatctgtaattttaaatgactcacaagttaattcagttctcacacaaccaggttttagaacctcgattatcagccgatgtatctttatcaatttgtaaagcaagagaagaggaaagttctaactcatgcttcagtctgttgatgcaaatctacatgtggattccctacatcatcagaggaaattgattaaactttggcaataaaatgttggcatatgaccacagtagaaagcgtccttgaggccagatctccagattatagggttaacacttgttgcctgattgtcataagcaagcaacttgtcttggagtcattgaaatcgtgagggaataaactattaatctgaggtcatatcttatcagtaaatgtcagtcactgctctacatgttaggatacagtgctgaaaaacatagactcagtaacagcaagacttcttaacattccctctgatttcaactcaaaacccttgtctgacatcccattgaattataccactggtctgcaatggatacgtaaaaatattggcctgtattaaaatatccaagaaaatggaactctcacctacagtcatactctaggatgctttgctaaagatcttttgtttcaggtagtgtccaaagaacaaaattgacaaaatagaccatagagatgacaacatctgcccttcatatttacaaggaccacctgagactggcatgggccttataaatgaggtcagggttgaggacctatttctgacttttggaaggagtccaggaaaacattcatcccagttcagcccctgtccaccagagggagtggcttcctaacacaaactcatttcctgctatcactgtaggtttcactgtgatttcttcatgttaaggatcaagaccattatttgggtaacacactaaagatgaactattctccaggcttagtatctctgatactcttactgcttggttagtgagatgccttttaaaatttggtctctgtcttctatcaagccaaaaaaatctttaaccataatttgacctaagagcattatgctcaaggctaaacagatctctctctctctctctctctctttttttttttccctaggaagaacccgtggaaattcagtgacccagatggaagggccagtgactctctcagaagaggccttcctgactataaactgcacgtacacagccacaggatacccttcccttttctggtatgtccaatatcctggagaaggtctacagctcctcctgaaagccacgaaggctgatgacaagggaagcaacaaaggttttgaagccacataccgtaaagaaaccacttctttccacttggagaaaggctcagttcaagtgtcagactcagcggtgtacttctgtgctctgagtgacacagtgacagggactgcagggggagctgagcacaaactctgagcagcacggggggcccggctgctgagtgtcagccactgtgatccactctggttctagcacagtctgtggttgtttgtgcctcagtttctctgattgatgcagtaatcatacacatggccagaggagaaaaacaagaaatgaacatccccaaacccagctcttggttagtgaaattaaaaacagacattgacaccaaatagttcctcatccagtgccaaagtaatttcaaggttaaaccacagaaacaatgaagctgtctctgtgatcatccttgcagacaaagttcaacccccacctcttgttccaggtcactctggtagatattggaggtggatgtgttctattacatttttacagagccaaatatgccagagaaggtggcgtctgtacaatgtctctgtaacagagtacagcaggagagatgacgtgagagccacagctcctcaattcagttcaaatgtctatgcaggattcttaatagagaaagaagggaagagaagaaaggaggagggacagaatgtcacatgtaaaaaaataatacggagaagaaagcaacaattgtcagagagagggaagttttcttttttggtaagccagatggtagacaaaggctgatgttccaaaaagaaagggaaggatcaaaatcattattgaagaaatgactcatttgtaaatcataagtattccttgcttgttacattgatcaattggctttctaacaacaagtctttaagtgagttagttttgcagtgccaatggaagattaagcatacagatttatatttgtatccctgtgaaatcctattaaagacacagtaaagaaattgaaaagggcataaaaccacaaaaagaatagaaaaggaggtgacagcagatggtgataccaatacaattttagaaggcaggagtgtatggagaaatgaaaacttgcatagcagaccagataaagaagaaacctgggcccagtgaaagaagacaacaaggaacaccaatgtgtgttgagcctttgtggaaaggtttagaaatcagaagtaccaatgacctttgaataattggtgaagataatgctttgtgtgtgtgtttctattttgagggtatttgaaaagagggtatgaaaagaggaggagaaagtgagaaaatgtataattaattgaccacccatgctctccaccactgcatgtataacaagcaatgctcacttcccaaacccagaagaaagctggaatttaatatttcatgaattgaagtgcagaacacaataacacaagaaagcagaataaaattaaaatgtaaaaatataatagtcaattatttaatataagaaatataaaatattgtttatgaaatattctcgtagtagtctatgtgtttcaacccaattgtcttctagataagtttcactaatttatactatcagtagtggtgatttggcaggatacctattttccttaaaccttatgtattactaaactttttgacattggcttatgagttagaatttcatttaaagaatatttcatttatttatgaattagatggagcgtcatttaatatacttaaaagctatttacattttttgatatattgccatttatatatctgccccccccccttttttttttttaccatttattgtctttattttccacatctaccattgttccaactatgagatactggcaaaccctcaccctttgaaaaattctttattttttaagagcagttttagtttacagcaagattgagagaagggtacagagatttgccacacaccctctatcccttcccagatatatatcctctcccattatcaacatccaccaccagagtggtacatttgttacaaatgatgcacttacattgacatgtcatagtcactcaaagttcatagtttacattagggttcacgcttagtgttgcataatatatagatgtggacaaatgtgtaatgccatacatctatcattgtagtatcagacagagtaatttcactgtcctaaaagtcccttgtgctctggtattcattcatttcccaatataacccctggctacctctgatcttttagtgtttccatgattttgccttttccagaatgtcatatacttggcatcatacagtatgtagactttccacactgacttctttcacttagtaacatggatttaaggtttctgtttctttcatgtcttgatagctcatttttttttagtattgaataatattctattttctggatacatcatagtttatttatccattcttcttctgaagggtattttggttgcttcgaagttttggcaattatgaataaagctgccacaaatatccctttggaggtttttgtgtagacgtgttttccactacttggataaataccaatgaggaaaactgctggatcatatggaaagaatttttttttttttaaaagctgccaaactgtgctcaaagtggctgttccattttgcattcccaccaacaatgaatgagagttcttttttgtttatatccttgctagcatttggtgttgtcagaggtctggatgttggccattcaaataggtgtatcatggtatctcattgttgttttaattttcatttccctgatgccatatgatatagaacaacttttcatgtgcttatttgccatttatatattttctttgctgaaatatgtgttaaagtcttttatccatttttttttggtcagactgttttcttattgttgaattttaagatgttttgcataacagttcttgatcagatatgccttttgcaaatattttctcctcgtctgtgttttgtctcccattttcttgacattgcatttcataagagcataactgttaaattttggtgaagtgcagcttatcaataattttttttccagagaacatacctttgtctttgtataagtcgttgccaaacccaaggtcatctagattttctcctacattgccttcttggagttgagttttgttttgcattttacatttacatctatggttgctttttgagttaatttttgtgaatagtataaggtctgtgtctagagtctagattaattttcttttctttttctttttctttttttttttttgcctgtgaatgtccagttgttccagcaccatttattgacaaaactgtctttacttcattgtattgcctgtgctcctttgtcaaagattagttaactacatttatgtgggtctatttctgggttctctattttgttccattgatctatttgtttattcttttgccaatgtcacagtgtcttgattattctagctttacagtaagtcttaaaatcaggtattgtcattcatctgactttattctcctgtaaaacctttttttgttttgataattctgggtcctttgcacctccatataacctttagaatgagtttatcaatattcacaaaaaattgctgggattttaattgagattgcattgaacctacagattaaactgtgaggaatgaacattttgacaatattgagtcttcctactcatgcacatgtcatctgggaacaaagttatacttctttttttcctaatctgtatacttttttttttttttacttgtcttgttgcattagctaggactcgcaatatgacgctgaaaaggagtggagagaggcccatctttgccttgttcctgatgttagtaggaaagcatcagtttctcataattatgatgttagctatagattttggaacatattacttatgaagttgaaggaattccactctatttctagttcaccgagagtttttatcatgaatgggtgatgaattttgttaaatgctttttctgcatttattgataaaatcatgtgatttttctagagacttgaaaagttgagaagtttatagccgatagacacaggctcattaaaagactgagaacaaattgtgggcctatagaacacttcctctcccctcacaccttaccaccatagcactaacagcctatttacagccgttccttttaccaagtatgtcatgtctggctatcaaataaaaaattacagggcgtattaaaagggaaaatacaattgaaagagacagaaaaatcatcagaaaaacacatcagggttgttggaactatcagacccaggaatttgaaacaaatatgccaacggctctagtaatgaagtagagagcatgccagaacagatgggcaatgtaacagagagaccgaccttctaagaaagaaccaagagaaaaaaaaagctagagatcaaaatacagcaacagaaatgaagaatgtcgttggctgacttattaataaactggacgtagctgaggaaagaatttctgaacttaaggatatatcagcagaaacatccaaaactgaaaaagtagagaaaacaaagactaaaaaacacccaggaaagagtatctaaaaatattcaaaaactgtggaacaactatagaagtataccatacatgtaatgggaatgtcacagggagaagaaagagagaaattaacagaaaacatatttaaaacaatgatggagaatttctcccaaaataatgccagatgccaaaccacagatctaagaagctcagagaacacttggtagcataaatgccaaccccctccaaatcctaagcatatcattttcaaactagaaaatcatagacaaagaaaacatcctgaaagaagctggcaaggggtggagtgggggaagtgccttacctatacaggaacaaacacaagaattacatccaacttctcttcagaaatcatgcaaggaggagaaagtatagtgaaatatttaaggtattaacagaacaaaccaccaacctagaattgtgtacccagagaaattatccctcaaaagtgcaagagaaataaagacattttcagacaaaaattggggatacgtgttgccaagtagccctgccttgcaagaaatgttaaaagttctttaaagataaattaaaagttcaggtttcttctatggcagagttgtgtaaatatgaatacattcaaaatataaatgtataaataaagataaacctcaagtaagtctcagttcaactacagaaaaataagaaagtgcttttatgagatatttagctaaaagtgcaattcctgtttgtcttttgcacactagtggagactgtcccataaccagagaacccacttgcaaatttgaaaacctaattagcttccttctcagaaacactctgcttattcttacatttatcagcttctgagaacatgacagcaggtgtaagaagcttctccatcagtaatccaaactcggtgcctgtcattgtaaggaatatgcaactgatgctggagaccagggatttcattcctgcttttgcagggacgaagtgagcttgtgtagaccatgatctctctcctgaatctacgacaagaattctgctactgcttgatgaaaagggggtcactgagaactctggattttttaatgcttatttgattccaatgagggggcaagtaaaggctctgagagcctgatggttgctctctctgaactcggtaaaacattgtaaaaatagtacatgaaaataaaataatacaattttattattgtcttgtaagtgtgcagaaaatgatactctgtcttagttttcccttagtcgtatcaaagtcttgaaaatttagcctttaccaaagcatttccttttccatctaggcataacacttctgctctaaactcatataaactattagaacattcctcaattaccacaaaaaatccttcaatttcctagtaattagtcacagaagaaagctattatgataaaaacagatggtatttgttctagcatataagtgaataatttatgtttcatgagagtagaagtcaagcatcaaatgatcaaagctgaatagaatttttagcagtaggtttttcgtatcctcctctccaaatttcatcctctcctttcttgaaggggttgacaaagacaaagtgtggcctgcctgtgttctctctcagctcagtcactttcacgtctttgaaaccaaataatgccatggggctgagtccttctcagctgaatccatgaaaaatagttcatcttttcacaaactggtaaacaagtgaagcatttcaattcacacattgggaatgtcaccatttaccatgtgatttgttgattagggaacaaaaaggagaggtggtgaagtgagcagttaagagtaagaatttaggagcctgtttgcctgggtttgaatctgatcttgaatgcttataactgtaaaatcttggctaagttgcttaactttctgactaccatttgttgtggggattaaatgaatatatatatttgaaattctggcccatgataagtgctcagtaattgttagctgattataaaagctgctataaaatcttctataatattgagaaactaagaagtcacttgtgttcagggagagaaaaattaccatttcggtagttaattatttagtaaataagcaagaaaagaagaatacatgttgacctaaaataataatgaagcccttatatgtacaatgtgctgtatcaggacatttgtctactgatagcagtataaattattgcttttacctggaaagaacttatcagaaaaaatttattccataaattgaggaacaagataaaatacataaaaacttaaccaattgttaaaattataagtatgtggacaattaagttttaaaggtattttcaggaggagatcactgtgttacagaaaagtcaaggagaggcatcatggggaaatagaaaatttaatcaggctttaaaggacagacacacattaaatttgttcattatacaattatttcttaaataggcaacaggggtttttgtaggtttgatgaatagaataataaacaaaatagacaaagtcagacaccagaagagcttacctcatgaggctcgagtctagctttgtctacagtgttcaactttctcttacagaaatatcctatgaagttttcgttctaacatagatattgctcttgcttaccataataattggcctgttttatgtgatgattaaaaggtaaggtttttttgttttgtttttggaaacaggtatcactacgttgccaaggctggtcacaaactcctgggctcaagcgatccacctgtctcagccaactgagtagctgggactataggcccacactaccacacctggccaaggtctaagtatttaagtgctgtatctgtcacttactaaattatgtggccatggacaagtacttaatttagagcatctacacatcatcaattttaataacatacaacttaccacatgattgtaaagattgaattaaattaaatgaatttaattacatgattgaatttagtcaaaaataatttttcagctgatgatagttattctggaatgtggatgaaatgttgataaaacagaacataagataaaataactaaaaaatttaagtatagattaaggtttagctttccactctcctgctattgattatgttattttactatggttaaggctgagtcaccctttatttcatattgaccttattccatccaattatttgaactgactgtaatggctttcttgtttggtttctttagttcacaggttttatgcacagaatgaaacattcttgcccctggtgtaacttaatgtaaattctaagatgaattcacatgagccttatggagcaggtgtcagatataatactattatattgagctatggtgccaataattagatccgtatctgggggctcatttaacaggtttctgcattgaaaggagagaaaataacctttctaggctttccttggggaggaatgctttttggatattcaatttatgacttgtacatacatggtagatgctcaggaaggattatagaagaaaaaaaggaaggacaacaatctggcagacaaacaagcatcactctccaacaaatcagcacctggtcctaccaaggtccttttccatgttacctcttcagacatcaggaggagctgtgttatctgtgcatgggggaatggatcttgtttgtggttggctgggaggactctcagcttcctgtaataacagaactctgaatattcactcagagaaacaagctattggcttggtagtgtttgagggctcccagaccccaaccagagtccgcagtaagtctcatggataaagtggagaagcccttgggagtttgtggagaagcccttgggagttttgttcttgattttctcttggcagctgtgctgtgagttttggggctctggaaatatcattgaaaagagcagtttgtagtatcttctttaaaagtctgcacttggacacaggaaggggagcataacacaccggggcctgttgtggggtggggggacggggtagggatagcattaggagatatacctaatgtaaatgactagttaatgggtgcagacaccaacatggcgcatgtatacgtatgtaacaaacctgcgcgttgtgcacatgtaccctagaacgtaaagtataataaaaataaataaataaataaataaataaataaataaataaataaataaataaaataaaagtctggaagttatagaagggtggttagggcctctgtgctcacctgtggggacttgaaaggagagtatatcttccaaaagtagtcagccatgaatgaatgtcctctgtctgtggttctctgtttaaacaggggtgaacagcctccatattctggagtagagtccttcattcattcctgagtatccgggagggaatgcacaacattcttaattgcacttatgaggagagaacgttctcttaacttctactggttctggcagggtctggaaaaggacttgtgtctttgaccttaattcaatcaagccagatggaggagggagacaaacattttaaagaagcgcttggaaaagagaagttttatagtgttttgaatatgctggtctctcatcctggagattcaggcacctacttctgtgctttgaggcacagggtccccaagcacctgcagcctgtaccacaacctgcatccgggacccttgacacagccttgccttgcaggtgggagtgaaggtgttgtctttatatgtagagagaacttctttataaactctgtctccaaacagaagcgaagggtagtgcagaatctttcttatgtgatgaagctgaatttatattaaattaaattgcattttgttattattgaaatttcattcttcaatgtagattgtgctgtgctggttctgggcctgtttgcccaccgatcccttccacagctctgtcctttactctaaagtcgcagaccactgtggcacaggctctgaggccaagaggcaagttttctccatgctatactctcaccaacagtattttacccatttgcttgtaaattcatgatgtttcttgtatttgtatcatctatactattatttacttaattaaatgttaaattaacttttatgttgagtagacttcaaaactgtgtaaaatattgttcttattttaatggatactatcagtgaaattatattttatataaactatacatctgatgtgcaggctatgtttgttcctgatacaaactaaaataacattacatgtataacaattaaaaagaccatctgtgtactgcctaacatgacctcctatgttaaccacaatttagaaaatactgattcagctcatgtccctcatttaatagatgaaaaaagtagaatcaacagggacagcatcacttactcaaagcatgaattacagcaaaatggaagctaggaatggaacacagacattgtggccccttgtcacttgctttttccatgaaggatgtaaagtaggattcagtgtttgaaaaaaggagtggtatgttgtaattttaaactaaattatacttttattacttaattatatgttcattagaataaattaggagatataaacacccagaaaacatagaacactcctataatttcataacctagaaatgatagctattcgcatgcaataaaatttttggtgcacatgtaaagctatatttttgtataaatgtggtttataatacatcaagtatttattagcacacttttctttcaactttatatttaggtattttcaactcaggaagcaaatattgaagaataattttaaattattgcctagtttccattacataaatatgcttttttaaaaactcttttttttggtattgtttctacttatacagtattacagataatgtttttattaacatcattaaaggtgtagttttaatggaagtgaagttgctggaataaagaaaaacacatgatactgaatcccttatttccatggagctatttctcaccaaactgtaatttcaacagtagcacatgatgatgctaattttccaatattttaccaattgtaaacattattattttagattagcttccattttgttaagtaaaatattgttttttattattcttttcttttaatttgtgattttatacctttgattattaaaataaataaataaaatgagatgagaaaacatcagatgccatcacacagaataggtatcctttcatacagtaacatgtattttttgaaagtgtgaaaaatactgctttggtccaagctaccttctaactggtctctcttttctcaaggcaatcaattctctatgtccttgctacttgaagtgtgagccagcattgtctgaacttgtactgattctcaggctctaccctaggctgattgaatttgaatctgcattttatcaagatttccaggcgattctatcacatcaaagtttaagaagcacccatctgatgagttgccagaatgattttttaaagtataaataaagagctttctccacttgtcaaacgtgcttcaatggctttctactgctcctggaataaagtgtggtggctttcaggctgtgatataaaaggatctatataatcggaacctcccttggccctttggctttaaattctcttttcctggctctctgtgcagcaaaacttctgattctctttcccacatgtaggctctctttcatccatctgaaatgctctttccctaaatcttgttgagcctgactcaacaagagtcatccttcaggtctcagctcaaatgttactactgtagaagaaaaacctactgacctctgctactcttcctgactaatatatctgtctgtaatcctccccctaactctgtcagaacactctagttatttctcctatgttatttatcgtaacttacagttacatttttggtttatttgccagtatgttcattggccataccttctattagaatgcaatctttatgatatcaggggtattgttggtttagttcatggcttgattctttttgtttgtttttctttttttttttccaatttttattttaggttctgagggtacatgaaaaggtttgttatatgggtaaattgcatgtcacagggacttggtggagagattattccatcacccaggtaatgagcatggtacttgataggtagtttttggatcttcaccctcttcctactctccacctccaagtaggccccagtgtctgttggttccttctttgtcttcatgtataatcaacggttagctcccacttataagtgagaacatgcagtgtttcattttctgttcctgtattaatttgcttaggataatgccctttaactgtatcgatgttggtgcataggacatgatttcattcatttttatggctgcatagcattccatggtatatatgtaccacatttttttccagtacaccactgatacgcatctagattgtttccatatctttgctattgtgaatagtgctgcaatgaacatgtgtgtgcgagtgtctttatggtagaatgatttatatttctttgagtatatacccagtaataggattgatatgtctgatagtatttgttttatgttatttgataaatctccaaatggctttccacagtggctgaactaagttacattctcaccagtggtataaaagcattcccttttctccccaaccttgccagcatctgttattttttttactttttagtaatagcctttctgattggtatgagatggtatctcattgtggttttgatttgcatttatctaatgattaatgatgttgagcattttttatatgcttggtggttgtattgatgtcttcttttgagaagtatctgttcatgtcgttttcccattttgtctgttcatgttgtttgttttttgcttgttaatttgcttaagtttcttatagattctggatattacacctttgtctgatacatagtttgcaaatattttctcacattctgtaggttgcctgtttactctgttgatagtttcctttgctgtgtaaaagttctttagtgtaattaggtcgcatttgtcaatgtttgggtctttttgcaattgcttttggagtctttgtcatgaaatctttgcaaggcctccagaatataatttcataagttttcatctagggtttttatagttttaagttttacatttaaatctttatttagtccatcttgaatttatttttgtatatggtaaaacaaagagatccagtttcagtcttctgcatatggctagacagttacaccagtaccatttattgaataaggagtcctttactcattggttgtctttgttggctgtgtcgaagatcaggtgatcataggtgtgtggctttgtttatcggttctctattctgttccattggtttatgtgtcgatttttggattattaccaaggctaagttttggttacttagctttgtactagaatttcaagttgggtaatgtgatgtctccagttttgttccttcttttgttaaggattgctttggctgttcaggctcttttcttggttccatttgaattttagaatggtttctactaattcggtgagaaatgacaatgataatttgataggaatagtgttgaatctgtagattgctccgggctgtatggacattttgatgacactgattcttccaatctatgagcatgaaatgtgtttccatttgtttttgtggtctatgatttctttcagctgtgttttgtaatccctattttaggtatctttcacctccctggttagctgtattcctagataactttttttgtgtggctatagcgaacaggattgtattcttgattttgctctcagtttggaggttttcagtttatagaaatgctacttattcttgtacgttgattttatatcctaaaactttgctgaagttgtttattaggagccttttagcagaggccatgggttttctaggtaaaaagtcatatagtctgtgaggatagagattttgacttcctctcttcctatttggatgccatttatttctttctcttgcttgaatgttctggctaggatatccagtactatgttgaataggagtggtgagagtgagcatctttgtcatgtttttgttctcaaagggaatgcttccagcttttgcttgctcactataatattggctgtggatttgtcatagacggctcttattattttgagttatgtttcctcaatgcctactttgttgaggagttttaacctgaaaggattttgaatttcatcaaatgttttttatgtctattgaggtgataatgtagtttttttttttttagttcagttcatgtaatgaatcacatttattgatttgtatatttaaacaaccttgcatttcagaaataaagactacttgattgtgctggattagctgcaggatttggtttggcagtattttgtttaggatttttgcatgtgtattcatcagggatattggcctaaagttttcttcttttgttgtgtctcttctaggctttggtatcagaataatgctggcctcatagaatgaggtaaggaggagctcctattcctcaatattttggaatagtttcaaaaagtaccagctcttctttatatgtctggtagattttggctatgaatctttctagtctggggcttttttcttgttgtaggtttttattactaactcaatttcagaactccttattggtcagttcagaatattgatttcttcctgagtcaatcttgggaggttgtatttttccaggaatttatccatttcttctaggttttctggtttatctgcatagaggtgttcaaaatagtctctgagggttttttgtactgctcctgtgacatttctgattgtatttatttggatcttctctgtttttttctttattagtctagctatcagtctagcaatcatttttattctctcaaataaaaaccatttggttttattcatcttttgtatggtttttcatctccatttcattcagttcagctctaagtttgttatgtctcttcttctgccagctttggggtgggtttactcttgggtttttttagttactctagatgtgatgttaggttggtaatttgggatctttctaactttttgatgtggatgtttagcactatgaactttcttttcaacactattttagctgtgtctcagtgattctgttatgttgtatcttttttttcattagtttcaatgaatcccttgctttttccttagtttcactgtttactgaaaagtcattgaagagcaggttgtttaatttccacataattgtatggccttgagagatcctcttggtattgatttctatttttattgcagtatagtccaagagagtggttgatataatttggagtttttttgaattttttgagaattgctttatagtcaagcatgtggttgattttagagtgcagataagaagagtgtgtattctgaggttgttgggtggagtgtcctatagatgtctgttaggtccatttggtcatgtgtcgagtttacaacccaaatatctttgttatgtttctgcttcaataatctgtctaacactgtcagtggggagtttaagtctaccagtattattgcatggttatctaggtctcttcataggtctctaagaatttgctttatgaatatgggtgctccagtgttggatacatacttatttaagatagttaggtcatcttgttaaattgaacacttatcattattcattatttaatgcccttccttgtgctttttcatcattgtatttagaaagtctgttctaactgaaattagaaaaagtaacctctgctctttttggttttctatttactttgcagatttttcactgtctctttactttgagcctatgtgtgtcactgcttgtgaaatgggtctctaggagacagcatacagttgggtcttgcctctttatccaaattgctaccctctgccttttaaagtgggtcatttactctgttcatgtttaagtttaatattgatatgtgtggatttgaccctgtcttcgtgttgttagctggttgctatgtagacctgattgtgcaatttcaccaggtgtggtgggtgatgcctgtaattccaacactttggcaggacaaggtgggcaaattgcatgagcccagtagtttgagaccagcctgggtaatatggcaaaaccctgtctctacaaaaaaataaaaaaatttagctgagtgtgatgctgtgtgcttatagtcccagcaggctgaggcaggaagattgattgagcctgaccagtcaatgctgcagtgagccatgattgtaccactgcactccagcctgggtgacagaatgagaccctgactcaagaagaaagaaagaaagaaggagagaaggagagaaacagagaaagaaagaaagaaggagagaaggagagaaacagagaaagaaagaaagaaggaagaaagaaagaaagaaagatagatagatggtggagctgttttacagtgtcaatggtctgtcttaattgtgtttttgtggtggcttgtagcagtcttttttccccatgtttaagcattcctttagggacctcttataaggcaggcctggaggttacaaatttctttagcatttgcttgtctgaaaagaattttgtatttcctttgctgataaagcttagtgtggttggctatgaaattcttgtttggaatttattttctttaaggatgctgaatataagcccttaatctcctctggtttatgaggtttctactgaaaagttcactgttatcttgatggggtttccttagtagatgaccagccccttccctctagtggcctttaatattttttctttcccgttaaccttggagaatctaatgacgatgtgtcttggagatggttgtcttgtacaatgtcttgctggggctccctgagtatcctgaatttgaatgttgaccttcctagtgaggttgggaaaatttttatgggcaatattctcaaatatgtttcccaagttcctttctctttctctctctctttcagggatgccagtgaattataaatttggtgtctttacataatcccatatttttcagaaatttttgttcattattttttattcttttttctttatttttgtctgactgagttgattccaagaactattctttgacctctgagattctttcctcagcttgttgtattctcctgttaatacttaacaattgtattataaagttcttgtaatgagtttttcagctctatcagaacagtttggttctttcttaaaatggctattttgtctttcagatctcatattattttatttctttacattgtttagattccttggattgggtttcaattttcttatgaatctcaatgttcttacatccaaattgtgactgctctgtgtgtcatttcagccatttcagcctggttaacaaccattgcctgggagctagtgtggttgtttggaagtaagaagacactctagcttcttgaggtgccaaagttgtcgtgttggttatttatcatctgtgtaggctgatgatcctttaatatttgaagttcttgtcctttgaattttttttttacttttgtattattttatgcccttgagggatttgactgtggaataagttgcgttcagtcaactggcttcatttctggatgatttcaggggtcccgggttcagatgagcattcctgcactgcatgctctaaccctatggggttgggaccaggcccacttctttgttctctggcccctttaggttaagtaccgactgaactggaggggctgaggtgttactggtttgctgacatcaacactccacttgggggtgctggcaaaagcacttcattgaacttgtggcagcaggatcagggctcatgtacacctgtgccaggggcaatggcgggagggtgtggatatgtgtcagcagtggcctgtctgcagaagctctctgatggttaggcagagtttgctggtgaagtagctatgacaccagtcaccaggaagtgccctggttggacacctaacgcagagttgcaagtaggcatggtcaggtagggaccctgggagaggtcggcagacaagggggtgctcagatcagactagtcctgacccatgggcaagacaccgctactctgtccaggtctgacagtcaacaaaggctagagccacgtagaggagcatggtgcaccttggggaatgggcatccctactgggctcactgcctctattcccatgctaaacactctgggcttcacacaggctagagtcctgtcactgccagcactccaagtagctctccctgccagctcaaatttctatgggcatcatggggtctcctgcagttaggattcgagaggtccatgggaggagttagcaaatgctcacctatctaattcagcctttcctctggagacattgagcgtcatgaatgagtcccagtgcttggcagccctgtgcagggttcccgggttcctctcactttggtccagggtctgagtcttgtctccatccattctcaatgcattctttctgacgataccctcagagaatgcaagtcttcctgatggtctgatctcttggtaggagaagctctttctagctgtgtctaattgacgatcttggagctcctcttcctggctttattcttagtgtctagaataatgactagcccatagtaatcagtcaaaaaatctactgagtgaatgaagaatgaaatttgtttggccctcccctctttctcccttttcccttcctctcattcccactctagcaactttgacctttgtgtatgttgtctctacttcactatgtggggcagctcaattttctctggccctcacccccagactcagaacccagtctttttgtacttagtggcttctgtcaaatagattcactcagggcctcaacctttcctcacttaattgacctcaccttatcagatgtgatgtgaaggactgagtcaactcttaaggctagtaacccatagcgaaatatctaaaagaaaaacgacatacttaaaagatgtttggaaagtataaaagtaacttctcaagcctaataattatgagcacatatcaaagttttatttcaaattactgcaagagaaaaagctcctaaagaaacaaattcaaataattagccttggtatattgttacaggaatccagatttttaaaaatctggttaaagatcatttttgcattcaaatgacggttgcataattaccctgcttttgactgcctgtgtagtgactattaggcttctcacaagattaatggtcatttgagtttgtaacactaatttcccagaaggaatctttatttcattaaaggatattagaaaattgctcaagcgttttattagaagtgatggttaattaccatatggggctatgtatattatatcctccgaaaaatgcctgcttcataccagtttggagaaacttacctttctcagctatgtatgttatatcctccataaaaggcctgtttcataccagtttggagaaacttacctttctcatgtgtaatttaaatctttactttacaaatctttacaactcctttagtgaggatttgtcaggtcttggattttgtcccttcttacaagctaataagcttgtttcattgaggctgtcaataaaaacacagggctccttagtaagagacaaaggatttttattacttatggcacaacaaacagcatgaacattgatatatttccatcagtttctcctgcctttaagtcctcaaaagatgatgtaatgggtagtaagggatgctacccatgaagtggtattatgtcacaggtgaggaactctgagcttaggaagttcattgcttttataacaagcactcagccagcttgctctttgtctcagagggagacattacctcatctcccaaggttgcttgctggcataactctgagaagtgatccaggtagaatgctcatgtcattacactgttggcacactcatcaagtcacgtttgagtacaagagactcatggtggactgcctttcaataatatccactccatggtcttacactgggttagttgctagaaatttattttatgagtatgccagtttgtcagtcattctgatttgtgtaactgagagatgtcatgactaaatgcattacatttgtctcaagtagcatttaattaaggctactatcagcagaactctaagaagcagaatgagaccaacatgcagtattaaccttaattatgcttgatccagccaaatgtgagtaagttccaaagtacagacagctagcatgtagtattttatctattataacccatacatgaaagttcagactgaaatgttggtctttctttgaattaccacaaagaaaaaaccctaccattcccaatatagagatgttatatggtccctttcccccgggcataacccaaaatgcacaagttaatcaaatttgggatttattattaaacttgatttggataagcattgcatcactttggttaaactacgtgagcagtgtcagtgagtatttgcaatatttgcaacctctgtagccattcatgacataacccaactgtcaagatatcaggggaagcatatacatttgtgtcagtcaatttgagacaaggttgtgctgattcttgtgtttgtatacttatgaagatggggaatctatattggaaagctgccactgataaaatagtctgggagccacattcacaagagttttcctgttttcttgggatgtgggaggagataacaaaccaatagcaggacacagagttgctgcttggctccagaagacaatatgtttgtttttctatacttgttctagcatacaaagagagcattagaccctcacttctccccactggccagggtctaagagtttctcttgctatgtgctcatcatcactaatcatcagagagatatccatcaaaaccacagtgagatatcatctcacaccagtcagaatggctattattaaaaaattataaaacaacagatactgttgagactgcagagaaaagggaacacttatatgctattgatgggaatgtaaattagttcagtgcctgtggatagcagtttggagatgccccaaagaacataaaacgaagctatcattttacccagcattcccattgttggatatatatgcaaaggaaaatagattgttgtaccaaaaggatacatggcttcttattattattgccatggtattcacaatagcaaatatgtggaataaaactctgtgcccattgatggtggattggataaagaaaatgtggtacatatataccatggaatactatgttgccacagaaaagaatgaaataatttctttgcagcaacatgaatggatctggaggccattatactaagtgaattaatgcagaaatgttaaaccaaatatcacatgttcttacttataagtgggagccaaacacagaacctacgtaaacatggcaacaactatggattaccaaagggagcaggaactggggggtgcattaaatagtacctatcgagtactatgctcaccacctgggtgtaatatacacatgtaacaaacctgcacatgtacctcttgtacctaaaatataaactaaaatatttaaaaatagactcaaaattagcaccattttcagaagcgtttattttaagataaattgcttttaaatgaaatcttgttttgcaatactctgaggttcacaagacatatctagaaaatgtactattgcggaaggtgaagacggtgtaaaaccagtgggggagaggtcagtggtttttcttattggttgattatcagaacactgtcctttggggatatgaaagagttttatatattctttagacataattagacaaacaatggtccatagggcaggtttgatgctgtacaaagtctgtcattttgctagcactgatatggttcttgggtccaccacagcattagatctgttgatgcatttatattatgctttgttacaaatcttgaaaagaggggtgcttcttacagactttgcttcagatattagattttgttttagtaaattttccaagactgtagtggctgccagcttgtgttactttcacttttcctctggtttttgtatttaccgagaaatggtcatggtttctgtcaagtgcaatgtacccttggagaaaggaatttcaatattagcatctattccctcattctatttcctaggtagttgttggtgggaatgggaaaggttagcctcagccatctttggtgaataccgattacatggctcttgagtggaaaaaagcctgcttcattgttggcctcttcaaggacatgaaacacgttgtggaacagaagagaacagtagttgtctgtccttgtttatctatagactcaattgagtttcttgcatagatagctccctgatagatttggtttgctggttatgtcaggatgaacaaaacctataacttttagagattgattcctaggtatcagctttatacaagaaaggcaataagagggacaggacaaatgaacaggcacattgggttttattgacagtctaggtactaaaggcaggttcatctcaattgcaccaacccaagcaagagctgttttggcacagatgcatcattggtgcaaaatggaatgacaaagtccaagctcctccagttcctggccttgttaaaaaatattgcttaggctatgggctgcaaccatgtttgttttgttcagctagattttaggccatttcatcttggaagacttattttgagttataagaaatttctttaaaagttgtatataacagagtagtataggaatatgtggcctgacattaagaagagctatacagtgtgaaattctccctgaattgcaagaatctcactcagatttctataatagaatctgttatgtctgattttttagttcaggaaagtggctattagaaataagtggtcttactgacccaagagttgccatttgatggaaactcatacacacatatatacccctctgcctttctcacacatacattgactttgacttttaatatagcttaaaagctttattaaaagtttttatttttaattgattcataatatttgtacatatttatgtggtccatgtgatattttgttaggtgcatagaatatacaataatcaaggcagggtgtttagaatatctattaccaagagcacttatcatttctgtattgagaatatttcaagtcctcacttctagctattttgaaagtacaatgtgttgttgttaactttagtcattctactctgctattgaaaattagaacttattccttctgtttctacccactaaccaacctccttttattcccccaaccacatccatttccttcccagtctctgataaccatcattctagtctctgtctccctgagatcaactctttttttttagcttccacctatgagtgaattcatgcaatatttatcttcttgtgcctggcttatttcatttaacataatgacttccagttccatccatgttgctgcaaaggacacgatttcatttatttttatacctgaatagtattccattgtgtaactatacaacattttctttatccattcaccagtagatagacactttgttgatttaatatctttactattgagaatagtgctacaataaacatgaggaggcaggtatgccttcaaaacacttctttcctttggataaatactcagtagttggattgctggattgtatggtagttctattactagatttttgagaaatttccctactgttttccagagtggctgtactaatttacattcctaccaacaatgtttgagagttccattttctatgaatcctcatcacatctattattttctatatttttaataatagcgattctaactgggataggatgatatctcattgtggttttgattcgcatttccttgatgattagtgatgttgagcatgttttaaatacctattggctatttgtcttcttttgagaaatgtcaatttagatcttctgcccatttttaaatgggattgtttgactttttttttttgctgttgagttgtttgagttccttgtatattctgaatttaactaaagtgtcatattttcacttttagcagttcacataacacaggtctgtagttggaatacatctttgatcactttcatgagtcctcaagatggcagtgtcttctcagggaccttggggcaagctctcatgtgctcctgcggtggggaggggaggggatgcatgtgcacttgcaagtgcacacacacacatgaataagagcaagacagagggagagatgagggaggagcttaatgatggagcagaggtgttaaaaagaacatcctttttctaattggtaggacagatttcttttatgattcctacagcagaaaaatgagaaacgtttgttattatttttttttcgtgtttaaggtttgaatcctcagtgaaccagggcagaaaagaatgatgaaatccttgagagttttactggtgatcctgtggcttcagttaagctgtgagttttgggcatctctgtagaaacataatgtatattgtttgcaattattgtgtattctaggcctgtgggtagaaacatgagtggttttttctctaacaaagggagactggggagagtggggggcccatgaaaagatgatttaaattctgggtacgaagtgtcccctacccaatctgtcttctctgtctgactgctgtcttttttcacaggggtttggagccaacagaaggaggtggagcaggatcctggaccactcagtgttccagagggagccattgtttctctcaactgcacttacagcaacagtgcttttcaatacttcatgtggtacagacagtattccagaaaaggccctgagttgctgatgtacacatactccagtggtaacaaagaagatggaaggtttacagcacaggtcgataaatccagcaagtatatctccttgttcatcagagactcacagcccagtgattcagccacctacctctgtgcaatgagcgcacagtgctccccagacacttgcagtctgtacccaaacctgctgggccccaggaatgcctgatgtagagcttagactgcaaggcaatgaagttctatttgttctctagatgcaaatgaaaactaaaagcagtagtattgaaggtttgattaatttgggacatattttcataattctgaaaattattgagaccccaaaggaaaataaaagacaccatttggtctacttgaaatattttctagtcttctctttccactttagttttgaaattttttttttgctgactttgtggctcatgtctgtaatctcaacacttctggaggcatagggaagaggatcacttaaacccaagaatttgagactagcctgggcaacacagggagaccttgtctcaaaaaaagaaaaaaaatcgccaagagtggtgacatgcacctgtagtcccagcaacttgggagggaagaggtgggaggatttcttgagtcggagaggtggaggctgcaatgagctgtgatcacaggactgcactccagcctggacaatggagtgataccctgtctcaaaaaacaaacaaaaacaaaacacaaaacaacaacaaaacacaaataaaatatttttattgaggtgttattgacacacaaaaaggtgcacatattcactttatacagacaatataatcgtgccataaacatatgtaccatttctaaaaatttgcttcctccctggtttctttttattaagttattattgctatacaaaaaggtacatttatttaatccatgcccagtctacttttatgccacatctttactttatgagattggttttatgattctttttatcaaagacaagaaaatatttccatacaataacagatatgctctcatggttcctaagacattttgctctttccccaaggcatttgatagacattgctttaagaatgaaacagcaaagcagaaatgcaaagagaagaaaaatcataagcagactaatttgaaaatccggtaagtcataaattttttaagttacagaaccctaactccatctccagcctcaactacaacatcactcctgagttatataagggtacacctgatggacagctggaagaactagagtgagagagtgagaactggttgagaaaaagcctaattagttgcacaaactaaagattagagagggtctatgttgccattttggggtaaagttttaatcaaattcaaaactcccagcttgagcctgatgggatagttttttgattcctatgtacttgagtgtggcctggagatgggaaggagcattggctgtagttatagagtgcctcatctccccagcagggcatgacagcacagaaggacttaaaatttttttgagaagggtctctaagtatcttaaagagatccagacaccaaggtcctttgttatgatgagtaaagacctgtatgaataagataccaaagaccgtatggaattgagaatgcttcaggaaatgtttgtctggagagttggaaacactaaacatcatatgaatatctccatcccctgactacaaggcaccacagatttgccctgcagtgtatgtcaagtatggggaaagcatttgtggcctgacgaaataaggccttttagtagacattactttgaattacaggcaaaatatttgagaatcatatttactgtaaaaatgaagttgtggtctgataggcataacattatttatgtagcccagaaggtgggaaaagcttggaaatgaagaataaatgtttctgtccagttttattgacagtcactgatgaaaatgatgaagccaagtcagaatttgctgcaacttcttactctgcagaagtgaagactctgaacaaatatttcccagtcatagaagaaagatttaaaaagcaaggaggaagagcaaacagttgtgctggaattc

SEQ ID NO: 82 - DNA, 193084 bp, Homo sapiens
gaattcttcagtgccttctcactgccctaaggactaagtccaaactctccagcctggctttaagggccaccttgagctcttttttatatttttgatagggaaagaacattttaatccttgggggtgtgtgtataaaatggcaatgatatgtggtgtcacaagatggcagcattatatttattatatccaggtgctatgagcctactatgtgcagtaaatagaaaataatgcttttagtgggttcataaggatataaattgcctttgaaattttttttcttacagcgtgtttatttctatctttatcctagttgcatgcagtttatttcaatttttttcatccctggcactaaaaatttaagtttctcgttttctactaatttttatgaaacatgggcaaaatgcacaaataatgctgtttaaggtgaggaggcaggcaataccccctctccaccgcattctcaatccacctactgctgcaccaaagtctgctgttgtacaagcgactgaattcagcatatacaagttatactatatacttacgaaaatcaaggagaaacttaagtcagaatggacccagcagtagttttaacactttttttccccatggtgcaacagtagcatcagtttttttttttgagacagggtcttgctttgttgcccagattggagtacagtggcatgattatagttcattgcagcctcgaactcctgggctcaagtgatcctcccttgttggcctcttgaatagctgaaactacaggtgcctgccaacatgcttggataatttttaaatttttttgtggagacaagggttttttctatgttgcccaggctgatctccttatattgcccagggttcaagtgatcttcctgcctcagcctcccaaagtggtgcaatcatggctcactgcagccttgaccttttgggctcaggtgatcctcccacctcagcctcctttgtagctgggaccacaggtgcataacaccatgcctggctagttttttatttttattttttgtagagatggggtctccttatgttggccaggctggtctccaactcctgggctcaagtgatcctcctgtctcagcctctgaaaatgctgggattaaaggcgtgagccactattcctagtcctggccaattttaacattcttgattccatagctttctttgtgggaagatgattttgactctgtggcaaaaaggagcagcaaagatttaaaatgccagtcagacagcaggttacaaaagttgaactgtgctcatggcaggactcagtaaatacctttttaaaaaatatagtacattgatttcaagcatagtgagattctccaacatctatgaacattggttcacgtaacatacaatttattcttttaaggtatattacttaggaatttttagtatatttgcaaagttgtgaattgattactagctaattcctgaacatttttatcacttcaaaaagaaatcccatactcattagtagcccctccctgtacttaccctggctctcccagcccccaattcctggcaactgttaattaactttttatttgtatggatttgcctattctgaacatttcacacaaatggaatcatacaatacatgatcttttgagtctgacttctttcacaaagcaaaatgttttcaagggccatccatgttgtagcatgtaattaatacttcatgccttgtaatggctgaataatatttcattttatggatataccatattttatcagtttatcaggtgatgggacatttcagttgtttacactttttggctagtgggaataatgctgctattagcatttatgtacaagtttttgtgtgaacatatgtttttatttcttttggataaatacctagaattcctgggtcgtatggtaaatctatgtttaatgttttgaggacctagcaaactgttttccaagtggttgcaccattttaaatttccaccagcaatgtatgaagtttctaacttctccacattcttgccaacacttgttattgtaggtctttctttaattgtagccatctttgatattaaatagtattaatgagaggccaataggtatgaaaaataggtatgaaacaattttgtagacataagaaatttctttctgagacatctgataaatagtttaacatattgttgaagtttccattttttcctctctgttttcctccttttttctcagatctttcttcctctatttttttttttttttgaaatggagtctcactctgttgcccatgctggagtgcagtggcctgatctcagctcactgcaacctctgcctcctatgttcaagtgattctcctgcctcagcctcctgagtagctgggattgcaggtgtatgccaccacacctggctaatttttgtatttttagtagagatggggtcttaccatgttgaccaggctggtctcaaactcctgacctcaagtgatctgcctgccttggcctcccaaagtggtgggattacaggtgtgagccactgctcccagctcttttttcctgttatacctcttttctttcctttagttttttaaaaaattacataatcaaacatgtctattttaacattaaccaatagagggatgtaccaaaaaaaattaactcaactcactgcaacccactgcaacccctgacataaccaatgttagtagtttattgagtataacctcacacttttaaaaatgtatgcatatgtacataagtttatgataaaaatatcattcaatactcatcactctgcaacttacttttgaatatattaagattatttctatattagctgttgtaagcacacttaaatggtaggtaaatttccttgtctttctagcttccaaaatatatatgacacacaaacaaacaatatttagtatatgcacacacacactgcatctctaattgatcctggatttcattttgttgtatcatgagaaagaaaactgttagtatggtcaaattgactagttttgactttgccttatgttcccatttgttttctctgttctttacatgttcgatgttcaccataatcacttggattaaaatgtgtggattagtttttggagatagggacctcaccatgttgcttaggctggtctccagttcctggcctcaagggattcttctacctcagcgtcttgagtagctgggattacaggcataagccactgtgcccagcttaaaacctgtggatttatcagtagaaaatgttcatgtaaagatactcctgtaagagaaaccatagctgctccagtggaaggaagcttaaactcatcccttcaagaaagaagctcctccctttgtatttctactgggttttgcatccggactgatcttccttccctcacccacatgaagtgtctaccttctgcagactacagtggctcaggaaccggggatgcagtgccaggctcatggtatcctgcagcagatgtggggagctttccttctctatgtttccatgaagatgggaggtaagtctcaatctaatagtaaatgctgctaggaattttcaaaacaatttcctttcagctaaattattgcaaattttgacatttgtaatgagagtatttcctgaatatacattttcctaacgtggtgctaattgtcctcctgttactattgctgctgctgttactgcaaccatttatttcagtctaagaaattctcccatcaatggcagttcttttgtgaccacatggaagcatcatttaaaaaattattccaatagtttttggaggaaacatcatttttaataatgatggggcttctgggggtgctgccctagtaacaatcatgtatcttgtcataggcactgcaggacaaagccttgagcagccctctgaagtgacagctgtggaaggagccattgtccagataaactgcacgtaccagacatctgggttttatgggctgtcctggtaccagcaacatgatggcggagcacccacatttctttcttacaatgctctggatggtttggaggagacaggtcgtttttcttcattccttagtcgctctgatagttatggttacctccttctacaggagctccagatgaaagactctgcctcttacttctgcgctgtgagagacacagtgactatgaggcctccttaactgtgccaaaattcaaaagacaatcagtggagtacaggtgggcttgagaagttctagaacttcctgagtgtatctttgcttaccgtctaattttaaacttgtttagaatatgtagcatagggctctgagacggaaccccattattttctgaaccattgattgctaaagagaaggataaactattttctctctctctttcttctttagtttcttcttttcctcttcctcctgcttatttatgcctccagtatcctgtggttccacgtatggaagatggaatttacttttggaggaagctttttatacaagggaaggatcccttggtgagtgctttagtttatgcagtagtaagttacattaatattcatgtatccttgggaggctctgaaatttgtgaagtaaatgcaaattcctcagcttgagatagtatgatttcatttaattatgtcaaatatatcctcatttttgtatttacctgagtgataatgttgatattatttagcattttttggtggatttatccaacatattggagagtgtgggggctgtggacttagagggtgaagagaagatcatggagagctcttctctgtgaaacagaagagtgaggtcatgcgatgaggtgggggtcaagtgtggaaggagttggtcagtagggaattcctgtaaaagcactggataatggacagaacagtaatataaaatattcagtttaaagattttcttttactgaattgtaatttttgtgtgctatcctaaatgtttttgaagtttgttaaacattacagcctacatagtttgtccttagagggcaatgcagaatttcttccccataggtgaattattttttggcttagtacatttatgtatgtatgtatgtatgtatgtatgtatgtatgtatgtatgtatgatggagtctcgctctgtcacccaggctggagtgcagtggcccaatctcggctcactgcaagctccgcctcctggattcacgccattctcctgcctcagcctcctgagtagctgggcctacaggcatcggccaccacgcctggctaattttttctatttttagtagaaagggagttttaccgtattagccaggatggtcttggtctcctgacctcatgatccaccagcctcggcctcccaaagtgctgggattacaggcgtgagccactgcgccgacctctattagctaatttttaatgacttattttggggtaaacagaataagagggacttggtggtagggagtagaaaggtagagtggatggttttcactcaacaaatattttactgaatacttatatgtgctaggcactctttcaattgctatggtgcatcactaaataaaacatacctgcactgaggttgcttatgttcttgtgaagagagagagtaagtagatgttttagcagactttgaaagcacagggaaaatacatttgaccctcagaactcagcttcattttctttaataggaagagagctgagatgtatgtaagcaatgctgatgtcctgtgcttgttataattttataatataaattaatcatcagctgaataagggctgtataacattggatagttataagactgcaagtcaagttatccaaagaatctcagtctttcaaattattcaaatgtagctgtgtctatagtgggactctatataaaatcagaaagatactgaacgtttgaatggagaatctaacactgaggcaaatgacctttaacatgtgagttatttgtaaaaatgaaaaaaatttcgagtgcttcattgaaatcaagaaggagataaagtctaaaaaactttcagcaaggagtgaatggtcaatggaaatgaactatacaaaatcaattatcttaaatttgaagacgtgtaagttactgatattctccttaatcagtatgctatctttttatctttttaatttagtgaccatgaagagtatccgtaagaacttttataggttcattttgaccttgttttcatatctattttctcctaaagtcttaatttttttttttgagatggagtctcactctgtcgcctaggctggagtgcagaggtgctatcttggctcactgcaacctctgcctcccaggttcaagtgattctcatgcctcagcctcccaagtagctgggattacaggtatgccaccatgcctggctaacttttgtatttttagtagagatggggtttcaccatgttggccaggctgatctcgaactcctgacctcaagtgatccacccaccttggcctcccaaagtgttggaactataggcatgagccaccatgcccagccaagccttaagtttttagataacatgtttttctgccacagagattttcaagaagaaagagtaccattctttgttactttctctctctgctagtagagtttctctttaacccagcaacttctttcatttccacctagaaggtggttgaatgctagatgttggagcaagccattaccagaggataggagacaaggtttttcgaattattgtagatcaaactgggaacccagctctcttgtcatgttcaaagagcagtagctgtgtttggacttcggagttagatatttctaagttcaaatccaagcttcacagggtgttcagataaaatctcacagaatgaaagaaacataggaaggattggaaggaatttgacatgtatcaaatctaactatcttctacaatgtttgagtaaagctctgatttttgagcatctctttgaccttgttttcttgagtagttggggatgagtccagcttcaatgtctcttgccttgagatcttacctttggagctttttatatccctcagttcgggcaagatagaacatcccattgtccagttattttctagtcctgtggtatctgtggagtttccagagccacactggtgctcggatgtctggagcatgttctcactgtggaaattaacctcgctttagttctagttcctaaggaagataaccaagagaacacaggtggaagaagcttgcatcaagaagactacactctatcttggaggtgaactgttcactattacatacataactcaggaaaacttagatacctctcttgtttcttttggcttaatggtggtaaataatttaggtgttactgagccctaggttattcaattgtttcttgtggtttctctactcccatatctttgtacatagttcctatgcagagaaaactctccgcaaattatcatgttttgagtaggctatctattgctttttggaaaatcagcaccatccatgtgccttaagagtgatttgcacatgtactcaggggtacagggaagtgaaggaggtcagttggaagaaatacaaaaaccaagatcttcattaagaagagtttaaaaattttgaaggaatagttggatctttttctaagaaaaatccttaagagatttgataatatgaatttggatgggaaataaggagtgtgctgtgtaccactggatttaggacatgagcgctggaggcccagaatgcacacataacccttctcaggcaacccttgaggctgtggtttggatactgaaccaagggtaaaggcacagacaaaagctgacattttgagggatcagtttatgaggtggagtaaaactctaagctggactctgccagtacccttttgaaaccctgtcttttttcctaaatgaggaatctcaattccagatagaaaatgaggacgaatggctcacgcctgtaatcccagcactttgggaggccgagatgggcagataacaaggtcaggagtttgagaccagcctggccaatatggtgaaaccccgtttctactaaaaacacagaaattagctgggcgtggtggcgtgcacctgtaatcccacgtacttgggaggttgaggctggagaatcgcttgaacctgggaggtggaggttgcagtgagctgagatggtgccactacactccagcctgggcaacagagtgagactctatctaaaaaaaaaaaaaaaagaaaatgaggacgaaacacagccttggttgaatgttctgccaggcagtgttctgtgtggcttttgagcaagtgcaagcacataattttcctatttgtcatctttctgaatctcaagcaagtgcttcctgcctggaagacattagttcacatatttgactcacgtatactctgaattttaagtgtattttgactctgcctctgcagtggttaccacatgcttatccattatttattattgagttttatatgcatttgtacttttcaactgacccatatccagccattggtcatacatgagctttcccttggctctgttctcctgggccaattctgggcatggacttttaaactcaccttcccattttgacccagccattcctcagttatcccctcagctgaaacttgatttctgtgaatgcacttagtcactgagtgtggggagggaggtgacttgaaaagcaggtgctacatctcataattaaattatgtaatcctggtacttcagaatctcctggtctctgttgttacatttccttatgaacttctgaggggattaggaagtacttcagaacttcctttcctagtaggcatatgtttcttttttttttttttttttgagatggagtcttgctctgttgcccagactggagtgcagtggtgcgatctcggctcactgcaagctccgcctcctgggttcatgccattctcctacctcagcctcctgagtagctgggactacaggcacctgccaccatgcctggctaattttttgtagttttagtagagacggggtttcaccgtgttggccaggatggtctcgatctcctgacctcgtgatatgcccaccttggcctcccaaagtgctgggattacaggggtgagccactgcacctggccaggtaggcatacctttaaataatactactgattaagagaggcctgtgcatgttttgtggctaataagtaggcagaactagaataaataagatttacacttactggtctagacaacttaccttgggaattgcaacctaggtttggggacttgaccttccaagtctgtggactgacttgcaaactaaccatacttttcggcttgctaaccaagtcttgatctggaaagtaagatctccccgaggactgtcagatctacttgggcaatacttttcagtctgcattagaatcacattttaaaattccctatgcttaggtcccatcccaggtcaatttaatcagaatttctggtgatggagccagaactatttaaataaaagtctcccaagtgattctaaatgaaacaaagttggaaaactacagtctcaaaagataaattggactaaacctctagagttgaaaactcacccaaatttattgtacaagggtcaaaaagtggctgagtgccccatctgggatggtgaggcagatgaggggttgctggttactaatattggcattccttcctttcattgtgagttgctcttataacttgcacctgctgctctctagcaacatgagcctgaggtccaatgttaaactgaggcatgtgacacctgtgctcagatcagtgggcacccagggaccattaaagacttttctttcttacactctttgcctttgtgttccttggagaagaacttcaaaagagcaagcccttcctcagggccatcatggtcatctaaggtttagtacacattttagtaatgacacattaaagataacttaaatatacattttttgagggataaatatcaacatgaggaatagaggactcttggccaggtgcggtggctcatacctgtaatcccagcgctttgggaggctgaggcaggaggattgctatgggttcaagatcagcctgggccaatagtgagattcctatctctactaaaaaaaaaaaaaaaaaagaacagaaggctcttaattacctgtccaagctcttcagacaatcaagaccagtccttgtggagattaaaaatttcagaaactaaaagtttgttatagcttggtcattgctctcatgaagcagcataacttggtcctcctagtgctctgtgaatgtgaaaatgaaaactctctttgtctgtgcttctgttgctgttgctgacgtactctccacttgtctggtttattgataattcactctccagtattacactccatcctctggagggaatgatggatcccttcatcacaaaatgttttctgtatttgcactcttctatgattccctgctcatcccttaagacaaacccttctttaagtcccggatgataacaagagtgatgattgcagcactctgtatttattaagtgtctaccatgtttcagaaacttcacattagttatcttattcaatgctcttaataccttgtattggtccattttcatagtgctataaggaactagctgagactgtataatttatgaagaaaagaggtttaattaattcatagttccacaggcttaacaggaagcatgactgggaggcctcaggaaacttacaatcatggtggaaggtgaaggggaatgacacatgtcttaccatggtggagcaggagagagagacagtgaagggggaagtgccacacacttttaaaccatcagatctcattagtatcagttagtatcagtcagttttcacactgctacacttactacctaagactgtgcaatttatgaagaaaagaggtgtaactgactcacagttccacaagcttaacaagaagcatgactgggaggcctcaagaaacttacaatcatggcggaaggtgaaggggaagcaacacatcttaccatggtggagcaggagagagagagccaagagggaatgccacaagcttttaaaccatcagatctcatgagaactcacacactatcacaagaacagcaagggggaaatctgccttcatgattcactcgcctcccaccaggcccctcctccagtttgacatgagatttggccagagacgcaaatgcaaaccatattatgtctcctttgaagtaagtcttattgcccttattatatatgtaaagtaatcaaggtttagaaaggatagttaattttcccaaggacacatagctggttgatggcggaaccaagattcttctaacagactctaaaagttgtactctttccttttcataccaatatatttttaaaaatgggtagatatgctgaaagtttatcaggttttatcattaaaacctggggtcactgaagtaaagctatctttcactaactatctgtaaattgatagtcaactatcctgggaagttaagtgacccgccacccttaatatttagcatgaatcaatttaattagttcctttagtttcttcagacaaatggaagttatcttaaaggggatggaataaaggaagaaagaagcagttgtgcaaaaggaggtggaaataggtctcagaaaggatgctgttgaaatgaaggggcccacttttttttaaatgaaattgctttttaattcagttaagagaataaaagagatgaaatatgcagttatattttcttttatacttacctacataattacctttaccagcactttttttgtgtgtgtgcatagattcaaacggtattgtgtggtgtcacttgctttctgcctgaagaacttcctttattatttcttgtaaagcaatcttctactaacaaatttttccctgcttttgtttatcttgaatgtctttatttagcctttatttaaaactagcctattttttccagagatttaaaagctcactttatatttgctttctttaaccttttattttaggtttgggggtacatgtgcaggtttgttacataggtaaactcgtataacaggggtttgttgtacacattatttcatcacccaggttaaggccagtacccaatagttatcttttctgctcctctccctccctccactctccaccctcaagtagaccctagtgtctagtgtctgttgttcccttctttgtgttcatgagttctcatcatttagctcccacttataagtaagaacatacgatatttggttttccgttcctggttcctccagcatggatggagctggaggctattatccttagcaaactaacccaggaacagaaacatacatctcattcttttttatggctgcatagtattccatggtgtttatgtcccacattttctttatccaatctgtcattgataggcattttggttgattctatgtctttgctattgtgaatagtgctgcaatcaatgcacattcgcttgcatgtgtctttatggtagaatgatttgtattcctctgggtatatgcccagtaatgggattgctattaaatgtaaacagtaattcttcctttagctctttgaaggatcgccatactgctttccacaatggttgaattaatttacactcccaccaagagtgtatgtgttcccttttctccataacctcaccaacatctattattttttgcctttttcataatagccatactggctcaagtgagatggtatctcattttggttttgatttgcatttctttaacgatcagtgatactgagcttttttttgtttgcttgttggatgcatgtgtgtcttcttttgaaaagtgtctgttcatgtgggatccaggtttcatacagcaaacagaagcaagcacaggtgcagcctcatgtttgtttacattgattcagagtttgagctggtttcactggtttgactcacagttttctttgttgaggctaggtgagttcctgctaacaactctgtaccacacacacacaaatcactcagtatcactcaagattagttctgttttaatgatgaacttagcattcatacatgcaatcctaagagtagttatagtttgtggatcaactcacatatgaccttaagatctcatgtcttctgacaagagcaatatggcacattggcttaagtgccgcatagaagacttgctagaccaatcactgtcttctagattctattagaaatgctattttttaaatgtccagttggaaattttcaatggcttgtttcaagattaacaaattattgtggactctgtactgccttgcttgtcgtctcatactatgtgtaacatgtattatatgtatgcataacatataatatccttcctgatattatggtgtttctgtatagcacagtgtgattcttatatccacattaatatatttttacctttacgaattttgaatctttccatgcatttgtttaaattttactgttaaaatgggccaacatgataccacacatccaaagaagtgaaaaatatgccagcgaatgaaagaatacatttaccttgtttttggttattcaccaaggaactgtccatgcttgcttttaggttgccatgtagttgaatcttctgtcttcagtttcccttaaatgttctcttttttttttttttcttttttcaggtgagaccaggacaggtaatgggcagaactgacaataatttcttcagtttaagatacatttcaagagacttttgcagtgcggtttaaattcagcaacaaatggccgggcgcggtggctcacgcctgtaatcccagtactttgggagatggaggcgggtggatcacgaggtcaggagatcgagaccatcctggctaaaacggtgaaaccccatctctactaaaaatacaaaaaattagccgggcgtggtggcgggtgcctgtagtcccagctactcgggaggctgaggcaggagaatggcgtgaacccgggaggcggagcttgcagtgagccgagatcgcgccacggcactccagcctgggcggcagggcgacactccatctcaaaaaaaaaaaaaaaaaaaaaaaattcagcagcaaatattgatttctgtgtctgctcgtagttattaggcaatagaggcagacaaacacaaatgaatgctttatgtcctttgagggctcacaatccatttgaagtggaaagagagataaattccttttttttttagactttttttttttttttttagatgaagtctggtactgtcacctaggctggagtgcagtggtgcaatctccgctcactgcaacctctacctcctgggttcaagcaattatcctgcctcagcctcccaagtagttgggattacaggtgcatgccactatgcctggctaactttttatatttttagtagagatgggggtttcactatgttggccaggctggtcttgaactcctgacttcgtgatctgcccacctcggcctctcaaagtgctgggattacaggcgtgagccactgcgcccggtaggagataaattcttgactgtaatacgtgacagactggggcaaggtctatactaaagaagccatggcaataccagggaagaggagttaagtcctgcctgggaaaaacagatgaggaagtatttaatatggatctgaaggaagcataaattgtcacttggtcaatatggagagggaggacttatattccaggcagagaagagagcttgagcaaaagagtacaggcaagtatagagcatgctcacggaacggcaataaatcagtgagggtgggagagggaagcggaggaaatggcttaagagaacatgtatgtgaagccaagattgcattggattttgaattccagattaaggagcctggccttattcattctaccttcaccgaagagtcctacagattctgtgtttcagagggtaattttgattgtggtctagatgaggaagaactagtcaggaattaagagagacagtctacactgaatcagtttgagctggtttcatagttttgaggagacagaatctgatgtgttagcacatcacgagggtgagggacaggaagaaaacacaaataatccagaattttcaagttcaagtgcttggaaatattcatgccatgcacaagcaaagaaatggaatttagaggggtctaggattaggagcaaagacaatgaaacaaggggttatggagccccctttttactcttttcaaattttctggcatgatatactttctaagacattgacacattctcatcttattcaacctttggtaaggcattttctcatctcacaagatagaggtgatagaaataatgtatccatttatttctaaaagattatgtaaaacaacctgaaccagtttaattaggggaaaagattttgggtcgaaataattcagaattttctgccaaagaaagtgaaaataaattcactttaaatccttagcagtttattgggcatttgtcacatgcagcagtagctgaagagagtggcagtgataatgatgcagatgtagttacttattttcattcagtccttcaacctgctgttatcctcttcagggcagacttcacttcctggttcctcagtgtatagatgagggggttcagtaatggagtgacaacagtgtaaaacacagccgctgccccatccagggggtctttggagccagccctaaggtagatgaaaatacaggggacatagtagactgtgaccacgattaggtgggagccacaggtggagaaggcccggcgcctcccatcagcggtgcgtatcttcaggatggcatggactatgttggcataggagagcagaattaacatgaagcaactggcggccactaccctgacgtccacaaaggtcacaagctcattgacagttgtgtcagcacaggccagtctcaatactgcgcggatgtcacagataaagtaatccacctgattgggcccacagtagggcaggcggaaggtcaaggtggcctggatagacccatgcatggagccggcgacccaagctccagccacaaggactgtgcataacctcccattcatgagcactgggtagtgcaggggctgacatattgctaggtacctgtcataggccatcaaggtgtagaggaagcactgggtgctgcccaggaagtgaaagaaatacagttgagccacacagccaccaaacgggatagccttgatggaaggagtaaaatccaaaataagccgaggaacggtgactgaggagagccacatgtccaggaatgagagcactcccagaagaatgtacatggggcgagcacagagcttcgggtcagcccacatggtgagcagaatgagcaggttccccagctgagtgaggatgtaaatgatgaagaagaccaggaagaggaggcttcttagatttggggggtgagacaaacccagaagaatgaaatctgtcaccacggcatccagcgatgtgtttttggtctttcccatgtctttttgtagtctgctaagatgaatggtgacgtttgacaagagaaacacagcacaatgatgttgtaagtgaatgcttttgtcggatgattgatgcctaggaattatgagataaacaagatagagtcaaattgttttttaaaagaggaggtggtgtcaccattagttatttaggtttacttaaaaggagaagtcctccagaggctggttagtttcctagatgggaggaaactcttgtccattgagagatactgaaagccaggatttgccagatgaaggaagagggacacatgagagtgatagagaagtaccgaaaattccaaccaaaaagtgagttcgccaaggaggggctaaagttgatgcagagcagtgtggaacaaacaccctataatgaccacatctactttttcttcacctactatcattgtcccctttttcctcagctaaaatctcatctccttaacatagcatgcaaaaatattcctcatctggcccttatttatatcgctattgtaccacttgtaattccttcttattgttgggaggcatgacactcttcaagcttctcacagtagtgtgctctaacttgggacttatgcacacactatcttttctgctcccttcacataggtagtgcccacttttccttcaggattcagttcgagtgtcttcaccttcaagaaggctttccggatccctgaggacaatgcttatacttttctgagcacgtacattatgttgcattgtctaatttctgtttttctctcttaataatcatcctgtctagcatgctaaaagtgataaataccgtaattattttctgaatgactgagatagatagaatggatgttgccaaatccccctgactgaatacattgtttctcttgatcttttttgtctgacccctgtgctcacatggctgggacttttaggtcaagggaccacctcattcaccatgtaatatgggtataatttcattataaaaaactccaagaaacatttatgcctgtttttgctccaggatatcatttagatttatttgttgatttatatggttcattggattgggattgggttttttttttggtatgaggtcacagaggaatttttattgtttgttataaaatcattgattaatgcaggacttgatctttagtgtgcttgtgtgtaatatctatgtattgcagtctatcaaacagcaactctctctaaagacatttacagattttcaagtatctgaacaagatgataaaatagagggatggaatgtgtttgtttcactctttttgttaaataggttgcttgataaagacttttcgctctatatatggtttgagatgcatttatctttcatttaactacaaaatatctttgtaatgcaaatgactactttcataaagcaattaaaatgacaatagattattataaataacatgtgaatattaataagtttaactaatctctatcggaaattctccaaagagattttatcttaagtattctgtgaaataacttaattcatatgttaacattcaagagttattagtagtaataataataatactgaatatatctggctcttcgaagtctggaaaatgttaaacttgtcctttgcccaccaagaacgaagaaatatcagatttttattgcctgagtttcaggaggacactttgatttatttgaaaatggatgggaaaactaaatcttatttttgtggttagaatatagagaaaagaggctgggcgtggtggctcacgtctgtaatcccagcactttgggaggccgaggcaggcagatcatgaggtcaagagatggagaccaccctgaccaacatggtgaaaccctgtctctactaaaaatacaaaaaaattagctgggtgtggtgtcgggcgcctgtagtcccagctactcgggaggctgaggcaggagaatctcttgaacccgggaggcggaagttgcagtgagtggagatcgcaccactgcactccagcctggtgacagagagagactctgtctcaaaaagaaaaaaaaaaatgaatatagagcaaagatagaaagagttgagattaaaatggtgcataaaatactaattatggccaggcgcggtggctcatgcctgtaatcccagcactttgggaggccaaggtgggtggatcacgaggtcaggagattgagaccatcctggctaacacggtgaaaccccgtctctactaaaaatacaaaaattagctgggtgtggtggtgggcgcctgtagtcccagctactcgggatgctgaggcaggagaatggcgtgaacccgggaggcggaggttgcagtgagccgagattgcgccactgcactccagcctgggtcacagagcgagactccatctcttaaaaaaatatatatacatatacatatatatatatatatatatatatatatatatatatatatacacacatatacatatatatatatatatatatacacatatatatatatatacttattatgagctaaaagtaattttcttttctttctttttttttgtgtgattgagtcttgctctgttgcccaggctggagtacagtggcctgatctcggctcactgcaacctctgcatcccagattcaagtgattctcctgcctcagcctcccaagtagctgcgactacaggtgcgcgccaccacgcccagctaatttttgtatttttggtagagagggagtttcaccatattggccaggctggtcttgaactcctgacctcatgatccacccaccttggcctcccaaagtgctgggattataggcgtgagcaccgcgcccagctgagctaaagtaattttctttgccaatacaggaatataaactagtaggcttctacttaggcaaataatatattcatgaaatgttttatgaaaatccatttttatatttaaaatcagatagaactgtaccactggggcaattatttgaaggacttccatgatgcatactttcgtatagtgaaaagtttatccctaatttatctactttgccggtctgattttcccccttttgttgtgcctaagtctggtttcatttctcccagcctccctgttgaaagaaagctctttttacccctctaggttctgggttccctgcctgggaggaggcaggaaactgagatgggttatagctggtcggtttgaggacaggatacctttccaggcagacttggtaaagaacagtggttttagcttggtgtttggtattcagaggctgcagaggaagatagcttagacttccagaaggtagatttttggagaaacaaagagtgtgtttacagaaggattggctttcttggcaagagaggtgaacagtctgggaccaccttagaggagacaaaagaaaggccgggcatggtggctcatgcctgtaatcccagcactttgggaggatgaggctggagaatcgcttgggcccagaagtttgagaccagcctaggcaacatagtgggaccctgtctgtaaaaaaaattttaaaaattagccaggtataatggtgggcacctgtagtcctaatttctcaggaggctgagacaggaggatcactggagcctggaaggtcaaggctgcagtgagccatgatggtgccactgtactccttcctgggtgacaggttgagaccttgtctaaaaaaaaaaaaaaaaagacaaatgtagaggccgtatttgtgtatcctcttttccccctcccttatcttccagatttgtgtcattttattttaggtctgttcctcttttttagcttttgaaacttatgatatttaagataaggaaagttaaatacaattttagtatatctaccctagctaattagataaccaaaatattctaaaattccccaagttttagactgtattggatattctccaattggataggtcagaatttaaataatcaaaacacatgaaaataacaaaaagttaaagttcaatataaaaagcatctgaaaataagagcccagtgacatcagagaataaacagcatatttttacaaagcaattatcctggaaactctaagaagagactttgggaatggggtgaaagagtagcactgagaaggtaaggacagggagggtcaagaacaccttcaagggacctctatggcattatgggatcacaggataagctgctttctatgcccctactctgccccaaatcaagctagtttgatatgtgaacacatttcttgcagtgtatttagagaggtgccgaggagggcaagcctctatccagcaatttgaaactagatttctacagtgacctttgggatctggactactatgcaacggttatgaaatcttgaagatgaggagtgaaggctggtccagcattgcgttggacacattatgatcaaaggactcctgtttacccttgtgacaaaactcaacccaatctgcttccaaaaagaagtttcaccttctgtcatcctttattcagagttagacatcctggtagagctagggcagagtagaggaaatggatagaatttgaggtggcctagacatattttatcgaattcacaagagtacattctttcctattaccgggggttaaaaaaaacgaacttgctttagaaaaagtacttagtgccctcttcattggagaaggggaaggttatgaatccagcctttctttgtgtttgcacaatcactgaagaatattcttcaagacccctatgactttatcactgcccaactctgccctttatcactgccctaataaaaagagaatatgaaaagaaaatagtgttgtaatgcttttttttgagtcattttctcaacacaaaaagagtttccccaagtttgaaaacaaggaacttaattctagcccgtttgggaaagagttgaggaaacgcatggagaaaagagacggattaaattaacactcggacaaaataacagaaagtcttaaagttccaaaattagtctgcagccttattttgaacatagctggtgtcaggcctgctttttccatccttttagactcacttgtatagagctgcacaattgtggaggaggctggctgtccttgagtgcaacggtccagcggatggagagatggtcttcagagattcagtctagcctactataaagggctcccacatctgtttcggaaagcctttataatttttttttaaggagtttggcccagcaaataagtgttcagaatctttgagaacgcctgtctttggggttcttggacaagtgtgacttctgtatatattcagtcatattttatatcagtttccatcagctgttgcttttttggattaaaagaaaaaaagacactgccaagagatttaaagaaaaattctaacctcgagggaaaccctactactctgaagtatgtccctaatgagatctttcctcaccaaatcctcattattttgttttgagagagagagctggaaatgtttccagtaggatccctggataaggaactgtggggaataaccttgtttgcatgttatttgaatgacctctaatttcttagaggtgttatgaagtctcaactgatccccttccctccccaaatactcatcaggattccaccatcatcttcaggtttctgttcaggcatcacctaatcagagaggtttctgttgactctctcctttcccttccctattttatttttctctcggcacttgccaccatttgacatactgtatttacttgtttgtttactgcttgtctcccttcactagaatgtgggttttgcttagctttgaatccccagcactactagcatagtgcctggcatgtaataatttctcaatatgtacttctgaataaattaatagttgaaactgccacacatgttaaatgctgtgggcagaaaaaaaaagctgtggtttcaaatataaatctaatgtttaaaattacctggagtagatctgacatcaaattgatcctcgagtgacctgcatataccagggcaagtagcttcggaaatctatttattcattttttcatatttaatgttgggcagggcacagtggctcatgcctgtaatcccaacagtttgggaggctgaggcaggaggatcgcttgcagcctggagttcaagagcagcctgtacaatatagcgagacctcatctcaacaataaaatacaaaaaattagctgggtgcctgtagtcctagctacatgagaggcagaggcagaaggagcgcttgagcccagaaggttgagcctgcagtgaaccatgatcccgccactgcactccagcatgggcgactgagagagaccctctctcaaaaaaaaaaaaaaaaaaaaattcatgttaatctaaataacagtgggaaattgactacaaatgaagatatgaagcctggagtgtgataaaagcttcaagagtttcaagaacttcccctgtaagatgatggagctcgacaaagactggatgatttctaagtttcttttaattctaaagtaagaaaatgttaggcgtgtgtgtgtgtgtgtgtgtgtgtgtgtgtgtgtgtgtgaagttgcactgctacctgttgccacaagatgacagtatcatctttattgaaacaaagtacagttgctatatggagtaaatagaaataaatccagagagttcatgagggatataaattactttggtaaagatattatatgtgaggcattaattagtttgggaaaactatgtatcaaaaagagttaacttccttttgtaacacatgggaaatagtttgaaatatagttttcttcctccctccgtcttttccttcctgttttacacctagtcttcctccttccttttttattctttctttttctttcttccacattctcagtttattatgtaacaaatttcaagtcaaaggaaacagagatatataagaaaaagttaacattttcaccatttcttttaatttcactcatctgaagaaactaattttttttttttttttgagggagttttgctcttgtcacccaggctggagtgcaatggtgtgatgtcagctcactgcaatctccacctcccaggttcaagtgattctcctgcctcagactcccgaggagctgggattacaggcatgcgccaccatgcccggctaattttgtattcttaatagagatggggtttcaccgtgttggtcaggctggcctcaaacgcctgaccttaggtgatccacctgcctcagcttcccaaaatgttgggattacaggcgtaagccactgtgcccggcagtaactaatgttaatagcttttttctcatttcttcctgtatattcgtacatgtacatacacctacagacatacaaattatgtttcttttgaactttaaattaatatctgatcatctgttgggagacaaatttagatggttgaaaactctctgtttcttccttattgtcacaaacaccaccaccaccactaccaccaacacacacacacacacacacacacacacacacacacaccccccacctctaattgcaaccttgtttccatttcttcctgtcttgagaagagaaacacttatggggaaattgaatactttgtctttttttttttttttttttttttgagacggagtctcactttgtcgcccaggctggagtgcagtggcgcgatctctgctcactgcaaactccgcctcccgggttcccgccattctcctgcctcagcctctcgagtagctgggactacaggcgcccgccacagcgcccagctaatttttttgtattttttggtagagacggggtttcaccgtgttagccaggatggtctcgatctcctgacctcgtgatccgcccacctcggcctcccaaagcgctgggattaaaggcgtgagccaccgcgcccggcctactttgtcttatgttattcccatttgccgtctctgttccttatacattatgctttttcaactttaccagaatcacttggattaaaacccgtggatttctcagtaggaaatgttcatgtgaagacacttctgtagtaacagaacctacagctgctcctgtagaaggaagttgaaagtcatcccttcaagaaaggggctcctccccttgtaattctactgggttttgcatccagactgagtttccttccctcacccacatgaagtgtctaccttctgcagactccaatggctcaggaactgggaatgcagtgccaggctcgtggtatcctgcagcagatgtggggagttttccttctttatgtttccatgaagatgggaggtaagtctcaatctaatagcaaatgctgctgggagttttcaaaacgattttctttcagctaaatgattgccatttctgacactcgtaacaaaagtgtttcttaatagatattttctttatgcggtgctaattgttattggatatcaaataataacgactttgctgccatttatttctaagaatctctccttaatggcaattcttttgtgaccacatggagacatcgtttttaatgataatgggtttccaggagcgctgccctagtaacagtcatgtatcttgtcttaggcactacaggacaaaacattgaccagcccactgagatgacagctacggaaggtgccattgtccagatcaactgcacgtaccagacatctgggttcaacgggctgttctggtaccagcaacatgctggcgaagcacccacatttctgtcttacaatgttctggatggtttggaggagaaaggtcgtttttcttcattccttagtcggtctaaagggtacagttacctccttttgaaggagctccagatgaaagactctgcctcttacctctgtgctgtgagagacacggtgactatgaggcctctttagctgcaccaaaattcaaaaggcaaccacagcagcgagaagctgtatttcctgagtgtatgcctgctgtgagttaagactggggactttggaaccagactgcctggatttgagtttgctactctctagttgggtggtcttaagtcagtcactatttttttttcttttggtttatttccttatccagaaagtgagaataatgagtatctacttcacaagcctgttgtgagttatgactctctgtatcatctatatctctatctatagctatatctagtgttactcagagaagtagtggcacacagtaaactttatttaagtttagttatttcaattctagtcttgaattttcactaagtattacgtggtaggacctctgagactggaactcagtatttctctacccttggtttgtggaaggtgaaatcctgaccactatttgtatcttgtggatctaaagctccacctaatgatggagtttgtcgttcaggtggattgttgctttggaaggatcactgtggtgatactcattttctttggggggactccgaactttggaaatccaaatgcaaatgcttcagagtgagatgttaagtagcctgattaattacgaaaggctatcttcattatgtgcatcctctataaataaatgtaatcttaacatattttggaggtttataactcagactagaagtgaagtttaggggcttcagacttggggagcatgaacataatcaggggagtctatagaagatgggaaaaagagtgaacataaacaatttggtggcaaatctgggtgaggcaggagagccagtaggagattcctatgacaagatgcagtcagtaggcattaagcacaataaaaatttacagtaaatgttaagattttcatttcctgctttataattcccttatgttctcttcaaatcttttaatgaagtctgttaaatgctacaacttgctgtcagctaggtttagagagtacacgattgctgtgtggctacctccacatgagataaagccgatcagagtgcagaagctcagattgcaggttattgggacatcaaaagtgagggctgctccaagttaacatagttatatggccagtcatatgttacatatatatatattttttgagtcaaagattaagcaaaattctctttgggtgagataggagtgctttttcattctaatttataaaatgaacatttgaggtggaatttgaacagacatagtcacactggaaagtaatcttgacaacatgaatccaggccactgaaatgttcatgttccttttgtctaataattcatttttttgagctctcatttaaataaatgcaggctagaaatgaggctttgtttttttccagtttacaagacaaccaaagaagccatagaaatgatatttaagggctttggacttggtgagtatgaattgttcatatagttatcaattagggaaaacaatactatgcaaatgatatggtgaatgctatgatcaatggaatattttaaagttgtattagtttctattgctgcataacaaattaccacaatacccatatattagcttgtagttctgtaggtcataagtccaagcaagttcagctgagttctatgcttagggcataaccatagtaaagtcgaggcattggctgggtgagtactcaagtgctcacacagagttcagagtcctcttccaagttaattctttaaatttttttctattatatatatatatatatatttttagacggtgtctcgctctgtcacacaggctggagtgcagtggcgtgatctcggttcactgcaagctctgcctccctggttcatgccattcttctgcctcagcctcccgagtagctgggaatacaggtacccgccaccatgcttggctaattttttgtatttttagtagagacagggtttcaccatgttagccaggagggtcttgatttccctgaccttgggatctgcttgccttggcctcccaaagtgctgagattacaggtgtgagccaccgtgcccggcctattttttatatattttttaaaatttagagacaaggtgtttctctgttgcctggggtagagggcagtggcatgatcataggtcactgtgggatcaaattcctgggctcaggaaattctctcacctcagcctcccaagtagctagggctataggcacatactaccatacctggctaattaatatatatatttttgtagagacagggtcctgctctgttgcctaggctggttttgaactcttgagctcaagcagtcctctggactcagcctcctgagttgtgattacaggtgctttttttttttctttttttttttttcggagatggagtcttgctctgttgctgaggctggagtgcagtggtaggatttcagctcactgtaacctctgcctcctgggttcaagcgattcttctgcctcggcctcccaagtagctgggattacaggtacctgccaccatgcctggctaattttcctatttttagtagagacaaagtttcatcttgttggccaggctggtctcgaactcctgacctcaagtgatccgctcgcctcggcctcccaaagtgctgggattactagtgtgagccaccatgcccggccagttcttattattgtcagaattctagtccatgtagatgtgggactaaagttcccatattcttaatgtttgtgggctgggggcatttctgagctccttaaggcaacctgcactctttctcatgtgagtcccaccatcttcaaaccagcaatagcatgtgaagttcatctcatgcttggaatctttctggcttaatcttccaaagttcatgtgtttttaaggtctcatgtcaaccggtacatagatatctcccttttgaaaagtcaactgtgggcctggtgtggtggctcacacctgtaatcccagcactttgagaggccgaggcgggtggatcacctgaggtcaggagtttgagaccagcctgaccaatgtgaaaccctgtctttctactaaaaatacaaaaattagctgggcgtggtggtgggcgcctgtaatcccaactacttgggaggctgaggcaggagaattgcttgaacccggaaggcggaggtttcagtgagccgagatcttgccattgcagtccagtctgggcaacagaacgagactccatctcaaaaaaaaaaaaaaaaaaaaagtcaactgtttgttcagcgcggtgcctcacgcctgtaatcctaactctttgggatgccgagttgggcggatcacttgaggtcaggatcaaaaccagcctggccaacatggtgaaaccccatctctactaaaaatacaaaaaagttagctgagcatggtggtgggcacctgtaatcccagctactagggaggctgaggcaggagaattgcttgaacccaggaggctgaggttgcagtgagccgagattgcaccactgcactccagtctgggggacagaggtgattctgtctcaaaaaataaaataaaataaaataaaacaaaacaaaacaaacaaaaagtcaactgtgccatagaacccaacacaatcaccagagtaatattgcataacattcaagattctgaggattagggcagggaatcttgggtctattcactgaaattttacctaccacatagcaaataaaggatgttcattaagactgcataaaaatggtgaactgcttatgatataacaatgaatcaagaaaaccagtgtgcataattgaatatgcggaataatcacagctgtgtaaaaacttttgggcatagaaaaacagggaaaggaattacaatcttccctctttactgcatttcccttactcaaagtcttagtatgggtagattttcttctctctctctccctctagtctcttggctaggattggagggtgcacttccaagatggcttgctcacatagctgttgttggcaaaagtccccagattcttatcacatggctgtagtgtgttgacagagagagagacagagagagagagagagagagagagagagagagagagagtcatcttttatggtccagtctcagaagtgttatacgatcacttctgctgttttttttcccccagcttctaacatttttctccttttacatataacaaagtagaagaaataatataggattcaaactgcaaaagtagttaatcagtagaatgtatacacacacaaaaaatccccataagaagacaggcttatttacaatgaagaaacacatgtacatttaagatagttctcatataaaacatttaaaaaataaaacatatcccacaatgggcaccactgtttacagcaatattaaaggggagaaaacaacactcattttatggtgagcattaaatgtaaaggtacagcatcagtggaataaattcacaaaactatattacagcttgttaatccatttaagaattgttccaaatatatcatatatttggccctcagaggttcattcctacagatttcaactactgtaaatttctagctactgagaggtagaaaatggttattatcatgattataatgattattagaaacacacacacacacacacacacacacacacacacaaactcaccaaggagttacaaaatctatggagaccagaggccaactatcatcacctcatgtctgctctcaccaacagccttgcatttttcagagaactatctaaaaaaatagtcagacaccagtgtgatcactatctcctatgccaaacctattgggaatgaaacaagcagtattaccataaatgagaacattgaggcttacctttcaaggcttattctggtctcagaaattaattagatacgattattttctattgaaatgaattttagctaacataaaagactagtcctttactagctggtcttagggtaaaggtcgtacacatgagtcttaacctactctctgtcatagctaaagtcagctgaaaatccaaaattaaaagtatgccaaaaatcctaagtacaatcttttggaagtctgctgtgaaaaagcctttaaggatgtactaacttgaagtctaagtgcaaggtcataagagctctaacgctgttagatcttcctcgtttgggagaaaggatcaatgttccctacaaaacgctaagttttgcataaaggtgaaacctacatatactagggtatagaattaatttaattttgttccatcaggatcctttttccatggtaaaaaagcagaatgaggaatgaaggaatgaatcttttttttttttttttttttgagactgagtctcgctctgtcgcccaggctggagtgcagtggcgcgatcagggctcactgtaagctccgcctcccgggttcacgccattctcctgcctcagcctcccgagtagctgggactacaggtgcccgccaccacgtccagctaattttttttgtatttttagtagagacggggtttcacagtgttagccaggatggtctcgatctcctaacctgtgatccgcccgcctcggcctcccaaagtgctgggattacagccatgaaccactgcgcccggccgaggaatgaatcttaattggcctcttcatcagaagaggtaaacttggtctctgtattcatgaagctagacagttttttaagcaggcagtggaagcagacagtagaacaagattcctgtagccacagaccactacctggtatcaaactaaagcaaggatcaacttaaacaattatccaaagtcattttaactgtactaaagggtaaagttcaccactgtattattttaaaggaagttgtttaatgtaagaattccattaaccctgggtgagaaaaatcaaaacaagtcatactctctaatgagttatccatgtaagaccaccaataaaaatgcttttaactgtatttgactcgaagacacttacttggtaagtgtgaatttctttcttttttttttcttttatcccattggatttagactattgaataattaagggtagagtgagggagaacaaagagctacttctttaacattttagtatctggatagtatagcagaaactgttcctagggacaatgtatatgccattaatcacattgaataaagtggatgaattattcatttttcttttctttttgttcgagaagcttgtttatctccctttggcctttccagtgtggtttgaaatgattccgtgttggtttagttgaggaagcaacagtaagaaagtcactgtcaggtagctgagaagcaggttgtggacttgctgtcccatccaaacaactgcagcgagataaatgatcatggccatgaaacacatttcaggcttttcttccttcagtgcgaagatttgtttccaccagtccatagctctgcattgagtttttagtagattgctgcaaatttcatggaatttttgctgttgattgctggtgcatttattggagccaaaaatgttaggtgctagaatgggaacaaggtagtcagccaagcaccaaaacacaacaaaagaggaaacagcagacagaacagatggatctagatagtagataattgaagcaccaaagaaaccaagtccatgatggcaggtgaaaaccaagctctttcccataataagactttatccaccatcaacatcacttttccccattcttgcagctattgttctaaacttgcagtctctgcagccagcaaattggtgccgtggttacctccctctgccatcatccctgaagtgctgtctcagcaagcacaaaccaccctccaactcagccttcctcctgagatccacagggcgattctggccacttctgctgtattctgttggtcacacagacccacccttatacagtgtagaaggcgattgcacagtggtgtgaataccagagatgatggagatcattgaggtcatcttgttgactggcttccatttaccaactcctgtcagccattggttgaaggatattaattttattaattaccagggatattaattttctagtattcagggtttactatgtacatgggcaaagaaagcgccagttgccagaaagatcccctcaggcacagaggtgctgacagttgaaagttgggccgtccatggaaaatgtaaacgggttatgcagaggagggtattgatagtgtcagtcaacccttccactgctttgataccctcttacccaacattatatttgctttgtactgtcattgattcctcaaggtggtggctgattacagtttcttaaaaaaaaaaaaaaaaaagacctaaaacagaggatttagccagataagtagagttgttgctgcagttggtcccaagaccatcactgttatctattgtctccctcttctatcactcattctaggctccctcattcagcattcctgctggtctcagtttcttgctctttggtgactcagaccttcatccctgaagggcccaagcccctggttactgtacccttttcagaccttggttgatgcaattacctcttcactgctatcaccaagcatggaaacaccaagacatgttccaatacatctctgagttccattggtacttctctctatccccgttacatagtagcaactctatatcctcatgatagtagtcaattacctctgccactatagttttgccaaatttggggagttttcaggcattatttctttgaatactttttcagtcccacttctttcctcttaaactccaatgatatgaacttagatctcttgttattatcccataggtctctgaaactctgctcatttttctttcagtctattttctccctgtttttcaaactgagtaaattctattgatctgtttaaagtttacagattcagttctctggcatctcccctttatattaaatctatccagagagctttttaatttcagttattgtatttttcagttctctggactcagctgctgcctcaaattcctgggcttaagaaatcctccttcctcagcctcccgagtagttggaactacaggcactcaccaccacgcccagctgattttcaattttttgtagagatgggatctcactatattgcccaggctggtctcaaactcctgggctcaagtgatcctcctacctcagcctcccaaagtgatgggattataggcatgagccaccatgcctggactcacttattgaagcatttttgtgagagctgttttaaagtccttttccaataatttgagcatctgattcgtcttcgtattgaatcagttgattgtcttttctcatttatgttctgatttcctaattcttggaatgaaaagtaatttttgattgtagcctggacattatgggttttttattaggaaacctggatcttatttaatcttctttttagcaggtagttctcctgttgagatgtagtgtaaagtttggtgaatatatatgttcagtttcctgctgggtgccactggcaccaccccaccaaaaggggaccattaagtcacattgccttattgcctctgaatggagatgatcagctttctgctgggccagctggaagaggggaaaggagagggccaactagacttacctcctgcctggttggtatggcaggagtggaggcttagctcaccaggggtccttgttgacaagggagtgggaacaggaactctgattagccctgctttccattgctttgttcaattacatggccactggatgggtgtggaggttcagctcctcactgggcattgctgacattggggtgggggaagctgagtgtttactgtctcacctcatagcacctcattctacctcattgttgctaggtagagatggaggctcagctcattgttggacctcactgacagtatcttgctgggagactggagcaccacctgcttctgccatctggggaatggaagatcagctccctgtttggcctgctgacactaccaagggggaaaccagagtgcacagtggcttctattgggaaggaaggtggggtggaagatcaacttccttgctcactgactgagacctgggggtgtggtttatttgttggtgtttagctggagcaggaagggtattgccagaaagatttcctgctgttaggccaccgcctttttccttgtcctttggctagaaggaatgggctttccttggagcttttgttatctatgcatattggtgtctccaggttggaggtttctgtaacatcctgtccagaaatttttttgataaatattagggtggtatattatttttccttttttaaaaattctaatgtagttattgatatgattggtttaaatctaccattttgtgatttgttttctattttccccatttcttctgtgttcattttctttcctttttggtctagattgagtttttttgtatgtttgtttttgggttttattttagtatttaattttatttcatcttcactataatcttattagttatattactttatgttagctgttgctctagaatttagattatacatctttaatatagtataacttcaagtgatattatatcatttcctgtatgatataagaaactttcaaacttctgtttttctcctcccaggctttttgttattactttaatatattttacttctacatgttataaatttcacaatatatttttgctttatatagtcaaaatatttaaaaagcgatttaaaaactgattataaaacactttgatatttttgccttacttataaagattaccttacccagacaacctgtaaagtgtggagaatatagatttatagatattgctttgaacatctgcccaagcagtagaagaggcaaattaggaagtgtttagcaagatgcttctggaagctaagttagttcgaggctgtatatcaggcatcctgggtacccactgactggtaccaatttacttagtgttcatgggtgaggtttcacttgtccatggactttgaatccctggtgtgtatgcagtggttattacagtggctctacaaactaatgtcatgctaattgccaaaggtttggaactcttccatatttgaaggcttctggattttttgtccacttattaaatggctaaatgaatgagactaataacaggaaaggcattggaatggaaaacttttaataatacctccgagtattcattgatggcaagttcagttatgtcatgtgatgatcacttcaaaatcctgtgtcagataggtaaaaattccaaagctttcaagcctaaaatttaccctgtgcagaattttgagtttcatgattttatatcctaggcttctataatagggtatcagaggcgaatggaatcattagaggagatacagagtagatggtaagtgtgtgatatatattgagaacatttattttaaacaaataagatagatagtttttatgtataaacaaatgttactgattatacattgaagaatattgctttggactttagaagacagcctaagcttaatagagctcctgggttgattgatttgattttatgatgctgagttttgctatcctcttcctgcctcacctttataatgtgatcatgattattgttacttatttaaggtgggtgctgaggtgaggagaaaggagataataggctctttaagaaaagcttatctcctgagagtgataaatgtacagtggtcttcctaaacttcaccacagtcccatcttgatgatcattgcaaagaaggtaattatattagtcagagttctccagagaagcagaaccaaaggttttacacacatgcacgcacacacacacacgcatgcacacacacacacgcacgcacacacacacatgcacacacacgctgcatgcacacacatgcatgcacacacacacagatgcacacacacacacacgcatgcacacacacatacataaattagtcctttggtatacatgggaggattggtttccaggatgcccctaccaatagccaaatctgtagtcatccctgcagaactggtatatactaagttgaccctccgtatacatgggttttgcatcctgtgagtgctgcattttcaatctgcgtttggttgaaaaaaaatctgcgtataagtggactcagttcaaatccgtgttgttcaagagtcaactgtgtgtatatacattatatatataaaatgagagagagagagagagagagagagtcagagatagcttgatttattatgagactgtggattgtgggtttggaaagtttaaagtattcacagcagggctgcaggctggaaattccagcaggagttactgttgcagtcttgaatctagaggcagtctggaaatagaattctttcttcttcttaggacctcagtcatttttcttaaggccttctactgattacatgaagcctcgccacattatggagggcaatttgctttacttgaagtctactgatataaatattaatcacatctaaaaaataccttcaaagcaacagctagatcatagtttgaccaaataactgggtaccatggcctagccacgatgacacagaaaattaactattatagtaattaaagggataaaattattacctgcattccataatgaaaataaagagacttgctcaagtatacgcagagtaatatatgagttggctaaaggagcaaaaagaagcagaatccaaatttatatatgtatattgacaggaaatatgctttcatttgacaatatttattagttctgatgcacaagaatagactaagacaaattggctttgatttgccacagaccccttaaaaatttttgtattttcttaccgggccccatggctccagcctataatcctggctactcaggaggctgaagtgggaggatagcttgacaccaagaactcgagaccaacctgggaaacatagtgagaacttgtctctaaaaaaattcaaaacaccaacaaactagccaggtatggtggcatgtgcttgtagtcccagccactgggaatgctgaagtgggaggattgcttgagtccaggagtttgaagctacagggaactatgattgcaccattgtattacagcctgggtgacagagcaagactctgtccctaaaaaaagttttaaaaattttcttaatacaaaactttaagcttaatgttagtatcaagttatatcccctaaaagtgtgctttctgttaatatgaactaaaaatgaatactttttttctataaaaaaatttgttgaatgcgtcttaaaatgcagttccaatggtgcccatggtagttactgattaaagtggtaatggcaagtagacgtagttctgtcttagttggcctgacaaaagtcaaagtattgtaaaggaaaaatgtaaaatttgcagaaaagaaaaaggattaaaaaaaaccaaggaccaatattaaaaaggcgaaaccgctgggcgtgatggctcatgcctgtaaactcagcactttgggaggctgaggcaagagaatcacttgagcccaggaatttgagaccaaccagagcaacatagcgaagccctgtctctacaaaaaaaccaaccaaccaaccaaaaacaaaaaacaggaaacacaacaaaacaaacaaccaaaaaaaaaaaaagcaatgaacaaaaaaacaaaaaattagctggacatggttggtgtgtgcctgtagtcccagctacttgggaggttgagatgggagaatcgcataagcccaggaagttgaggctgcaatgagctgtgatcatgccactgcactccagcctaggtgacagagtgagactctctctctctctcactcacacacatgtacacatacacacaacttaaaaaggtgaaactgttcaaacagaaagccagttactaatatccaaatcagagtgtattttatttcatgttttttaggattttgctttttctgtttcatttctagaaacaattatgagaaaagtgaatgaaataacattatagtaactttataacaattagctaaagcatccctgcacaactggagaaaactggtaagttttaccactacctgcgctgcttgtcatgctttttgtgggtctgcacatgtatgctcatatgtacattacgtacttggtattgagcaagacttgtctgatatgtcacttaagtgtgtgtttagaagtttaatagaagaccttttaatttatgagagttgttttaacctcttttctgtctaaggaatcagaatacttttttaacatgttgctgcctatgaaggcacctgcacacacagacaaaacacacatacgcacaccctccaggattcctcaagatgtctggggttacgacttgtcacctttagagtttgccacagcactgatttctttttcctagttatcgaacactccgtaggttatggagtcttgaggttgtaagggatcaagaccatcacttctgtttgctttttggatttgaatacctagaacagtgcctggaatatagcagacactcacacataattataggatgaatgttgaatgttgaaaagatgaagtcttttttactggcagatggccattcagtctttgtttctaagagcaaggaagtccttacgcagcaaacctgtgctctgaaagtcagtgtacagattagttttgggctgttctggagaagatttggaggactacagttgaggcctggtagctctgctcctctgggatttcttaccctgggtcactctttgggacataactcaccatgactacatcattgtaatgtatggagttgtgatgttaaatgcttccttccttccttccttccttccttccttccttccttccttccttcctttctttcttccttccttcctttctttctttctttctctttctttcttctttctttccttccttccttccttccttccttccttccttccttccttccttccttccttccttccttctttctttgtttttctttctttctttctttctttttctgtctgtctctctctctctctctctctcccccttcccttcccttcccttcccttcctttctttttttaacggagttttgctcttgttgcccaggctggagctcggtggcacgatcccagctcactgcaacccctacctcccaggttcaagccattctcctgcctcagcctcccaagtagctgggattataggcatgcaccaccacgcccagctaattttgtatttttagtagaaacggggtttctccatgttggccaggctggtctcaaactcccgacctcaggtgatccgccccctcggcctcctaaagtgctgggattacaggcataagccactgcacccagcctctaaatgctttctatgtatgcagaagcaaggacatcattttgttcttaccctacacaaccttcagctctaaaactttcacagcagttttttttttctcagagatttctttcccagttttagttggtaactgagtagatggtctcctcatacacagagaagaatcaaatctttaaaaaataaactaaatttaatatgctgaaagggatttaggagttaatccaactcagctctctgcagccaactattgagtaatagaaaggcctagggacaggagaattgggacagaattccaatcttgccatgcaaaagctgggaaagccacaaaacacctctgaagcttacctgcatcccattttattagggagatgaacctgtcaaaggttagagcgtgttcctatgaacttctgccttgtctcttcttgagggtttaagccctggcattcaatcagtataggcagttctcttatatcagatccatctaagcaagaccttggaagctctggattttacaaatccatttgaggctaacacgataatggtctactgtgatggaaaatcatgttccacttggcaaaaggagccttctctaagtaacacttctctaagtgggtccttgccaaggattgagcctttagtgctgaaagagagatcaggtagaaacagagacaagaggcagagaaagatagggttggaggtatcattgatgaaaagtaaagatgagtaggctgaaactggggtcagggagtagaggtcactgatctctggaaagtcacgatactcttcagaggtatgatttcaaaaaggggaaagttgttgctgtctacattgtggagctgctgtgggaactctagagctcttggaagaaaggtaaaaaaggtagacaaagagcaggaagagatagatttcattgaccttcagtttttttttttaaatgaagaattctaatatacgcagtatacaatacacaatactgatgtctagtggggattctggtgcttttagctcaattgcccctttgtaaataagatttctgctgattgccttaaaatgggtaattattttgatgtacagatcaacttacccccaaatttttggatttttcataattcttccttgcagtgctactttgaaaatatctttaaaaattttatttattttatttttagacagggtcttgatctgttgcccaggctggcttgcagtggcatgatcatagctcactgcagcctcaaactcctgagcttaaatgtttctcctgcttcagtctctggagtagctaggactatagacatgtgccaccacactcagctaattttaaaatttttgtagagatgcagtgtcactatgttgcccaggctggtcatgaactcctggcctcaagcaatcctcttgcctcagccttccaaagtgctgggaggctgaggcaggaagattgctttgtcctacttttaaaacattaaaaaaattaattcaataagtattcagtgagttcttcctttatgccagttactttgctctgcggatagaaaaatgaatgagatatttcccttccttcagggagtgcatagttggatcttattgctacttaaatcccactttatgtttttttcttttagttctttggttaagaacgtaggctctgaaaaattcaaattccattttagccagttgctgagtgaccatgagtgaattatttaatcttgcaaatattttgggaagcaatttgataataatatattttgaggtataatctttaagctagtaaactcatttctagtaatctattcctaacggaataatatattagagaagttataatcgttcaaaaatatgtattgagcaactgctatgttctatatactttcctagataatttggatgattcatagagcgaaacaaagatccctgtccttttagaatttatattctagcagcaggagaaagaaaataataaacaatagactaaataagtgaattatacagtatattagaaggtgatcagtgctttcaaaaaataaaaaaggtagatcaggataaaggggatcaggagtgctggaattctcggtgagttttagttttatattatgttcatcagcataaaccttgttgagaaggtgatgtttgagcaaagacatcaagggggtgagggagttaattatgccagtggtccccaacctttttggcaccagggaccagtttcatggaagacaaatttttccatggactgggggtgggggcgattggtttcaggataaaactgtttcacctacatcatcaggcattagattctcacaaggagtgcacaatctagatccctcacatgtgcagttcacaatagggtttgcgattgaggatttaatgccaaggctgatctgacaggaggcagagctcaggcggtgatgctgaagcactcacctcctgctgtgcagcctggtacccatctgtggcccaggtgctggggaccccagaattatgggatatctgggggaagagattccaaacagaggaagcagccagtgcagtggccccagagtgggactgtgttttgagtatttgaggaataccaaggaggacaacgtgattggagctgaaaggaagagtggtaggagacgaggtcagagaggaaatgggaagttgtgtcattgagggctttacaggccaaagtaaagacttcacttacaatgtgtgaacagggagccatcgaaagtcttcgaattagtgaaatgatttaatctgatctattttttttttttttttaaagatggcatctcgctgtgctgcctaggcagaccttgaacttctggacttaagcgatagatcctccacctcagcctcttgagtatttgggactacaggcacgtgtcactgcacccagcttgacctatgttttaataggatttctcactgtaatgttgagaaagattgtaccattatttttaatagtgagaaattagaaacatcataaatggccacaaaggatggactgggtgcacacatttgaatacatatatgtgatgaaatgtcacttggttatacacttatgatataatactgagtgaaaaatagaatataaaattatatgtttataatacaattggaacaaattaaagataacagcagtaggataagaacaagctatgggtattcttctcacttgcttttccctgtgcatgcttttaatactttgttttaaaacaaagtaacccatgcttattatacaaacttgaacaattatgaattataatgtaaaaattaataaaatcctatcatttccttcaattccatacttctagaattaactaatgttaaaattgatgtgtgttcgtcaacaactatcttgtgtccttctaggaataaatatatacaaacataattcatgaatatgtatatatgtttgaatatgtataaatattaatatgttgaagcatatgcacgtacatatatgcgtaaatatatatgcatacacacacaaatctttttcgatttctttcttcctttgttcattcattcctttgtccctcccttcctcactccctgccttctttccttcaaggttcgtaatatactcataataggttcttttgcttaacaatatgttattgacattccatgaattagtagtttgtaatcttggctgcacactggactctccaaggagtattaatagtgctgatgggtccaattgtcagaaattctgaattgatggtttggcatgaggcctgggtatcaaaatttataaaacttctttaagtggttctaatgtgcagccacattgagaaccactgccttaggttatacatatagatccaactcattattattattattcttaatagctcataatattccatactgtggctgtactaaaatgtgtttatctagtcctctattgagaaacattcagtttgtttccagtatgttattctactaaaaagtctttaaacatgtatctttagttctttagttaccagtttctttatttctacaaaatacagtcctataagtaaagttgctgggttcagaggtatgagtgtttaaaattttaattggcactgctagattattttccaaaaagatctcaataatacctacttctagtagcagtgttaagagtactcctttccttatatctttgttaatccgatgaatgacaaaaagtatttgattttctttttaatctattactaattaagcatatttttattcatacttatttgtcatttgaagttctttttctgtgacttaagtatattctttgctcatttttaattgagtcgtttgtcttttcttatcaagttttaagagatcttggataacaggagtagtcttttttggttatctatgttacaatattttcttcacgtctaccttttttttgataatttatatggcactatatattttgttattattattatttttttcagacggagtcttgctctgttgcccaggcttgagtgcactggtgcaatcttggctcactgcagcctctgcctccctggttcagttcaagcaattctcctgcctcagcctcctgagtagctgggattacaggcatgcaccactacacctggctaatttttgtatttttagtaaagatgaggtttcaccatattggtctggctggtcttgaactcctgacctcgtgatccacctgcctcggcctcccaaagtgctaggattacaggcatgagccaccacgcctggctggcattatatattttaaattattgagaaagtttaacacgctttatctcatttttattcattatgtttaatattttttcacgttggtaggcctttgtcactattgttcctaatgtaagccccatgacattgttcctgatgtaagccctgtgaactactgttcctaatgtaaacccctaatgtaagcctcacgttattttaaataatactatagttaatatttccttgcatttagcttttttcatagtttgaatgcttacaagtgaaataattggatcaagaatataaattatttttgtggtttgtgataattatttcccaacggttatagtttttggccagccatcagtataaaaagttagggtaatataactttagtatttatacaataatatcatattacgtaatttaaagaagtaagtttcttaagtattttcttagctccattgtgaaggaaggcttgagttctttttcaggctgcctaagaagttaggttcagttcaagtaaaaattgtttttgcatacccattgtgtacaaggcacctactaagtgctgcaaaggataagtcctgtgtggttactactcttaaaaaaattttagtctgggcgcggtggctcacgcctgtaatcccagcactttgggaggccgaggtgggtggatcacgaggtcaggagattgagaccaccctggctaacatggtgaaaccccgtctctactaaaaatacaaaaaaattagctgggtgtggtggtgggagcctgtagtcccagctacttgggaggctgagataggagaatggtgtgaacctgggaggcggagcttgcagtgagccgagaccatgccactgcactccagcctgggcaacagagcaagactccgtctcgaaaaaaaaatttttttttttgatttagtggagagcaaaaatgaacatcttattttactttattttacaggtcaaggaccataaaagaagcctgagagggaatagataggctttgactgggtcaggaaagttttcttaaaggtagtgttctttgaaatagtcaaagacaaagtgaaggatgaatagtatttttttcttcacctttaagttcatggataagtgtgcaggatgtgcagttttgttacataggtaaacgtgtggcatggtggtttacagcacagatcgtcaggtattaagcccagacctccacaggtgtagagtgggtccacgtgttctcattattcagctcccacttataaatgggaacatgtgatgtttggttttctgttcctgcattagtttgctgaggataatggcttccaagtctatccatgtccctgcaaaggacatgatcttgttcctttttatggctgcataatatttcatggtgttatgtaccacattttctttattcattctatcattgatgggcatttaggctgattccatgactttgctattgtaaacagtgctgcaatgagcatacatgtacatgtatctttataattgaataatttattttcctttgggtatatacccagtaatgggattgctgggtcaaatggtatttctggttctagatctttgaggaatcaccacactgtcttccacaatggttgaactaatttacagtcccatcaacagtgtaaaaatgtcccttttcctccacaacctcaccaacatctgttcttctgttgttttttggctttttcataatagccaatggtatctcattgtggttttgatttgcgtttctctaatgatcagtgatgttgagctttttttcctgtttgttggccacataaatgtcttcttttgagaagtgtctgttcatgttctttgcccatttttaatggagttgtttgtatattaatagtaaacaatgaggtgaggagagtacacttgaatagagtgtatgttttctgagcagagggaaaagaaaaagtaaagacaaagattttggaaggtaagtaggtggaggtaggatgcctggaggacagtgacttgcttggtcggagagaagaattaatagggagaataaaaggacactcacattgaaaaaatgaaaatgtgcatcagactgttgcaggctttgaatgtatatctaatttgatagaagagtcaaattatttagttgggagttgtattggaatattagcttaatgttatcagtgctttagtttgaagtgaaaagagccaaataactaatgtgtaaggtttcgggcatttatttattcttgtaaaggctcactgatctcatctgcaaggcagaaacaattgattcatgtgccatagggtggttgtgtttaaatagaagtgcctggcatggctcctggtaagtagtgggtatactgtaacaactactgttaaattgatttcataagctatatgctctgatgataaataagcaattcagataagaatacaaagtcatttcaattagttctattcctataataataaaactaaattagctttcattttttcccccctaagctcattgaatggacagtctaaaccaaacaagagtgactgaatttgtcttcttgggactcactgataaccgggtgctggaaatgctgtttttcatggcattctcagccatttatatgctaacgctttcagggaacattctcatcatcattgccacagtctttactccaagtctccatacccccatgtatttcttcctgagcaatctgtcctttattgacatctgccactcatctgtcactgtgcctaagatgttggagggtttgcttttagaaagaaagaccatttcctttgacaactgcatcacacagctcttcttcctacatctctttgcctgtgccgagatctttctgctgatcattgtggcgtatgatcgttacgtggctatctgcactccactccactaccccaatgtgatgaacatgagagtctgtatacagcttgtctttgctctctggttggggggtactgttcactcactagggcagaccttcttgactattcgtctaccttactgtggccccaacattattgacagctacttctgtgatgtgcctcttgttatcaagctggcctgcacagatacatacctcacaggaatactgattgtgaccaatagtggaaccatctccctctcctgtttcttggccgtggtcacctcctatatggtcatcctggtttctcttcgaaaacactcagctgaagggcgccagaaagccctgtctacctgctcggcccacttcatggtggttgccctcttctttgggccatgtatcttcatctatactcggccagacaccagcttctccattgacaaggtggtgtctgtcttctacacagtggtcacccctttgctgaatcccttcatttacaccttgaggaatgaggaggtaaaaagtgccatgaagcagctcaggcagagacaagtttttttcacgaaatcatatacataatgggcattgggattgcagacataattgcagccacatccttaatgaaagagcaaaagtaaagagtcaaaatcaacttatataacttggtaaattaggtaaaatggcatagagcaggtcagatttctgctcattaaagataagaacttattctgttcattaaagataagaacttattaactattatttaaataaagcaaaagatcatagtggaagttataaggaaaaataacgtgggaaagtttaaagacagcttttgatttcatcagtaaaagaatacaatttggggaactcagttcagtctcagtttcaggagcaggtagagtgagaattgactctcttgatttatactgttctgtgggctattgcctctgggaagctatacatcactcctgtgatttatacattatagtagtttcaatcttgttttccaatatattttcaagtgtataaataagcctttacttatttatattgaattaaacttttgttgcttttgaatgtaattctctcatgtctagatctattttgtactttttttttgagacaggaattttttgtactattcctgcaacttcctgtaagtctgaaattattgtcaaaataaaaagttaaaacaaaacaaaactatacacccacaagaatagtaaaaattaaaaaggtagaaaataccaagtggttttttttttttttttcctaattactctgtcgcccaggctggagtgcagtggcgccatcttagctcactgcaacttccacctccaggtttaagtgattctcctgcctcagcctcctgaatagctgggactataggtgcatgccatcatgcctggctaatttttatatgtttagtagagatgaggttttaccacgttggccaggctggtctcaaaactcctgagttcaagccacctgcccctctcagctaatcattaactactatcactcattgggctgaagtatatcagtttattgtggaatgggcaagtccatatgaagagggatccatgacaaatttcttaggtaatgatgatgatattctgtgactgaaataagtaggattagctgtaaatgaagatcctatagatggtcagagagctaccatacaatatcaactttaatggagctgatggaatgaaatgaaatatggttaataataaaaatattaagtataaatatgtttctttgcttattctgaaaaaaatttataattgattggggtctttgtcactattttccacatggtctgtcaacttatagaaataatacttgagtattctggagaactggagagcagacaacatagccatccacacattacagacatacacaatacagagtgagtgacccactaactctaactaaagagtaatacatgattaccttttagtaatcaaaaggacaaagaatcagaagcagtctattcattaaactgagagatgctcatgaaaatatctaaatatcattacttcaagttgacaaacaagggtagaaaatggtcagtcccctataattctcatataaaacttgagtcatagtaagagttttagatatctatgatgaaatgaagtccagatatcactactatgtacatgttaaaaacttagaaaaatgatctaattatgcctctagtttctggacttttatgtgcataagtattcatactcattaatatcttttatgcagaaataaattcccactgtcttatttgtttatttgtattatggcactattcattattttaccgtatagaacatggttgtaacctgaagaattcaattgttgaatacaaagttgctgagcagatttctatattaataaataatgattcctctctcctgttaaagtaagtaaaccacagagccaagcatcaagatcttttatttttgttctttaagactctctatttatttagtgagtaattaaatacatttttatcttgtctctgagtctgaaaagcttttttctgtaaaacggagacaaaatgttttatttttacgtccccagagagttgaaaaattagtgtgactaaaaacgggtagtgtcagaaattttgcttgctgctatgaaaaaaataagcaaacatcacaacgttgttccgttatagttttaccagctacaatcttaatggctacgttgaagcattgtgttgttgacagacaatatgacaattttgcacgtgttcctctgtatggctgattcctgcacaagcagttccatttgggctcattggaaagatatttagatatttctccttattgtctgccattgcctataataaaagggcatttattttacataaattttataattcttgtgtcacttgaatatccttcctaacacatttcctagcaaataaaaattttcctcctaaaaatcatgatgtagaccttgtggctcacaggtttattgatcatacactcactgagtgcctaggaaatcccagctgcatttaagcatgcctttttagcgatgatgtgagaacaaactgatgatttccaatgtgtcatgctcttttgtaaacatgaatatgagatgccgttatctgggatatcctcttcatatcccagttgattcaccacattccattctgctacactatgtgccgccacagtgagatttaagatgttggtttatagacaatggtttatccaacttggtgttttctaccaagtttctaccaagttgttttctaagtatttatgactaagtacttaacagtcatccattgctctaagaacaatattggatgctgttgcttagttgagtgaattctctacataataactaaaataattttattaaaacataaattatttcatgccacacctgtgcttaaatcattctggtggcttcttattgtactggaaaagattctaaacttcttgagagaatatggaaagattctttttagctctctgatatcactctcttgccactctctgccttatagtctaagctgtaatcacactgatcatttacttccttgaacaagccaaggtctttcccagcatagatctttgcaccggccatttcccctgtctagaatgtccatcacctctcttatggctggctccttttaatcttaaatgtaacttcctcagagaggccatccttgaccactaaagcaagtctcttccatactctctaacagcaccctgctgttttatagcatttatcacaatctgtagttaaaatttatttgttcatatttttgttttctattttcactagaccctaaactccatgaaggaaggactacatgtatgtcttatttatggctataaacctagtatctggtacataataagtgctcagtaaatatttgtcaaatgaatgaatagtaagatatccccatttcattgctctgatggcagattttgcctggatacttgagagtgtcagtaacttcacctgttcaaagtcttctttctctgtcaccaaagtcatgtggaaactcactttatctgcttcactagtgtttgctaagctgtttacataagcatctgagtgaatgatgcaggcaagggctgcccagaaatctgaaggtttgtttagaccttggttatcactccaacagaaaagcagaaagaggcagcatatgtcgtgaaaagagcttgagtttctgttgatccacttggattcacatgctgccttcattgttttctagctgagtgactttgggcatgttatttactctcctcgagctttagtttcttcatgtacaaacaagcatcataatatctacctttcaaagttgtgagaattaagtaaatgcacagtgcctagaataatttccagcacagagaagatattaataaccataacgattgctatgactgtcagatattggaccaaggatagttttataagtcacatagtctgataaatatggtatgtaacttattctttgcaaggcgcttctttaatttggagcaccacgtatcctaaggacgtagacattttcatttttcttcttttctctcttttctccccactaacttgtttaaggcactcttcatttcttcattcctaagggtatagataatggggttcagcaggggggtgactgcagtgaaaaacacagatactgccttgtcctctgggaggctggtggatgggcgggaatagatgaagatgcagtgtcccaggaacagtgtaactacagtgagatgggctgcacaggtggacagggccttccacttgcccttggagatctgctgcctcagactcaccaggatgactgcgtaggacaccaccaggaccacaaaacagaccacggagatcaatccactgttggagacaatgaggatctcaaggacgtgggtgtgtcaatgcaggccagcttgatcacctgaggtacatcacagaagaagttgtcaatctcatcaggaccacagtagggcagcttgatggtaagggaggtgagggctatggagtggatggtccctcctgtccagagggccacagccagcagcacacataccttccagttcatcactatcatgtactgcaggggtttacagatggccacataccgatcataggccatgacggtgaggaggaagatctctgtgcaggcaaagaggtgcaggaagaacatctgggtcacacaggcatcaaaagagatgagcttttcctctgaccacacgtctctcagcatcttggggacagtgacagtggagtggcagacatcaataaaggacaggttgctgaggaagaaatacatgggagtatggagccggtggtcatagataatagttatgacaatgagaacattcccaatcagtgtcaggacataaaaaatgaggaacatggaaaacatagctatccgtgccttatgatttacagataaacctctaagccgaaaatatgtcactaaagaagtttgattgagtaggatggcctcttccattctctttgttagacaacctgtaaagaattagaaaaaaagtctaatataacacagtatctgcatcaatcatttggtcatttaatttcttgtgtgtttatgccttttctctccatctagaatttatggtaaaatatcttgcatttcttttaaaaatccccattaacatcttacatgatgatacacccatagtaggtacttaacatacacttttggaataataaaatagagaatcttcattcattaagagatataaaacaatcttgaagagggagagagagagggaaagaccaaacaagttatttctccattaatgtagtaggatatcaatgtttagatttaggttatggatttttacaggagaagaagttaagattctctttaactcaaatacataatttgttcaaggctacacaaatatggtccctgaacatagcttttttttttaatagtcctgcagactgcacttttcatcaacccaaaccacttgctcagctgttggctttgccatggggctctgagactgtaatttccatgacataactttcagagggcagaagctttgtaccaagctactggacaattggcaacgtggctgtgatgttcttgaacaattgtttagagaaggcaggataaaaccctggaagccttggaaaatgtggaagttgacctctcctccacccctcagctgagggcagacttattcttaaactgggagtcaagatccaagcctaataacattactgtcttgattagatcactctagctcttttcaaagtcccgttctgttgtcttactggcccacaagtgaaataaaaatagttattttcttttaaattagcctatgactcaagcaccactattttttaaaataacgagtatatgcattatagtcacaggattttagcccttaaagggacttgagagttgacataatctatttttttttcattttacaaatagagaaaatgaggcacagagagtcaaatcaactggtccaaggttacacggaactggagtcacagctgggtctagagctcaggtctcccgactcttggttcaggcttcgtccgctctaccaccactctcatctgaatttttgtggtagttggtagaatcagggagtgaagcagaatatgtcttagtggcctctctcttcctctccttggtgtcctgagtcagattgtggggcagggttagggggactatgaggaatctctcttttctagctttcctccttcatgctgctgccctgacacacacagccttccaggggtggcccacccaaggaagctgtctctcttggttgcttgggccccatgatccttgctacttccttcctatcacaagtgactactggagatttatatcatccctcaagatcaggctccctggcagactaatgagtcaaccccacactgcttgtgaaatgtggcaaagaagatatttttggggccagagaagtccttcagttaacacttaaaaattaaactcactgtgtccagtgtttggattaatatttacagcagcatctaaatgtagctattgattgattttactgtttagaaatttttcttcgagtattcgtttgaagcttttgctccaagaagtgattttaagtgttactgatttacacttgttttcatggtcgcaaaattcaaagccgaagagctgacccaagaatggggctaggattttattcagtatgggaaatttcacctgcacagactgaagagggtgtgcagaccaagaactaggtctgaaatgaaggcttctgttctcccctcatagaatatggatatacattttaaactaaactttttccataattatcatttttttctatttctgtggagccacaggaaaaaaatgctttggaaaatggagatgtgttcaactgcagtagaaagaatatggtgcacaagaagaaaacctagtgttttttgcatacatttcaaggaaatggggaaagatgattaagaacagatataaaatccaactaaaatatctataaaagtcacctgggttgtttctgatgctcttagtacctccaaaagtaacagaagtgtcagtcctgcactttcaatatcaagacttttatcttccagtagaaataacaacttatttgaagttggactagtcagataaccccatttaccttgctttctccaataagaaaggtgagagcccttgaagttctctccttaggtcttgttcacagttttggtgatgtcacagtagatgtatttggcgatattttctggtaaaaggtactatttcaggctgtctgtaaaaatcacacctttgtagctatattattatcatatttttcaatatgtcaaaatatgtaattctgcaccaagattttctaggattggtttccagttaacagaaaatgtagtacagaaataatatatatgttttcacttttccagattgtagtggtgagtagaggagattaaaagccacagtcaagcccgggcaacatggcgaaaccccgtctctacaaaaaatacaaaaaattagctgggcatgttggcttatacctgtggttccagctgctcaggaggctgaggcaggaggatttcttgaacccaggaggtcaaggctgcagtgagccgtgattttaccactgcactccatcctgagcaacacaacgaccctgtccaaaaaaaaaaaaaaaaaaaagagtcagccacttttgcaggcccttcaggtttattaggacacttctaacacaaaacttgatctaattattcagaaaaccagtgcggcagaagcatcctatttcctttgcagcacactgtttaggtgcaagttttgtattgccagtttcaggtggattattccaccttcaagtactgaaggggaatctgtagagaaagaagcgctggcagctgtagtgttggtgttgttctacctacattatgtaggctttatgtccttgggaacttttaagcaatgacatcagcttgccctactcactagttaagaaaagttaattctgtggggaatgaagttacagactttgcaataatcaccaagagaattaaatgagaaaagcagtacttaaatacctaaatctttaggatgtatttatatatggttagattaactactatttagtgattgcctactatgtgctaagtattaggtaataggctttcatgttttcttatttaactcatataaaaatacagagatgagagaagggtaatgaagttaagatttttttttttttttgagatggagtctcactctgtcacccaggctagagtacagtggcgcgatctctgctcactgcaggcgccgttccccaggtttacgccattctcctgcctcagcctcctgtgtagctgggactacgggtgcctgctaccttgcccggctaattttttttgtatttttagtagagacggggtttcaccgtgttagccaggatggtcttgatctcctgacctcgtgatccgcctgcctcggccttccaaagtgctggaattacaggcatgagctactgcgcccagccgaggttaagattttagtcagctttctgacagagagattaagtgctttgactctagagcagattgggtgcaaattccaatgtcctacacgtgctaattggagcaagttatttagcttctctggtccttagatttcccatccgtaagcatgaatagtaatagtaaaactttttagaactcttgaaatatttgtaaagcatgtagctcttagcatattaatataattatgttaaatgcaattcaaacaaacaaaaaaacagccgaccatcactaccagtcaacatttttggcttcattttttcattattttggataacagtgaaaatttagaacctcttgttccaattttctttttgctttctctctttagatagatgagcttggtggtttaaattggtgaaacaagactccaaaggagaggtatgaagattatactttcagtttgaatttcaagactgaatagttttgtgggatggttaggatatcttaaataaagggtatggagcataaaataaatcttatagccaactctccatgtgacagtgagtagaagagaagatggtaataagagtgaacatatcagaagttacagaaaatgctttctcctaaggccttgtggcttgggcttcttttccctagttttcttgtttgattcattatcactgatcaaagtccagacttggctgtaatgaagaaggtgtagcttccagaactttacagatattgccacttggtcactgtgggacttctattgtcattgtaatagccttggaaatcaggggacacattaagaacagggatatgctggccatactaattatctgttaaaacaaatgaaatatggcctgagaaggactctgtacttgagtccttgtggatgacctgtaacctagcttaataggcagacaagattgaaaacctaacttgggagtatgcacctgtaacagtagctgagttttggccaatcccagcagccatacttcaaccactcatagtctgctaagtgttcaaactgtgttcaaataaggcaaatgtcaacctggtgcaccaatccagctgtttctatacctcacttctgatttctgtacttcatttccccttttcttttgtctgtaaatcttcttccaccatgtggctgtgctggagtctctctgaatcttgctgtgattctgggggctgcctgatttgcgaatgatactttgctcaattaaacttctttaaatttaatttggctgaagcttttcttttaacaaatggtgtcagaagtgggatctgaagtagaccttctaacaacctccaaaattgctgagtcaacaagcaagttacctgatgaacgtatttgtgtcctttgatgtctcagaatggctggggattgtgtggtaagttctctctcagatttcggagctccacagatttatgttttgagctctccaggtttctttgagcaaatttctgatccaaactgggtttgaaagtcatgacagaaactggacgggttgaggatcaaatttgatctggtaattaactagcttggatccagttagaagcctcttacctctgactgggtcagaaagaaactggtagtaagaggtaatattgcaggggttataaaattttgcttttaaaaattcacaaggatttttgtgttctactcctttgtttcatttttcttgcacacttaggtaggaaagatcattggctaagttaatcaatggaacctagagccacgccaatattttaggtaaaaatgggattctcagtttctgaaaaactgagttccttctagcttatacattatacatacattatacatacatatacattccttccaacttatacattaggcctgggaagcagcaaagtcttagagaaatggtgaaatcttactaaagataatttacagtggaatgttctgaataaacaacaacatagaagtgtatttaaaaataagggctcctccacgtggctcaggcctgtaatcccagcactttgggaggcccaggcgggcggatcacgaggtcaggagatcaagaccagggtgaaaccccgtctctactaaaaatacaaaaaattagccgggcgcagtggcgggcgcatgtagtcccagctactcgggaggctgaggcaggagaatcgcatgaacccgggaggcggagcttgccctcagccgagatggcaccactgcactccagcccaggcgacagagtaagactctgtctcaaaaaaaaaaacaaaaaaaaaacaaaaaaagggctcctcaaaattaaatctgctaactgtttagtttagttactatcctgatccaaaggaaacagactgcagcaccaattggctgactttgggtaagtagtggggtacattttacctgagtaaaggatgggattgcattggaggccctcccctcagtaaagtccctcttggttaaaaatggattaaagatgacagggctcaaccaggggcaagtttgagccttgccagttcaatactgcatgctaagcagagtggctaatgtctatgttttgtcacatgtattttgctctgtccagaatgccaaatgttaatttcattaccctatgcaaccccttgggtggcatcctgcaacagtgagaaaattttgcctgtggttccatgattttttgtgtatgtggttggctccctggcactatagtatgtttcagggaaggggaacccaggaacctaacacgctggcaaaagtgtaagaatttcttaccagtcaggtttctggcctctctttccctgtgcttctctttccttgtgcaaactgggaaagttctggcctctctttccctgtgtaaactggttaaatgaatggtaaaaaatcagtttatcttctgcaaagttttgattaatggaaaaaagtatttatgaggttagtcttaagctgtagcgaatctggtatgtttatgcatcttctgtatcattctttcataaagaggggtaccataggattgaacatgggctttaaaccccataagcccactgctcaagatggcccagcaagctggtcagtaacaaactttgctgcaggatcctgaaacaaacaaaaaaactggataaggtctccatattgttttatgtctttgggagcttgaccttgtgaccatatggtggtactttctcttgctctctgccttccagggaaaaggaattttagggttcatgtcatagttacctctaaaaattatcttgagtagttaaaagcctttgcaagctcaaaattaactactctagactccttctgggatgggcagtggagacttcccagtgctgtagctcagtagctaagattttgttctttcacagtggtggcttggattcaatcctggcttaggaaatgcatactttctggttgatatctgtgtgacctttatcatttgttaattctcttcctctccatgaacaacttctgacttcccttcttgaattttcctttctttgagctacctttgaagattctagattttgtaaaaactgcatgttttcctagccctgtttcttgaagggctctgccctaaggccagaattaagaaactggcaaataaaacatctaataactactggatcttcttctgtctgtgtatttatgtatgtgttgtgtgtatgatgtttatataaaagatctctaattaattggcataaaaataagctcttaaatcaaatattttgaaagaaagataaaaatcctaatgtcttttagctcatgtaactttagtaatctttgggaaataaaaacagctttaaagattattggtaaaataaagacatttggtctaaattaggcaggtcagatattaggtttattaaatgctttaaggtcatgaactgttttgacttttgaaaattgttcaatttacctaccttgaagacactagattctagataagccctggggacatgtggaattagcaatgccccttagccatgcaaagaaggttataaagaaaagatatttttatataagaaagaatactgtatgttaaattcttatcctaaagtaaaataatggttatttaaaaagagagatgtttaggacaagtcagaaagtccaagcacactgtagatgaaagtctgtgtaagtcatgaaaggattcgtgaaaggaaatctgtgcaccaaaagcaaaagttgctgagttaccattataagatgtgattgagattactgaaaaaaatagttttacgtgcagggtatgtgaggatagtaaaatgtgtttttggcaaaagattataagaaggcatgggaatgtaaatttttgcctagtttagagggttaaaggattgttttaaattatgttagaataagctataaacttgaacaaggtgtagaagggttgtaaaaattaatcttgtaaaagaaattctgtgtgtgaacatattgactaaatttaaaaggggattatttgtttttcctgtaaattgaacatcaaaataaaagcacaaacaggggtttcttaaagcactcatctgctctttaacaaaaatttgtaaagggttataaaaggtttatcggaatctcaccttatggtcaaactgatgaagactggttagatttgtctatagacaaatagacaatagatagattataatctatccaaattatatataatttgttttattaagaattgggtttgacattaataatatactaatgcaagggtaaaatttggctttctctcttgaacaagattttcatgtaatattaaaggataatgaaagatttttctttgccttttgagtaaactactgaaaaaacggaaagacaacagaacaattggaaagctaagtctgtcctttatcaatgagtaaaggtttttgtcttttgaaaacttcgagtcatcattttggctaaatgaatgacttatggtaatctggaatactagttcataatattaagtgttttaaacctttaacatatttaataggcttctcaaaatcaaatttcagcttcaaaattgtcttttctgacctctaattttgagatgatacagagggctcttgaagcatctaaaagagagataaacaggattatttgacatgtttagttacatgggatcgtcaaaataaaaacaatgtttaatcttcttcaggttatattttcatgaataataataatatattccaaaattttatgcatttctaaaattctgatatgtctgagtatatgctatcaatcataattatggttattgttattatagatcacagaaataaccacatttccttgtctgttctgtctttacagctatttaaagtcacttccacaggtaattgcataatgctgatgcaatttctaaaaatttcacaagcacataaaatcctaaaatatgatgtcttttaggagattcatgaaaggatggaaaggaccctgaaaagtgctcttgaatataggtttctaataactttaaaatcacatcgtgggtaaaattccccaatttccccagaattggaccgggtaagaattcctgaaactttaataaaaagactgattggtttataaaactgcttaccccagtagaacaaaaattaattaaataccgagaaaatactttgccaggttttcatgctaactcagccaatattaaaattgttgagacatacaatttgaatgaactccatgctctaactgaaattacctatgacaacccgtcagttatcagtgttatgcacctaagtcagagaaacaactggtattcaagaggacataagtctagtgttaagcatggactcatggagaaccaggaaggctgccttgtccttcctgagtccttaaagcttttgttattaaaggttctgcatttcatgactcatcatggaaaagataaaattatccacattacatgcatactggtgtggtgacttatacattgctaaattagtttgtaaccagtatttggtttgttaaatccatattcttgggaagacaaccaaagcttcaggtacacttggctacccgatgggccatttaaacatttataaagggatttcattcaattgccattttcaacgcatgttttctgtttgtataaaagctttcccatgcaagagggctgatgttataacagtagattattacgctacagtgtattttcacctggtaaagaaaggtttttatgattccctgaggacaatcagcccctacacaatctagaacccaaagattggatcttctgagaacatcagagaaagactgtccttgacatccacactatagcaaaactttggaactttgaactttgggttcgtaatctcacaactgagaagggtccctccacactcttggaactgtacatccattggaacccttaaggtaaagctaaccagggaaatttctccccagaagaagatgccatccttgatataaacagcttttcccaagatcacagatcaagacttctactattatgagactcttatctttgaatactttttccttgtttatgcctctgtgaacaatagaaatggaaagggggtctgttgtgtgcacttatatggtatacttttattcataaatgattttgcagccagccttacacatgaataaccttatacctttacagataaaaaaatgaaagcccattgtaggtgagaaactttaaaggtagaaatattgccatgtaatcagtcagaaacagaacatggattcactcctcttaacccacatcgtgggctaaagagaatgttgctaggaggtcttcactcttcccaaaggcatcatttgttaggtcatttttctgtggtttgaagtaaaagaggcaatgattagaaatgtatccctcatgataggcactatagcagattctactgcaaagactatgcttacacaacagactttaaagtctcttgtgacagttatgctaaacagtagaattggctaaacagagaagaatctgtgcagtgctagcacttgtggcctaggaagaaatacattgggtattatagagattcagttgtaggggattaacaaaaagatcacttagttaagcaagtggactctttatctagctcattctttgatctatttgattttaggtggtttggtttatggggaacctgggtaaggagcatactccaaactcttggtattatcctcccaatagttaccacagtagtctctctggtgcactatattctcttgaaggttttaaatgtttgcatgcagccatctctagaatgtcaaatggtctctcttcaactggaatgacaaaagctgaagtaaacatgtgaccatgaggacaccgtaaactatgaaggacatgctgataccagaaacccaaaatgatggtaactgagagtggcactaaggccttaagtttggttacgctctcacctaagtgagaacctggccaaaaagggggaattttttagaacaaaattatgggaggccattgtattggactaagatcatgcactagaccccaacagaccaaaccaaaccaaaacggagttgcttatgctaaatttgacgtaatgaaactaagactttaaggaaacacataaattctagaacagaccaggttttgttttcctcctgaaaacagaatatttcagcatagggaggtacccactcagtccttgttctctccttggaaaactcattcttctactgtttcccagcgggtttgaagacccaataagtacatttatgatggtgatcatgacattaatgactaaagttttggtcaatctctcaaaattgagaaaatgaccaaaagtggggaattgttaaagcaagctaaatatagcctgagaaagactacatacttctatatttgagttttgtggatgaactgtaacctagcttaattgaaaaccttgcttaggagtatgtgcctgtaacaatagctgagtcttggccaatcccagtggccatacttcaaccactcaaagactgcaaagtgttcaaactctgttcaaataaggcaaatgccaacctgtaaccaatctaactgtttctatacctcactcctgacttatgtacttcattttctttttttttttttcatctataaatcttcttccaccacaaggctgcactggagtctgtctgaatctgctgtgattctgggggctgcccaatttgtgaatcactcatttctcaattaaactcctttggctgaaatttttcttttaacacctctgtacttttggaatagaagtactttatcataggcatgatatatcaagggcaatacagaaaatgatattcagttgatcgtaaggcaattactctcaccacttttttagtaaaatgcaagattgagaattaatctttgactgtcttatatcacagttccctgctttcccccaagcccttggtggcctttctccttggcccatgacttttttctgactatacacagatggcctctgaggtgtcccactaaggcttttcctccctgaaagtatgtccctcttattccaaaatgtattccacagaataaatgaaaacagtggtttacacttgcatagcactttagagtttacaaagctccttctcactcattattttatttgctttttataacactcctgtgaggtagggagcactatggaaaaattggattggtgttaagtgattttcacagagtttacatgccaggttagctcccgaaccagggcttaaactcagtcttctggtgccaagtccagtgtttactccattacttcacttggatgctgcatattataaaggagaaatagcttcaagatatgaatgattggttaacctcaccttctatggaagatgcacacttaaaagaattgcttgttaaatcatatagaaatttttcattggtgtaggagagagagcagttttttaattattaactgacattttccttcttcccattctactctttccattccaaaagatcagtgatatggtcttcactgctgaaaggtcactgactcactactaaaagtaatcaatcagcagccaataacctaggatgtgtacaatatcatacttactgtagtgtgagataaaaaggctcataagagtaatgatcctttcctatgaggaatttataacacagtgaattaagatgacatttattttaggagttgaagaaaaccccttgaaaaaaactttggggtgatatctgtaaacgcaatatgaattaaatgtgttgtgaccttccgtctgagcccttccatcccccacagaagaaggtaagaaatcaacagagcttgcatgcccctggtgggaccatcattctgtttttcacaataaactgctgaaaccagaccttaagaggaagctacaattagatctcatcacctacccacctgctttcaaaagagaccaatcaggttaattccctcaagctatgtatgcctgtttattccagtgttcacaacatctttgaaccttcagatcacccttatggactcttatctccataaagcttggtactttctgtagtctaacttttatccttttctgaccctgcacacactcttcattatgtactctggctagcattttgcaagcagaatcccttatgacctccactgttttttttttttttgcacattacctttatattactgcagtcctgttaagcagtgcagggtttttctgctatgctgggtctcaagttttggtaagtgccatttttgttttttcaaaaccatgctgattcagataatttctctttcttcctttgtagaaatttctatgcttggaagaaaattttaacagactgttccaactgcaaccctttcttgttttatcttcaatgatcctctcagccactcaccctccctcctcaaatattttgccaattataatcatctgcacagatgaccattcaatactttggcctcagttatttagcctcttctacagtaatttcaccctccaaccctaactcagccattcccatgaacatgctcctgaattttcagtatcaataacagcaacccatccatgctgtttcaagtattctactttctgatcaccaacttttaacctttcctgttcattccttctagtactcccaattatacattttttcaaacctgccagaaacaccaatccattgatcctatcatcctctcactatcctttattcctctcagattgttactccttccttatccaacttaatctccaaggtgtaagtttataataatacctttgcatacaccttctactcatttgttcatctgccccatccactggaggtttttccaggaattatgttcaatgcaatgcccatttttggggtatgcctgagctgatgaaggaaaacacacaacaagatagaaggtcttacaattgtgaccacaacctcaaataggcagttctgcattttctgtagtcaatttacatttttactctccgtggtaattgttttatacagagtttactcaaatctttagcaaatccttctaacttttagattcagctaaagaaccgcttattattttaataaaaaaagtaatcagaagagaagttttaccccatcccactgctaactacatccaccagtctgcatctgaaactgcaaactctgcctattcttataatgggcattctgctctatctaaggccaacccctccatttgtacccgggatcccagcctttcttgcctctcaaggactttgctcgagcaactgtgtctctagcatcatcacatttcggtcactgttgaagcattcccatcagcacacaaatatgctgtaataatttcaatattaaaaaaaattccttgacatcacatttttcttcaacgggccacctattttctctgcttttctttatagctgcattccttgacagaattacctatactaatagtttccacttcatctgctaccatttgtttattgaacctactctgatctgactttgtgtctcaatgactccgctagaatagttctcacctagatcaccagtgacatccatacttccaaattcaatgggcagttcttggtccttgtctcatttgacctttcagcatcatttaacatggtcaactttttttttgtttaaatttttattttttaaattaaattaaaaaaattttttttttttttaggctgggtgtggtggctcatgcctgtaatcccagcactttgggaggcagaggcaggtggatcacctgaggtcaggagttcgagaacagcctggccaacatggcaaaaccctgtatctactaaaaatacaaaaattagccaggcatagtggtgcatgcctgtagtcctagctacttgggaggctgaggcaggagaatcgcttgaacccgggaggcagaggttgcagtgagccgagctagtgccattgcactccagctggggtgacagagtgagactctgtctcaaaaaaaaagagaacagattttttttagagtcagggtcttgctctattgcctaagctggagtggtgtgctgcctttgcctctctagaaggtaggactatagttgtgcatgaccacgcccagctgattaattttttttttgtagagataagggtcgcactagggactactggagatagccaccatgcctggctctttctcttttttgaaagaggacacttcactctcctattccccctgccccaatttcctggttgctcccttaaactctcctttatagtaccctctttctcttcatgacctctaaatgaaatgcctcaaggatcagtcctcagatttttcttttctctgtttatgctttctaagtgaacccatccaagctaattattttaatgccatctttgtgctgatcgccggaatttttatctatagccctaacttctctgagccatagttttgtatattcttttgtggcctacttaacgtctctacttggatttctaaagagtatccaaagtttaaaagcaatctaaaacaaaactcttctttgcatgctatctgaaagtgatacctccattgtcctccccatttttgtaacagcattaccattcatccaactactaaacaagacattctgaattcatctttatcttctctctggtatcccacagtcagccattcatcagcaaatacaaatagctctgcacttaaagtatattctgaacctcaccacttctcagccataatcaaaggcaccattatcgcactttgactactgcaacagcttcttatctatttctctatttcaactcttgccttcctcttagatcctgctctccaatcagcaatctgattcattcttcagaatgaatcatgtgtctgtttgtactcaaaagtaatcacttccctctatcctttcttgttcattaaactctaaccacactgaattccttgtgtttcttgagcacactaaacatcctctcctcgcatgacctttgaactaactattccctttgtctagaatagtttttcaccttatagtacctggttctctgcttcattttcttcaggtctttggtgcaatgtcaccacttgagagaggacttctttgagagaggttgccaaaaagaacactccaaatctaattctgctgtcaatgacctccaaccaatcacaattagaagcaaacctgtagtcaaactaagttgggtttgttgactccttgtaatgagggagaccatggaagttccagtaagtaagaggattttagaaagaacatatagggtttgggtttttgttaggtgataatgggaaaggttcaaggaagcaggcttttctttcaaatgactattgttaggaagtaagagtaattctatagttgcatatcttgataattctcctctagaaggcagtaagaatgcagaaaatgaaaattttaatgggttaaaaaagcaacgatcactcatataaccgggatagggaactatttggttatttttatggtttggacatggtcttctttttgtctgtgttaagacatgaatatggaatagtcttatttttgaaaatggaatagtcttgctccattatggtactgagtagtcttgtcagatattggtgttcagagaagctgtttagtaggagatcatcaagtcctaactatgagtgctggactagctcctagccacaccaaggcctatgtgatagtgccaggccattttctagttatcaggggtagcttttctctttcatagtcctctcttttggctgaaagcagactaggacaggccacaggacattaatctataatatccatacagtgttttcatcattgtcaaaactatgtcggttaggaggttgtctagagaatgttgtctgtagtgggactaggattggtctctctgttctttttgctgcaaaacaaattgttgaatccctttgacatgacaataaatttgaggtagcatttaagaatatggaaagtgtacattagctatattaactgcagtgcaggcaattaccagtaacacaatggttattagttcttctttttttttttttattatgctttaagttctgggatacatgtgcagaacgtgcaggtttgttacataggtgtacacgtgccatggtgatttgctgcacccatcaacccgtcatctacattaggtatttcccctaatgctatcccttccctaaaccgccaacccctgagaggccccagtgtgtgatgttccccccgctgtgtccatgtgttttcattgttcacctcccacttatgagtgagaacatgcagtgtttggtttctgttcctgtgttagtttgctgagaatgatggtttccagcttcatccatgtccctgcaaaggacattaactcatccttttttatggctgcatagtattccatggtgtatatgtaccacattttccttatccagtttatcactgatgggcatttgggttggttccaagtctttgctattgaccagtgctgcaataaacatatgtgtgcatgtgtctttatagtagaatgatttataatcctttgggtatatacccagtaatgggattgctgggtcaaatggtatttctggtgctagatccttgatgaattgccacactgtcttccacaatggttgaactaatttacgctcccaccaacagtgtaaaagcatttctgtttctccacatcctctccagcatctgttgtttcctgactttttaatggttgtcattctaactggcgtgagatggtatctcattttagttttgatttgcattaccctaatgaccagtgatgatgaggtttttttcatatgtttcttggctacataaatgtcttcttttgagaagtgtctgttcatattctttgcctgctttttgatgggattgtttttttttcttgtaaatttgttgaagttctttgtagatttattagccctttgtcagacggatagattgcaaaaattttctcccattctgtaggttgcctgttcactctgatgatagtttctttagtggcgcagaagctctttagtttaattaaatcctatttgtcaattttgccttttgttgccattgcttttggtgttttagtcatgaagtctttgtccatgcctatgtcttgaatggtattgcccaggttttcttctagggtttttatgtttttaggtcttacgtttaagtctttaatccatcttgagttaatttttgtataagatgtaaggaaggggtccagttttacttttccgtatatagctagccagttttcccaacatcatttattaaacagggagtcctttctccattgcttgttttttgtcagatttgttaaagatcagatggttgtagatgtgtggtgttatttctgaggcctctgttctgttccattggtctatatatctgttttggtgccagtaccatgctgttttggttactgtagccttgtagtataatttgaaatcaggtagcatgatgcctccagctttgttctttttgcttaggattgtcttggctatagaggttctttttttggttccatatgaaatttaaagtagttttttctaattctgtgaagaaagtcagtgatagcttgatgaggatagcattgaatctataaattactttgggcagtatggccattttcactatattgattcttcctatccatgaacatgaaatgtttttccatttgtttgtgtcctctcttatttccttgagcagtggtttgtagttctccttgaagaggtccttcacgtcccttgtaagttgtgttcttaggtatttcattctctttgtagcagttgtgaataggagttcactcatgatttggctattattagtgtataggaatgcttgtgatttttgcaccttgattttgtatcctgagactttgctgaagttgcttctcagcttaaggagattttgggctgagacgatggggttttctaaatataaaatcatgtcatctgcaaacagagacaatttgacttcctctcttcctatttgaataccctttatttctttctcttgcctgatttccctggccagaacttccaatactatgttgaacaggagtagtgagagagggcatccctgtcttgtgccggttttcaaagggaatgcttccagtttttgcctattcagtatgatattggctgtgggtttgtcataaagagctcttattattttgaggtacgttccatcaatacctagcgagatcaacgcagaaggcgagtgatttctgcatttccagctgaggtacccagctcatctccttgggactggttagacagtgggggcagcccacagagggcaagctgaagcagggtggggtgtgtcacccgggaagcgcaaggggtcggggaactccctcccctagccaagggaagccgtgagggaccgtgcagttaggaacggtgcccagatactaggctttttccaaaaccagcaggatgaagatagggaagattatcttgatgcatcttttagttaggtaataaaggaggttagattagtggcagatcaaaatgaaagaaagagggctgagaaatcagaaaattaatcttgttttgtggtcttgggtgaaagctatccacttctgtagtcatcagcttgtagataatttttaagaatccttaactcggggtcttccaagtgcatggatttccaggctttgtaagaaatagatgtatctttttagttagaaagcctaactcccattactgggtatatacacacccaaagaaaaataaatcattttaccaaaggacacctgcacttgcgtgtttatcgcagcatattcaaaatagcaaagacatggaatcaacctaggtgtccaacaattgtgtgctggatagagaaaatgtggtacatagatacaatggaatactacatagccataaaatagcataaaattatatcctttgcagcaacgaaggatgaagatggaggccattattttaagcgaattaacacagaaacaaaaaaccaaatactgcatgttctcacttataagtgggagttaaaccttgagtactcacagaagatgagaacaacaaatactggggaatccaaaagtcaggagggaggaaagggggaaagggctgaaaaaaaaacttcctgttggatactatgttcactatctgaatgatgacatcaatagaagcccaaaccccagcatcgtggaatatgcccttgtaataaagctgcacatgcacccctgaatctaaaataaaagtaaaaaataaaaaagcgtgactccaacgaccaacaccttgaagttttactgttgtgtcagttgttaataatccctgccaaggttcttttcactggggctgaagggctgtttctctctgacgtattttctagaagactagatctccctatttcagatcagacagtgggtgttttaaaaatgtagtttgaacctgtttgtgttaaagctggcagcatcatatgtgtctcatgtgatatttggtcacattaacctgtagtatggcataatctaggtttagaagtaaaattttcaaatgaactgggtagcttattattagctcatacggagatcacctgtgggtcccagagaaggtagatctcattgtcatgaaggctaatagaagtctgagtacttttgagaactatgccaattttagttttagaatttcattagttctttttacttttcttgatgtttgtagacggtaaagatagtgaagtcttaagtaaaagatacaggtttacagagttatttggtaatagtataagtgaattatatgcccctattactagaaagataagttaaaatttcccatattggagaaaaagaaattaaacattctggtcacaactgggccatagctctttgtcaaggacaagcatcaactcatcacaagagtaaataataaccagaacatatttatagtccattgctggggcatttatataaaatccattcagaggtgatcaaagtggccttgagcctttggttcctatcaatatcctacttttgcaatcctcccagaataatctcatcagaaagtagggcatgcatagaaaatgtctttggcaatattcctaaaattcttccaccatgttggttaaatattattgtcaatgcatctttattattttggataatattgtgaagcatttttgttaaatgcacttttattatggctatatccttaggtaatatcaaattgtctaaaagtttattaattctcctttcattttatagggattcctaaagagatgaggaaatttgcttgttttcaaagcattttaaaataatagactaactcaaaattatatctactatcaatataaatgtttgtttctttactgtttttcctctggcaggtccaggcaagggcaatgaatttaactctccaagctgatttagtttctgggagaagcttaattttcaagagtaaattcaagctcttgaattaaagctcttgagatagcataaccttctttgcaattttcagtttttaaaaaataataaactattatgtaatattgaatcaagaatatctaagggagtctctaggtctgtgcaaggtatgagctgttgtctaatttaagtaagcagtcatgggcttttcctttgggtcatgtaaggaaggtgactggggttagagcgttaaagtaatagacagtgatgtgtaagtgttaaagtaatggacagtgacatgtaagggcaaagaaacaataattcataagaagtttggctaatagctaagaagcttgagggatttttgtcatttgcagggtctgtaaagtgtaaggaatcattaaggtcggtgtaaatcctagaactaaattaactgaagactctcattgctgatataggttttaggcaaggtgatgtatcttgactattgtaccataaaaaagactgaaattagcaataaacttctgaggattcctctatatttgagtcagtattcctagtgcttgtccagccctctcataaacaaaaggaaaaaggggtttgtggatttagaaaactggaagcaaggttgtttttttttttgttttcagatagttgtatcactctttgggcctaaataaaaatattctgcctttaactggaaaagaagagttttagatggagaagaaccaattagctgcctcctataaggagtctcttatgtgaaacaggaataagactataataatctccaataagaaaagataatgggactagaagctaaagttttaaaacaatataatttttttttttttttactagttagaggtattcaaggatggaacaatttcttcattagaaatgaggaagaatagggtcgggcatggtggctcacgcctgtaatcctagcactttgggaagccgaggtgagcggatcacctgaggtcaggagttcgagaccagcctgaccaacatggagaaaccccatccctactaaaaatacaaaattagccgggcatggtggcgcatgcctgtaatcctaactagtcgggaggctgaggcaggagaatcgcttgaacctgggaggcggaggttgcagtgagccgatatcgtgccattgcactccagcctggacaacaagaggcagattctgtctcaaaaaaaaaaaaaaaaaaaaaaaaaagaaataaggaagactagtaaaaatttcaatcaaagcctggactatcatttgtttgaaataagaattcaaatattatttggatggctagaataaattattcaggctatttagaccaaaccattatatgagtgcacaaaaggctccagttgtaaggaacaggtgaatattctgaaaagaagggcaattcctgtgcttcaaaagccaatcatgtatatttatggttttgttttgttataaactcaagagaaagagatgaacaaaagtggttggtggctttccaatagggttaagaggaaaagagggaactaatatttattgcatgtttacaatgtgccagtaaaataaaagggagatgctggaattttttttttaaattcccaatttctatacagcagtatatagtttatcaatagcaaagaaagacaatttgaaaaagtaatggttattgttaaacctgctttattttccaccaagtcttggcaggatgagattcaggattagaacagaaggtttaccttgttcataagatacatctaaatgaaggtgtgggaggggagggctagaactgcatgttaagaagtatgtaagtgtatggaaacccataaagttaagagttgaagtgtatgggagtgaatttggatgagatttctttagagcaaaataaacattttttcttaataaatactacaggttgcttaatcagaatgacaaaacaggtaaagaggcaaggtggtcatgatggtgtggtattaatttcataaagctatctgttgctttggaggcatgggccccagtcttagcatacctgagcttgagttctagtatttgcattttatccttttcattattgacaaaatgagaattaatcaaacttattttaattattcaaagtaatgaaatgtatgtgaaaagcctttgtaaggtgtaagacactatgaagtgtttgttttggtaacaatgaagttatccagtaagagtcttattctgctagtcatggatatgcatgggcaacaatgtctgcctccccagattccagtcactcctctctattgtgttgcatcatgaagcttgagaggaatggattgattgattggtcccattccctaacccatatctcaataaagtcattggactgtaacccatatctcaatagagtcattgagatatattgcattaagccatgcctgaagccctattttctctctgggcattctagttttatgagccaataaatccccttcagcttgagttgaaatttttgtttcttgcaattgaaacaatcttgattgatgaaacatttaataaattttgactcactgacagttttatggaaaagaatgtaatggagaccaggaagaatactgttactctggatttaattctgattgataggaaagaacttgttaatgacatgtatggtaggttaaatgaaagtagctttggagtcaaatatatttgggtctaagccctcattccagcatttgttatcagtgttactttaagcaaataacttaatgcctttcagctttagtttcctcatctataagttgggtgtaataataatgtctatatcatcggagtggtaattaggattaatagataattaatagataacacacataaaatatgccatagcacatattaaggattcaacagggattaggtttgaaaaactagaaatggaagatgcagaataaagacttaactgcccattattgccctatctctaaaataaactgaagacaataaggaaaatgaatgagaaagggagaaacatcatctttttaaattaaaaggcaacactttaagtgtgaaaatacactaattagaagagctaatgagtgcatctgaaattagatcagggtaaaggaagatgccaggagaggatgactacattatagagtttggacagagtcagcacagcatagatttctccataggggccaatgggtagccatactttggaacataatcatgaaaggctgtaagtctctgtaacctccttgctgttacagtgtaacagaagaggcaaggttgaatgaggaaaccttaaacatactatctttggaacaacgctaattatgaagaagaatctgtgtatgacaagcaactctacagctatttacctttgttaaccaatgaagagagaaggtcaaatcaccttgcaatctcacagacacaaaatatgtactatgtagggcttcactgtgagctagagggtatccttattggcctagaacattcttctgaagccttatgcacactatcttcctaaaaataacttaaccaagaagaaatcacttaatttaaagagaaatattatttaaaaagcaacagaggatttatataaaacactacaatctgaaaatgaaataagaaaacaattttatttacaatagaatacaaaatacttaggagtatatttaatcaaggaggtataaaatttgtacaccacaaactataaaacattgctgaaagaaattaaagaaggccttaataactgtaaagacattctgtgttcatgcattggaagacttaatactgttaaaatagcaaactactccaaatggttggcagactcaatgcaatttctaccaaaatcctaataccctgttttttttttgtttgtttgtttgttttgcagaaaccgaaaagctgattttaaaattcacatggaattgcaagggatccagaatggccaaaataatcttgaaaaagaaaaataaggtgggaagactcacatttttatatttcaaaacttactacaagctgtggtaacaaaggcattatgctaatggcataaggatagacatacagatcaataaaatagactgagagcccagaaataaactcaataatgataaacccaagaaacaagctcaatagaatagattgagagtccagttaattttcaacaaaggtgccaagacatttcaatggaggacagaatgatctacttgacaaatggtgctggggcaactggatatccatatgcaaaagaatgaagttagacctctatctcataccatatgaaaaaattaactcaaagtggatcaaatatctaaattagaaactaaactataaaactcttagaagaaaacacaagagtaaatctttatgaccttggacttggcactagattcctagaaatggcacccaaaacacaagcaatacaaggtaaagtagatacattggacttcttcaaaattaataacatttgtttgtaaaaggacatatcaagaaagtaagaagaaaatctaaaggatgggagaaaatatttatgaataatttatctgataagggtctagtatctagaataaagcactcttacagcccaaccccaaatagacaaacaacctgattaaaaattggcaaaagacttgaatagacatttttacaaagaagatgtacaaatggctgacaaacatataaaaatatactcaacatttttagtcatcaggaaattacaaattataccacttcacactcaactaggatggctgtaatttagaaaaaattaaaataagtgctggtgagaatgtggagaaattggaaacctcatcaattgctggtgggaatgtaaaatggtgcggccattgtagaaaacagtttggctattcctcaaaagttaaatatagaattataatatgatctaaaaattccaatcctagatatataacctaaagaattgaagaaaggtattctaataaattattatatatgaatgtttatagtagcattattcacaacagccaaaagatggaaacaagccaaatgtccatcagtgaatgaataaacaaaatgtgatatagctacaaattgttattattcagccataaaaacaaatgaagttctgattgaccttcaaaagctttatgctgccctctccctctccctctcccctttgcacggtctccctctgatgccgagcggaggctggactgtactgccgccatctcggctcactgcaacctccctgcctgattctcctgccttagcctgcccagtgcctgggattgcaggtgcacgccaccacgcctgactggtttttgtattttttcgtggagacggggttttgcagtgttggccgggctggtctccagctcctgaccgcgagtgatctgccagcctcggcctcccgaggtgccgggattgcagacggagtctcgctcactcagtgctcaatgttgcccaggctggagtgcagtggcgtgatcttggctcgctacaatctccacctcccagccgcctgccttggcctcccaaagtgccgagattgcagcctctgccccgccgccaccccgtctaggaagtgaggagcgtctctgcccggccgcccatcgtctgggatgtgaggagcccctctgcccggccgcccagtctgggatgtgaggagcgcctctgccgtgcagcgaccccgtctgggaactgaggagtgtctctgccctgccgccaccccgtctgggaggtgaggagcatctctgaccggccgccccgtctgggaagtgaggagcgtctccgcctggcagctgccccgtcagggaggtggggggcagcccccgcccagccgccgccccgtctgggagttgcgggggcgcctctgcccggcgccccgtctgggaagtgaggagcccctctgcccggccgccaccccgtctgggaggtgtacccaacagctcatcgagaacgggccatgatgacaatggcggttttgtcgaatagaaaggggggaagtgtggggaaaagaaagagagattggattgttcctgtgtctgtgtggaaagaagtagacataggagactccattttgttctgtactaagaaaaattcttctgccttgggatgctgttaatctataaccttgcccccaaccccgtgctctctgaaacaggtgctgtgtccactcagggttaaatggattaagggcggtgcaagatgtgctttgttaaacagatgcttgaaggcagcatgctggttaagagtcatcaccactccctaatctcaagtacccaggggcacaaacactgcggaaggcggcagggccctctgcctaggaaaaccagagacctttgttcacatgtttatctgctgaccttccctccactattgtcctatgaccctgccaaatccccctctccgagaaacacccaagaatgatcaataaatactaaaaaaaaaaaaaaaaaaaaaagaagaaatagaatagaataatataagtaagttacatgtgttcctctaatttgtgttcatccaggggaggcaaatgatggcaacaggccaaatccagcctgccacatggttttataaatacagttttattgaacacagcctcgcccattcatttacttatggtctatggctgcttttttgcttcacaatggcagtgttgagtaactgcagcagagaccacacggactgcaaaacctaaaatatttactatttgaccttttactgaaaaaagtttgctgacccctgatctattcatcataaacttctttttgataaatggattctaacagagacaaagaacttagggcttaccatcaaaacctttgaagttctgcctggttctgtatgtggaggctctcatggtgttatcattgcactcttttaccaatcccactgcttctgtccccagtaacattctaatcttggaggcacgaacaagatataagttctgattttctagtgtttcttgttcatatttatttaacaatggtctaaacaacaactgggcaccttcaaaaacaaaagataagcacaatcttagacaaacattaaagtttcaaaaataaaaactttctaaataaataaaaaaaaaagctttatgctaagttaaagaaaccagacataaaataccacctgttgtatgattctttttatattgaacatccagaataggtaaatttgtagtcagaaagtagactagtgtttacgaggggatgaggagaagtggagaacgactgtttaataggtatagaattttctcacagttagtgttgttgcaaagatagtatgtttaaccttacctggagctgagacaaatttaaagagccgagcgaaatacaggggtggaagaagcagtgggaagagccctgtgggtaatctcagtccccagggaagccatttgtgacttttttccacagaggtccttggggagggctgccagaggaactgggaaaagaccacagggaggaggaaacatccagctgaactttgtaacagttttgactgaactcaaagtttcctagacagaactcaggggagggagaaattgagagcacagacacagcacagaagcctaagcaggtgggaaggtatgaaacctgaaagccccgcttgctttctcagccaggaggctggtagcctggggcaagttctcagctctgctcaccctctgcctggaaataaacttggtcctgctagcggggcaccaaaagcagttggtgctgttggtgggggcaccaaaaggctgggagttagaccagccttttgggctttgtgggagctgggttaggccagtaactgctggctttcccccacttccctggtgacctgtatgacccagtagaggcagccataatccccctgggaacacaacttcattgccctcagaaccacactcccatctcccacagcagccttagcaagcctcgcgcaaggacagtctgagttcagacttgcctaaccctgcccccacctgatggtctttctctacatgccctggtagctgtagacaaaggacatattctctcaggagctctaggaccctgctcattgcctgaccctcacagagtccatttcacccccctactgctacctccaccggagcaggtgctgctatccatggctgagactccagacaatggttcacatcacaagactctgtgcagacactcccctgcccctgccccaagtaccagcccagagcccagtggcactactgggtggttagacccagaagagaaataatgatcactacagtttggttcccaggaagtgacatccccatgggaagggagatagcacacatcaagggagcataccatgggacaaataaatctgaatatcagcccttgagctccagattttctctctgacatagtctacccaaatgagaaggaaccagaaaaacaattctggtaatacgacaaaaacaaggttaacacccccaaaagatcacactggatcactagcaatggatccaaaccaagatgaaatccctgaattgccagaaaaataattcagaaggttgattattaagctaatcaaggaggcgccagagaaaggtgaggtccaacttagtgaaatgaaaaaaagatataagatatgaaagagaaaatattcagtgaaatagataacataaataaagaacaatcacaacttctggaaacgaaaaggcacacttagagaaatgcaaaatgcactggaaagtctcagcaatggagttgaacaggcagaggaaaaagctttggaactcaaagacaaggctttcaaattaacacaatccaacaaagacaaagaaaaaagaataaaaaaaatttaacaaagcctccaagaagtctgggattatattacatgaccaaacctaagaataattggtgttcgtgaggaagaagagaaatcaaaagtttggaaaacatatttgagtgaataatcaagaaaaacttctacagccttcctagagatctagacatccaaatacaagaagctcaaagaacacctgctaaatttattgcaaaaaagattatctccaggcacatagtcatcacattatgtaaagttaagatgaaggaaagaatcttaagagttgtgaggcaaaagcaccaggtaacctataaaggaaaacctatcagattaataatagatttctcgcagaaaccctacaagctagaagagattggggccctatcttcagggtccttaaacaaaacaattatcagcaaaggatttttgtatccagtgaaactaactttcataaataaaggaaagatacagtctttttcagacaaataaatgctgaaagagtttaccactaccaagccagcactacaagaactgctaaaaggacctctaaatcttgaaacgaatccttgaaatacaccaaaatagaacctctttaaagcataaatcttacaggacctataaaacaaaaacacaataaaaaaccaaggtattcatgcaacaaatggcatgatgagtagaatagtaccttatatctcaatactaacattgaatgtaaatggcctaagtgttccgcttaaaagatgcagaatggcagaatggataaaaattcaccagccaagtatctactgtcttcaagacactcacgtgacacaaaaagactcacataagcttaaggtaaaggggtggaaaaagatattccatgcaaatgatgctaaagcaggagtagctattcttatatcaaataaaaaactttaaagcaacagcagttaaaaaagacaaagagggacattatataaagatgaaagaattgtccaataggaaaatatcacaatcctaaatatatatgcacctaacactggagctcccaaatttatgaaacagttactactagacctaaaagatgagacagacaacaacacagtaacagcaggggacttcaatccttcactgacagcactagacaggttatcaagacagaaaatcaacaaagaaaaatgcatttaagctatgtcctagaataaatgggcttaacaggtatttacagaatattctacccaacaactgcagaatatacattctatttatcagtacatggagcattgtccaggagaggccatatgataggcctctcaaaaacaagtctcaataaatttagaaaactgaaattatatgaagtattttttatgtaataattacataattttatgtaattttatgtcttgggttccacacttactatcttatggaacctgttcccttgaagggtcaccagtgacctcataatggttattttagaaagcctttccccccccataatggcctttttagggtatagctatcatgcaataaattgaatatatttaaagtacacagtttgataaattgtgacatatgtatacacccatgacgccatcaccacaatcaaattgattaacataaccatcaatcacaaaagtttttttgtgccctctcatgatcctgtttttctctttttgcccccgtcttcctttcccaagcaaacatgaatgcactttctgtcactgtagattagtttaaaatttccagaatttctagaattttatgtaaatgaacaatatatacttcttttggtctattttttatttttttttactcagcataatcattttgagattcttttatgtcatgtcttttaccaatggttcactcacctttattcctgagtagcattccattgcatggctatatcacagtttgtttttccaatgtataagcacatggttgtcaaaacatagtaaagcatagggaactaacttaaaggtgcatggaacaacaacaatagcacagaaataaatgctgctatgcctaagaatctaatatgtgataaaaaggagagtataaatcaataaagtaggcaaatttaaaccaagtattttgaagttattaaatggataaatgaggcaaaaaatctaaataggcccctcacttcactcaatatagcaggggtaattaagaagaacaatgacattattaagattatatagtttacatttattaaatcagttgtgacatgatctccttttagaaagattatttagtcgtggtgcgaaggataaactagaaatagtaatcactgaattatggatgccaaagtaaggaggttatggtagcattaggatcatgagttaataaaaacaaggcaatgagaatggagaggaaagggaaactatcagagatttcaaaatttcagaggaagaaatgatagggggaatcatatttttctaactgcaatttaatagaagcaatcccttaacttttttccaggcttgtcttcaggtgatagagacttgtaatttctcttggaaaaacattttactaggtgactaggattcaagctgtaaatcttggttaatcacaaactttatgagtttagattagttgtgtaaccttctggactgtttgctttctctcctgtaaaggtcaactctaagacttcttacaacttcagatttcttggataataatttattatcttgaactgcatctccaattgggcctaagacaacagaccaattcagtgggaaatgaaaataataaatgaattgtatgggctaactaccactcacagggccttagtgaagaaggtgactataatctagattaaaagtctttccacacggtgttttctcttaatgatgaaggaagctgtgcaggcaggaatagggttacagggtactaattcgcttctgctctgctgggttgaatggcactcaagaggttgagtgtttgtaatgaaacacacacaagttctggaggcaagaagactagagttttgttacttttgacaagttacaggtcaatagagactgcctcttaagaagacctagaggaaaatgcaactttttaattaatctcctgtgtttctctggctcatgccattatcatagataagaccaagggatgcctctggtgattcattagaactcttaggctcactgattactctttggtctctaaatgcttctctgtggtaagaagagtagttaacaaaggaagctgggtttccccagaggaccttattaaaactgttgtggttttgaagtgattaacatgtaaatgaattaatgtggtcaatgaaccaagctatgcacacagagcatatctaggaggcagagaatcatacagtctagtcatactcaggaggaaactgtttagcattcagaggtgaattctggaagaaagatgaaaaaggaactcagaattactgctttaatttcagaaacactaaacatgaaatgacagaagattagaagatttttgtagagtttgtacatgttgctttagaatagattcctggagcaaaagtagaaatggcttaccattagagcaagcaggttagctcaagaggctatactaagctacttttgcacacctggtggcaccacatcctatttgcagtctgcaaacatcatcacctcccttaaatgtgacacttgttatatctcagaggcaagttaatcttactcaactgtatagaatagattagagggtggagagagctagctgatttaaactctaggtgaatgttagaaacaaatactgaaattgaaagtcagaaagagaggcaggttttgtgtgaaaagcagttagattttgacttgtgtaataataagatctcttgagtaaataaaacaaaatttctcttaggagttcatcagtttcctttgcagtcctaactcactagggatgtcagagttagggtcattatagcattctttgtgagttacagttagttgtagcctgtttgcatttactgatttttatgagataaagttgctttactaccatttgcctacaaattgtaatggaaattaaaatctatgggtctgtgatgtgaatagttctcctggggttggacagtgcacacctgcatgactataggcaaaaccatgtcagatgagatgtttatttaaaaataaatggctcacctacttccctaaaatttttctttgaaatgactaccaaagatacaggtaggactgattgagaaaaggcagaaattgaaggtctgaaaagagagaaaagtcaagaaagaagaataaaaagatgtagtctgggaagtattaggcaaattaggcttgagcaatattatgaaagttttcagcattgttcccttataattgcaaaatgggaagtattgtcacctctttcattttttggaagagtttgtgaaggattggggctaattctttaaacatttgatgcaattcactagtgaagcttcctgggcctggatttaactttgtggaatactttttgtttacttaattgatcttgttatagatctgttcggattttctatttcttcttgagtcagttctggtagtttacgtctttctaggcatttgtctttctcatctaggttatccaatttgttggcatatgccattgttgttcatagcattcccttataatcatttttatttctgtaaaatttgtaatgtttctattcctgattttagtcatttcagtgttttctctttttttttttcttggtcaatttagcataacaaaaagtttgtcaattttcttgatcttttcaaagaagacatttttggtttaatttgtttttctctattgcttttataatctctatttcatttatttccactctagtctttattatttccttccttcttcttgctttaggtttagtttgttcctttatttctagtttaaggtaaacagatgattaatttaatattttttctttttataatttggtgtttataaatttccctttaagcactgctttagctgcatatcataagttttgttatggattttttgggtgtgtttttgtttcctttaatctcaaattattttcatatttcccttatgatttcttctttgattcattgtttatttaggagtgtgttgtttaattttcacatatttgtgaatttcccaaatttcctttttaacttttagtttaatttcattatggtagaagaaaattatatagttttaatccttttaaatttattattttttccttttggttcttttgttctaatttctatctcttcattgatattctatagttagtgagccataattcttatagtctcttagttccttatttgtgattttttaaagttctttgaacatgtttgaaatagctgatttaaagtctttgcctcataatttcaatatctagcttcctcaaactttccttttctttgtttgacttttctgtagaccatatcttcttgtttctttgcatgttttgtctttttttttcatggaaaacttgttatggacattttattttacttttgccttgaaacattttatttatttatctttaaaattttatcattttttgggagatatttaacattttaaataatatggcaactctggaaatgtcactcaccccctcggggtttgttgctgctgcttgttattgtgtttgctatcagtttgtttactgactttcctgaatgcatttgtaaaacctgtattctttgtcatgtgtggccattaaaatctctgcttgtttagcttaatggtcagctaatgattggatagagatttccttaaatgtctggaatcagtaggtctcttatccttcactgatgggctttgtgcatgtgtttcaccagaccttcaatatttagcctggcagtttgcaactctgccttagccttcacttcttgctctcacagagcttcaaggtcagtcttaggtgagatattaggtacttcttagatctttcctaggtcttcaagtggcctttggcgtgtatacagccttctgtgtgcttctgcatggctttctagagtttcaggaatatgttggagtttttcagagccccctattgacatttcgttattcagcttttcctttaagtgtattggtcagtttcttgtttgttccaccattatcatctcctcaggcagtggcaatgttaaataattggtgcttattgttttccacctcctcccctccaaaaaggttgtttgcaatgagcaagttctgaataagatcaaatacaggcaagtcttgccaatggaggttgcaggaatatgccagacaggtcaaataatgacagtgctctgagaatagtgtttttggggagctccaaaccagctttgccctgtctagtagcttcaaggctgctgtttctcaccattatggcagtgctgttggttttcaaggctattggagagctggggagaagaagacgagaacaggacaaattaaaacaccacaaagttgctgctcactgttcttatctagatacagccagttttcgtgagtaaatgcttcttgaattattgcaagtcttttgttaatttccagagttcagaaaaaaaatatttatttatttattcattgtttttgagatagagtctcactctgtcacccaggctggagtgcagtggcacgatctcagctcactgcaaactctatctcctgggttcaggtgattctcatgcctcagcctcctgagtagctgaaattacaggcgtgtgccaccacgcccggctaaattttgtatttttagtagagacagggtttcaccatgttgcgaggctggtcccaaattcctgaccttaagtgatctgcctgcctcagcctcccaaagtgcagggtttataggcatgagccactgtgctcggccagaataagttattttgacaatttttttggccagtgttttcattgcctttgtgaagaggtggtttttgattgttatgctgctattctcactgacttcactcatgctattctgtcatgcctcaatcaatcttcatcacagagcacagtctcttcatcatttcccacaaaatccagttacagcaagtaattatttttcaatagactttattggagtctatttgaataattggcagataaagtcccatttttgttgtatgttactttttgccatcttggagggttttaccattttttcctttacttatctcccaccctatccccagatgcctctccctgtaatattaaacctattctttcttctttgatcctacttggtgttattttcttctctaatcattgtccaaaaccaatgaagttctcttagaactttggaagaattcaaatgaattagaattatattttgttataaatattaaagtcccaggtaagttgcatatagatcatttcaaaatgtcttttcaagctatccaatgacattttggctggctgctgcttgtgaaaccaccaagatctccatcctccttctttctttctttgtctctctccacctgaattaatttttgtcctttcatagatgagacctatttttttttgtaacttggagagaggtgagaaaatttggatcagtaaaaaggctaaggtgaagagatgagaaaatattggaggaggaaggcataccatctgttctccacttgtctcctcatactgattttgagccccctgtagagacagaattttagagatagaagtggattgaaatatgttcaaaaggagctttgtgagatgtacagaaaatacactctcttttccagcactaatggacattctaaaaaattgggcatgtattaggctacaaaggaagcttcaatattggagacattgtagctgcattctctttttggtcagaagcaagacagggataaccactatcagtgctactctttgttattttcctccagtagtatgtttgcagaaatattctttagtgtatacatcagatgatatcgtttggatatttctccccactcaaatgttgaaatttaatccccagtgctggaggtggggcctgatgggatgtgtttggatcatggcagcagatccctcatggcttagtgctgtctttgtgataatgagctcttgtgaggtctggttatttaaaagtgtgtgacactttccaaccccaatttgctccttctttcgccatgttacatgcatgctgcttctttgccttctaccatgactgtaagcttcttgaggcctccccagaagctgatcagatgccaacaccatacttcctgtaaagcctgcagaactgtgagccagtcaaacctcttttctttataagttatccagtctcaggtatttctttatagcaatgaatgaatagctaatacagtagggactatgcctagcactttctaggcagcaatggaagggctttgtatattcagtagtgagtgttcttgttgttggttgagtgaatttgtagtgttagggtgagtagtgtgagatttgattgattagagaattccctgtgctgtgtttaaacattgtttttggctgtatagcattgaattctcactgcctatctctgctggagagtctgtgatctatttaatatatcttaatatctttcttttctacttaaattagcttagtagattttattaagttacatctgaatatttgactgacaaaaagaggatcttgctaaagctaagatagtaaaaatagtatagtagtattgcagagaaacaacaagatgaatataaaactcaggaagttcaataggtacatttgtgaatcaagttcataggtgagtctaatatgataacgatgatgccacaaatctttagggaatggtggattatttagtagattgtgctattaaaactgtcctgctctatggagaaaaataaagtagttgggtcttctacagatgtaaattttagatgaattaaaacctaaatgtaaaaaacaaatctataaagataataaacacagtgtgggaaaatgtatttgtggctttggggtgaagaatgatttctaaatcaaaatccctaaagcccaataaggtgaaaaaaatgataatgttgattccttcaaaattaaggatttccattaaaaaaaaaggacaccatagacaaagctaatagactgggaccatattagaaaaagatacttgtgattttggatacagcaaaaaattaatatatgagaaactcttatgatttactgagaaaaactagaggtctaattttaaagtgagaaatcatgtatatggataacatgggaaagggaaatacaaatggctcaatagactaataatcagggtaatgcaagttgacattccatactcagtagattggtaaaagtagacagttttataatactaagtgttgttgaggttatggaaagactggaatgctcatgcactgctcgtagaagtgtaagtggctgtagctactttcaatcattaccgtcgtgaaattgagtatgtgtatgtactatgattgaacaatccttgctggggacatatcctagagaaattctcacatagttaataggtgaaatgtaaaaaaaaaatgttaattgctgtgtttgcaggagttacaggcagcctataattccatcactaggggattgcctaagtaagtgtggtgcatgctgaaatactgtgcagtagttactttgaaccaaaagtacataaccagtatctaaaaagagttttaagttatctgtagctctgtactaattggcttcagtaagaagctgcttaaagccttaatcagcttacttgtcaaattgtattccttttgtgttcccctctgtgttttggttgtcagaaatttcagagctcaaattaatcatagtagcgatcttagtccttccactaaatatatctgtccacttccctttgatttttctatcctcattttagaggcatttttgaattctgtattttatttggaagctttttgaggtcgtatatataaataaaaggtttctgttggacctaaatgatcatcttatcattattactatttttatttttagacggagtcttgctctgttgtccaggttggagtgaagtggcgcaatctcggctcactgcaacctctgcctcccgggttcaagtgattctcctgcctcagcctcccgagtagctgggatcacaggagactgccaccatgcccaggtaatttatatatttttagtagagacagggtttcaccatgttggccaggctggtctcgaaatcctgacctcaggcaatccacttaccttggcctcccaaaatgctgggattacaggcttgacccactgctcccggctcatcttatcattattaaggactctgtcattaagaaaagagaaaagattaggaaagaaatggatttcctctcacctagaagactattaaagaaaggaaaggggatgcataaagcaaccatctgaagatggaaagagaagtgtgttactccatgaaagtatgtgtttaatagccactcacctgaatgaagaacatcttttagtattcagaaagcttttccaaaaggcagttatttcctctggatagccttcatattcctatggaaattgaataaggatgaaaaatttgaacaaaagcaaaggacatgaaatctcttgaagatatgagaagctgtgaacacttgtcttagagggtgcatggagaaattatttttcatgagttcccatgtagtccgctaggtggcggaggttacataaaaaccctactgtataaacactgaattgctacacacttgtgttttctcttctttttcaagtaaaatcccaaggaaacctgtagagtataataaaagctggagatagaactttgtagtaagccctatattaataacaataacagtgtcaggttgcaaaatgaggataggtaccataccaaaagagatgatctccaaatgcagtttttgtttcttttgtttacagaaaaattacaactgatttttttttccatatttgttccaaagatcaccttgaatgcaaggaatcaaattttgatcagtatatttacacagtaacttttgtaccttaaaaaattcatttcttatctactgcagctactaatatctcacgctaattattttaaacacattagcaggtcatcatgtcatatgtgacaggacttagcatactttttgtgtgactatatcactttaatttgtgtgatgaagcagtgccccattaattatgtgactccttctaatacccttagagaagaaaggaagctccttgaatactaaatttgcacaaccacagtgaccttataaaggatgcattcccttttaagattaatttctcagaacaaagcacagtgacgtcattactaagcagcctcacaactgtagcaacccttctaaaggttgtagattctggctgatgatgtcactgacacaaaggaaaaaatgcaaaacaggtagtcttaaataagcattctggtgagaccaactgcattttggccatggctttgcagagcactctgggggcggtgtggctagggcttctcctcaactctctctggaagggtgagtagcctccttcactatttggttttgtaaaagtgtatgaaattgttttaaaatttggactcatttttaatacaaaaacaagagaagtcagatctaacattcactgtacctaaggggcaatcaacaagccaaatagtactattaaagtgacagccctttttgttttctgtagttgcagaaagcaaggaccaagtgtttcagccttccacagtggcatcttcagagggagctgtggtggaaatcttctgtaatcactctgtgtccaatgcttacaacttcttctggtaccttcacttcccgggatgtgcaccaagactccttgttaaaggctcaaagccttctcagcagggacgatacaacatgacctatgaacggttctcttcatcgctgctcatcctccaggtgcgggaggcagatgctgctgtttactactgtgctgtggaggacacagaggcagggaacccatgaagagctgaacagaaacagagatcacagcctttgcaggaggcaaaacagagatgagcaataactttttcctccttaattcagtattacccaagctttttcatttggtactgctattaggaaaaaaaattgagtccagacatactatatattaacaaatgtctataaaaatatgcttttaatttttttttgagacacagtcttgctctgtcatacaagttggagtgcggtggcatgagcatagctcattgtaacctcaaactccagggctcaagggtagctgggactcagccttctgactaggtgagactataggcatgtaccaccatgcctagtgaattttcctcctttttgtagacacgagttctctctgtgtcatccagactggtctcaaactcctggcttcaagtgattctcctgctttggcctccaaaagtgttgggattacagatgtgagccaatgcacctggaccagaaaatatgtttttaaagggtgattatttcaaatagtcttcctgatatctgaaacacttttgactcattttcttgagatctgattagattatttttgtttttccctcataaaatggctgatgatgaacttgtgatagtagtaagaggcatgtccactcttccattttcttctcttttttaaaaattcagacaggctggagtgcagtggcatgatcatagctcactgcggccttgaacttctggcctccagtgatcctcctgccttgacctcccaaagcactgggattataggtgtgagccaccaaggccagtcaactctttcattttcttattgctgtctgtgcttaccttttaaatactatctgctaacttcagtctttttgcagcaatattttcaaaacatgtcaatttgtaaaggatggtttagttaacattgggtaatgtaataagaagtgagaaaggaaggaataaatgagtggctgatacctacagccctgcatttgaaatctcaatccgtgcctcagtatactttgcttataatctagcatacagtcctgttgagggtgccagtcaatgagtatatgaaatattagtcaaactgaatctccttcataatatttaaactaaaaacaaatgcaaatggaagtatttgtactcattgcaatgcattcttcccacactcctgttaattagcttggtcctcccaccccagatgtgtccctcccactttagagaccaatgccttagggtagcccagtggttcttaatatattttatcctcctagatcggaagttttgtgaaaattggatttgttttcttggggggccatattctagataaactcaatcagagtttgcaggggtgggacccagaagtctatattttccataaagctctgctggtgattgttttgctcagccagggttgatctgtgaatttcagattttggaccccaggtgtattactccattctcacgctgcaataaagaaatacccaagactgggtaatttataaagaaaagaggtttaattgacttacagttctgcatggctgggaaggtctcaggatacttacaatcatgatggaaggcaaaggggaagaaaggcaccttcttcacagggcagcaggaaggagaagtgccagcaggagaagtgccagacacgtataaaaccatcagatctcgcaagaactcattcactatcatgagaacagcatgggggatgccatctccatgattcaattacctcccaccgggtccctcccacaacatgtggggattattacaattcaaggtgagatgtggatggggacacacagccaaaccatattaccaggtcttgaggctttaaccactattctctacttccttttaggtagaattttagtaacagagaagggcttcaggaagtgaactgtacagtgctattgcttgcttacacagtagactttcagcaaatgctgacatttggaataaaaagtgaagggcaagatgggcacgatgggttatacctgtaatcccaacatttgggaggcggaggtgagaggatcccttgagcccaggagttcgagaccagcctagtcaacatagtgagaccctgtctttacaaaaaataggaaaaattagcctggtgtgttggcatgtgcctgtagtctcagctacttgggaggctaaggtgggaggattgattgagccagggaggttaaggctgcagtgagccatgagggcaccattgcactccagcctgggtaacagcaaaaccctgtctcaattaaaaataaaagtggccaggtgtggtggatcatgcctataatcccagcactttgagaggctaaggcaggtggatcgcttgagctcatgagtttgacaccagcctggtcagtactcaaaataccaaaaattacctaggagtggtgtgcacctgcagtcccagctacttgggaggctgaggcaggaggatggcttgagcccgggtggcagaggttgtagtgagccaagatggcaccactgcactccagccagggcatcagagtgagaccctgttaaaaaaaaaaaaaagaaaaaaagtgaagagcagattgctgatgacagaagaaaaaaggtattttagtaatatcaattgtcatgaaactttgccaaaatgtcataagattgattcttaaatgcaaatttttaataacacccaaatatttccattggatataagtgtaaattggtatgtttgtgcttgtattacttctttaggcatattatattttgggttgttgcttgcttaaaagtgtgttaatcttattttttaaatcttatttatttattttttctaagatggagtctcgctcttgtcacccaggctggagggcagtggcgcaatctgggctcactgcaacctccgcctcccggcttcaagcgattctcctgcatcagcctcccaagtagctgggattacaggcacatgccaccatgcccagctaatttgtatttttagtagagacagggtttaaccacgttggccaggctggtctcgaattcctgatctcaagtgatctgcccgcctcagcctcccacagtgttgggattacaggcgtgagccaccacgcctggcctaatcttactttttaatcaaatgaaattcttgagaagaggaagcatatgtgatccttctttcaggttgtcctgcatagttctgtgtgcactgtagtggctcaataaatcatgaacacaggtgtgacctcattgctttggcaagagagaccagagacagaaaattccctttggttacattaggaagttctttccagttcacagaggagtctgtacatgtggtatactgaaaaccctaccttttaccctggtgttttgattctataattcaaactgtcaacaactagtcttctaccagattttttccagcttacatgaagaacactaaaggcattattatccaaaggggaaaatggaaaaagagagtgaaataagaggaaaatgcagttgatgcatttttcttacaacgaagagagcagccatgaagtcccactcttaaagttataacattatgaagctcccagttcagtggtgacaaggacagaaacatccacaggagaataaatttttttttttactcccaatcctgggagttcatatatatgaatcgaaaggtaactgtgtctgtcactggctccatgagaaatctgaaagacttgccatgccttgctactgtatcctacgtcctctgacttcactgctagttttcttttcttttttttttttttgacggggccatgaaaaccacctacggtaatcttctgtaccttctgaaaatcatggcgccacagagaatggggggtatttggaaggctgtgttgctttcattttcttcctaggattagtgttatgggttgaattatgttccctaccccttgccccgcaaaaggatttttttttgagtaggtgacacgggtaagtcctagccgtcagcacctcagaatgcaaacttatttggaaatagaatctttatagtggtgataaaattaaagtgaagtcaaaaggatgaaccttaagccaataatgactggcgtccttataaaaaagggagatctgaacacagagacagacatgcacagagggcagacaatgtgaagaggcacagggagaagatataaaaaatgtagtatttttcagaggtttgagatagcatggatatagctgggaccagaacacagcaataaactgtgtggggagattgaaagtcagatgtgaattaaaatattttgcagatgcttgtgtagatagataatgatctcaaggtccagtttacatttattttccctgtgataccttggaactacataaattgcctagaaattaggcgtaatctcaggaaaaggtaggaaaactctgatttgactgagatttggtttctgatacctggtagactatagctttaaatagaaattaaatatagttatgaaaaaagtttttttccctccttcagcatctacttttgtgtattgaaattatacttacagatgatttaaaactttgctttcttggaaatgtatgaaatgatgatgattttggtaaaagggataatactgtctcaaaccacataaggggaagacactgtcaataggactctcatggatgaatagtattccctttggactcatttttgaaaacctgaacaataaaatagaagatttaaaagctacacataaactctcacaaattcatctgtgacatcttttgcatgatctttgttctagtatttaactgaatttttccataatattctatagccattttctgtcctgctgttgtacattcttttaccagattatctcaaaatgtatccttgattttgttattccataaataaatccttcaggctttttaattttatatataagaaagaaacaaaaagaaaaacagcaaatctaaatagaagtgccctctgcttagtaaagctgtcatattatgaacccaatgaaactttgctgctttactttctgctgctacatcccctatccctttgggtcaccaaataagtttattctctagcctttaagacctgttggcattatctcctgtatgagttgtatcagattattttctctgcctgaaatgccctctttctccctttattcagattgtagcccaacctctataacttcttcagctgaggactctctcccttgtttgtgctgctatagtataatgatccccaaagtgtttgactgtgtgctattatcagtaaagtatgttactcctccaacatatgcatatttatatgctcatagattatgatcgtgtgtgcaacaaacaaaaatagaaattaggaaagtttgagataaatttaatactaaatgttgtgattttcttctcgcacgcagggggatcatcttgtgtagcacatccgtgtcccttctacaagatgaactaactagactaacttggtctttaactagttggctaaatttcttaaactttgtgaaactctttcttctctcatttgcaagaaatatctgtaatgatttttctattgatataattcttgcacattttacttcagatagttaactgttcttcccctaagtgttcatctaccaaaatgggtggtaagtttctggagggcaaggattatgtcttgttcctctgtttatttctcaatgcaaatggtatcttacatttaacaggtactgaaaagtgatttgtgaggatcaatggattcacagggttttctcctggaattgtcagaatgccaaggcagttcttaagtagattcctggatgaggaaccctctctgcaaaggacaaccatttgtgatgaatgaacggaaacagagctcttagatcattgcgtataagatggcctctcattacatggatttctgctagctctgtgtacttatttaaagtttcaatcacctgacagttatttattgggtgcccataatttgccaatcacatgtttttttctttatatctgtcccataaaacaaaacaaaacaaaacaaaacaaaacaaacacccatcctcagagcttctctacaatagacacacaccaaactaaaaataaaaatgcatgaatctcaggaagagaagttctaaaaaacaatctagaccatctgcccatgggatgcttgattttctcaacagcatcacatcaagggaattgccaatattttcacaacagcttcttgcaggagggttcttgctgctcccatactgtccattcaaactccaggcggctgtgagttgaaaatctattattctttatgttgaggaaacatctgtgttcctgtggcttctacacctttgggaatctaaaagagttcacatctctcctttacacattttgaaccagatacaacatttccacagagcagtttttttccatattaaatatttgtaagtttcctaaccattatatatatatatatatatatatatatatatatatatatacacacacacatacatatgcgctacaattttgatttccctctttgttgtacattttaaaccgcttccagttggcttgtatttcttttaatatagaattcttagaacttaataaaacacttcagatgtggcttgacctattttaaactacaaggaaagaaggaggaaactggatgaaggtgaggcaaggtaaatatattaaacccagagacactacacaaatcttttcattccactgagacatggatggccactgattcttgatctcctttgtttggaggtaggagggcagaagttcaaattacagatttgtccccacctttcttttgagagttccctaacttatgtgaagtatgatttgcttagttggactgtatattttgtcagtttcatggaaaaagcactgatttctttgttctaacaactttattttgtgctgatttttctttgatacttctaaaataaatgtaatgtacatttcagagtctaatatttgcaaagggatttgtcattagtttacatgagccatttcttgtctcttgtgaaatcaatgatatttacagagttctgattttttttttttttttttaaagaaacaaggtcttgttatgttgctcaggcttgccttgaactcctggtctcaagggatcccgcccccacccccgccctgtctcagcctcccaagtggctgtgactatagtcatgtgccaccgtgacaagctaagagttctgatgtttgcaagtagtttcttgagaaaggcattggcagccttggtgaggcatctggagtctcagactgatactccttgacactgctctgtgctactctaattgcccttgtgttgtgatgtgcatgtttcagtggtagttaaattaaggagtaaaggaaactaccctgaggggagcacagacatctacctgcagcattttgggcacattccccattggcccacccatctcatatttgactgacctctaaatggatagcactacacccagtttactatggtttggagaaacagttcatgtcaactttctgtgaatgtcatggttctttcaatagaaatcggagagttggacagaatagctaaaaggtggtccagactgggtgcatatggcaaattgataagaaagagtcaagttttcatcaaactttctgtacataaacctgtaccagcatagcagtgagcaagaggtgcaggagaaggtggatgacctttgagtgctggtgatttagaattaattatccaggagttgttttggttcagtggcacatacatgtgggatcggcatttggtataatgcactcaatggacaatatgacctctaaagttctatttaacttattcaagcttgattctgtaattttattatgataaggaagctgctttccaatattatattgtctttaatagaaagcaaattaccaaaattgatattccccctatatgatttaaaggaatatgcctttgaagtcggtaaaatatgggttaaaaatctttgttctttttcttaaggatgatgagcaaattattcaattttcctcaactgtggtcccctcatctctaaaatggggcatcttaggaagagtaaatgtgacaaagaatgtaaagggtttaatgttatgctcacggtgacatttgatgaataatttcttaattaatctcagaaatcaaagcagataagctgaatagctactgaggctatgttgttcaattttgaaatttcagtctaggcccttggaattctttgggtgctgctggttactttgtgtgcagtgcattatatggaggtccctgaatccttctctatctgctgagcagttaaaaggcagttctttaactggaagcaaacacgaagactaaactgtcctagttttgaggaagaataagaaggaggaggaggaggaggaggaggagaaggagaaaatgaagatgaagaagacgagaagaagaagaagattaagaagaagatgattaaggattctgcaacagttctgtcattgcaaatgactacccatttctaaccacgacataaattcagaggaaaactttcctctttctatagctgaacatgcttaattaataaatatggttagttccttccataagtatcctttagggggagaccactaaacaatcaaccatttctagcacaaaattaaaaatatcagtctcctaaatatttagttcacttgaggctcttggcattaattattaaatggatgaaggcaaacaatatctcagccacttgcacgatctaggcataatcttgtgtgctgtatctgtagaggtcagaggaagtagggattggaaaaataatcaaggcactgaagtctacactagactactgttttagttaaacttattttatttgcttttttatgttgatcatatcatatgttgatatatgcccatatatgcttttatagggcagcaataaactccagtgtcaggaggctggacagtctctgttttcctcttcaggtctattctatcctgctctgtactaaagtctatattagactattgttttaaacttattttatttgtctttttatgtttgtcaaaatgcagtatagctatgcccgtatatgcatttgtagggcagcaataaactccagcatcagagggctggacatttctccattttcctcttcaggtctattatatcctgctctgtaccccaggaggctgacttctatacgttatgtggactggtctcccatgtccattggcatctggttgggtttaccccagtgggaggtattagcaggagagagtggtcaagatatttgcattttaggatcctttctttcctctactgaagtttacagctcctgttgggtctacccagaatatggtcaagaagaggtatttagactgtaaagggtcatgtcgcctttggcctgtgattagttacaggtgtcctgagattagggtaatttcatcttctcccgtccctttgggcctaggagtggtgaaatcttctggctgttattagccccaggtgcttcaccttcccttgtagttttccctaaattttgcacatacacttaaaaatattctttttgttaagctttttttcaatgattttctcgaggcgattgccaggaccctcaaaaagacaacactaacactcattttaggcttgaggcagagagagaagaaagagaagaaattcactatatgtttccatttatgacaagtctctctggaacttgaagattattgtttaaagacagtttaccaattccaaagaaaaacattattatatggctaagttttcaattattaaatatgagatctttagcaaagcttttagaaagaattatgttccactttttttctgattcaaagcaaagagatttttcatcctttcctcagaatatatagtgaacattatttggacactattcaaaagaaacagaaggcaaatcagaggaacaacttctttatattgatacatgctttttacattaaaattaaaatctatcaaagaatcactcagttgctattgttgcctttttttagtataaaactttagcatgccatccgtttccaatgaaccccttttccccatcataatacatcaagtttcgttaaccatacattttttgctgaatacgtacttcatttgaagtctgttttaagtaggctctgcatgtggaaagtacctgttttgcaaccccttctcagagtttcatttttttgttttatatctactgtttaatatgacaaatgctccaaaaatatttataacacctattcgtacttttctcactctaaaaatgtttaaagagaagattcaagtttctttttgccctaaagatcattatgggatgggctcctaataggcccaacgtggagaaaattctgagttatttttggtcaaagaggtttacacagaagccagctctgaattacttctaacgagaagagcaaggctcctgttttcgcctgtcatttatcttctcttgccttactcttttctcctattttgctttttcttatctctcactttaaatttttctctccctcttgatgcaaagctatattttcctttctttttctgtgcattttcccatcctatttcccttctttctgtctctacattatcttaagagagcacaaatcatttacagcttgatccactcagcccgaatcttttccactttgattcacaaacttctatttcttctcctttgaacccctaatttgctccctatgtccctcatggagcgtgtaaccatccaaaggttggcccagggataaggccaggaagcaccagctgcttgacagtaaagtcgctggtcctacgtgtgggctctagggggcgatgcagtgtaaggtctgtcctgggcataggcggagcggcagtcttgctcctcacagagctttgaggagctggatcaaaattgtgctccacagagagaagataccggtgtcgggaagcaccagtgccctgaggaagggccatttccaaaagccctgtgctgacacagggttgctggttcctcttcaagagcccactctctggggtggggccatatctccagcagaggtgggctggaaaggacccccccaatcccgcccgccgtgagcttagctggagccatggcctctgcacccatctcgatgcttgcgatgctcttcacattgagtgagtaatatccccttcccattttccactcgcatgatccacttacatgctctccagcagcttcactgatgcagcatgattaatttacaggtgggctgagagctcagtcagtggctcagccggaagatcaggtcaacgttgctgaagggaatcctctgactgtgaaatgcacctattcagtctctggaaacccttatcttttttggtatgttcaataccccaaccgaggcctccagttccttctgaaatacatcacaggggataacctggttaaaggcagctatggctttgaagctgaatttaacaagagccaaacctccttccacctgaagaaaccatctgcccttgtgagcgactccgctttgtacttctgtgctgtgagagacacacactgataggggctgcagggggagcagaacacaaactcttgagtctggtaaagcccattttcttgaagtctttgttccttcacatgagaacggtgtgcttccaggatatgtcacttattatgttaaactacaatttaaaaccatagaatttgctcattcagcaagtgtttattgagtcctgatgtgccaggtactgggcaaagcaccggtcataaaaaggtgaaagaagtgtaaaacaaatagaaaaaaacataggggaaaattaccatgacattggtctgggcaagaagttccttccttccttccttccttccttccttccttccttccttccttccttccttccttccttccttcttccttccttcctccctccttccctccctgcctctctctctttctttctttctgaaaaggggtttattttcaacagacatttctttttataccgaggtgaaatgtcatcatcataataattttgcaatgttacataccctgttgagaccattaaaaaattaggttcatggtatacacgtccaagtttgttacaaaagcatattgtgtgatgctgtggtttgggcatctattgatcctgccacccgaagagtgaacatagtacccaggagaaagcttttcatctcttgtgagcaaggaatttttggatatgaccccaaaagcacaggcaacaaaagcaaaaatagacaaatggggctatattaaactaaaaagcttctgcacagcaaaagaaacaataaatagagtgaagggaaagcctatggaatgggaggaaatatttgcaaactctacatctgataaggggttaatattcaaaatgtttaagaagctcacataccaaaaacatccaaataacctgattaaaaaataggccaaggaactgaatagtcgtttctcaaatgaaggcataaaaatggccaagaggtatataaaaaatgctcaacatcattaattatcaggaacgtgcaaattaagaccaccattagatatcacctcacaacctattaggttggctattatcaaaaagacaaaagataacaaccattgttgagaaggtgaagagaagggaactcttccacactgctggcaagaacgtaaattccataatgtgcaaccattatggaaaacagtagggaggtttctcaaaacaccaaaaatagaactactgtatgatccagcagtctcactattgggcatatatccaaagaaaatgaaatcagtatgttaaagagatatctgcactctcatgtttattgcagcactattcacaataaccaagatatggaatcaatctaagtatctatacttagatgaatggataaagaaaacatggcatataaacacaataaaatactattcagtcttataaaaggaagaaatcctgccatttgtgacaacacaattgagcctggaggacattatgtcaagtgaaataagccaggcacagaaagacaaataccacataatctcacttatttgtgtaataaaaaggttgaatttatcgaagcagaatagaattgtggttaccagaggcttgtgaggggaatggaaagggattggagagatgttggttaaaggacacaaaattttaattagataggaagaataagttcaagatatctactgcaatggtgactatagctaataataatgtatttgcaacagaattttttttttttttttgagacagagtctcactctgttgcccaggctggagtgcagtggagtgatcttggctcactgcaacctccacatcccaggttcaagctattctcctgcctcagcctcccaagtagctgagattacaggagcccgtcactaaccctggctatttttttgtatttttagtaaagatggggttttaccatgttggccaggctggtctcgaactcctaaccttgtgattcgcctgcctcagcctcccaaagtgctgggattacaggcgtgagccaccgcgcccagctgcaacagaaatttctaaaaattgctgaaagtagattttaagtgttcttaccacaaaaaggatatgtatgtgaggtaatgcagacgttaattagcttgatttagccattccacaatgtacacatatttcaaaacattatgttgtataccatacatatatacaattttatttgtcagtttaaaaaagaattgaaagaagctatctttgatctctatgtgccaggtgtgtttccaaacattaatgaacgcatttaattctcacaagtattatcatcagcttcactttacagatgaagaagcaaagtcacagagaatttaagtatcttgctcaagtcacaaagttaataactggtaaattgcaacccaggcagtgtgtctgtagggcacatggtccaactactccactcctctgccagtctataggcttcttggggcaagagactgattttggtgatggtgtagccctaactccagaaagggtcgctgtcggaaaagtgttggttatatgaatgaacaatacactgacactctaaacagtttggtgtgtgccaagatagagaattcaaaaaatgctctatgagatgaggatataggaatagcttagctgtgaaagaagacagaagcagtctgtaatgggaggagagtttgaatcaaggaagggtataaacgtgtagttcttataaggatagttgcttacggttcctatgttcacatcttccttatgctcttgagaggaactggacttaatgcacttttctctctttatcttttcccaaatttgagtgtcgtgggaagggctctgtttgactcagtgtgagttaggtggcttttccttggactaatcagtggtggccatgggtacaggctgcttggattagcccagcttggcttccacctttggtggctgggggtgggagtgaggattctgcaagttagcagctctattttgaactgcctggttaaaaggagtatgtccccaaataggttaatttttacacagggatctacatctgtttattttttcccccaaatggatagccagtagttcttacaccacctcctgaaaaattcacttttgccccatagatttgaaataccatatttatagtacattaaattcctagatatactcagatctactttgaactcttgatttttatagttttgtgctagaatgtgctgctttagggagattcaccctgcagcctttggtttgtaccttgtgatttaccagccttcttttcctatccttcaatccatcacataccttgagaagccttatacacaaggatgtggacaccttagcccacatgtctacagtccaggcaaacagtgatcttttggccacccattgggcctagagttgtgtacacaggtgggatatctgcttctgggaagataatccttgagataggcccatgcagatcttaaaagtgtgtttggggatgtttgtgcagggaattctgaaatcctagtacccagaatatggtcaagaagaggtatttagactctaaagggctatgtctcctttgtcctgtgattttctcacagggaaagggataagaatagctgaataatagctggggtggaggcacagaactctgagcagggacgtcacttgctcaggtctaagggtggcagtgttctgtaccattactgccaaaatacatttgtattcatgaaaccatggtatctgttttagatttaagtatacagttgccataactctaggtaagctctcagccaccatcactgttttcactccaaaggaagttcatgtccacagggatatttttatcacattacaccattgacctggctgtgtggcctgtttctgcctttgatacttataaatacaatttatgcaagtcctgcaaaggaaagaagtctttctatacaattatgatgtatttattcatttagctattcacttattcactcaatgattatttgtggagttttgactatgtgcttggcattgttatcatccctgaagatgcagtggtgaacaaatctttccctccagtcattccccaggctgcacacgtgttcatatcacttccctacccaaacagaactacttcttagtcaaagagatacaactctcaagatgatttccttctcaggaaaattctccaaggttaagctaagccttagatattaatcttttgtcatgtggtagtgattggtggtggtggtgatgggaggggagttatgtagggaaatgagaatctatattttcccccttttttaaggtggctcagagggaacaactatgtctttttagaagttctgttttgacttaaagaaaagttagtctagcattcctttttcctgtttgttgggaaatactccttataaacagataaacttcaggaaaaatgagaaattctggaaaacttatcttcataaggtttatttttctccccccttttatatcacttcaagaactttgtggaaagagaactgaattaagaattagggagcataggttgtttctgattcttcctctaagtaactatgtgacattggacatgccatttctactctatgtgcctcatctcttaattaatgaaattgagataactggaaggattgttgtgaggattgctttatgtgtgacatatgtcttggaccccaaataagagtgggtatttaggtgggcagagcaatcagatacctaagacaccaacactgtggagcccttataactgccctgaactgctgacatttgaactgtatcatgataaattactttattttggcctttgttacatcagttggccctgtattctaatttaatcttcgatacctgaaaactgctttcagaaaaggagctaatattatctatgtacattgtagttaagttgcgtttaagcaccaacttaaaaaagctatttgtggaatcacagcttttgtccttgaaatatacttttaagcattttagagaaagtaaaggtagggaaacacgttttggggaagaaaagttgtcctggttttgctgagaacagtatgtagacagtcatcttctcatccatgtgagaatctgtctctgcctggatacaagggagacacctctccctgcagtcttcccatgctacattcagtcctccctcctctcatctttccctgattgtgtagtgagtttcactgggttctctgaaagaatctttgaattccattctaattctcaaaaattgtgcttctgtgatatgcaagagttggtggggttccaccatgaattccaggagaggccataggtaagctgtggtcacttgctgtcatcagcactgcagggatcccacacatatcctgcaaaatgcctccttctgcagtataagtaatgaacaagtattaagtaaagtgatatttcatttaactattaaattagcaattgtaaactatataaacaatattgacaaagagtaaatgggtactgaagtgtactattgatggcataaactcatatgatgcttttgggaggcaatctggcaatcttcactgtgtctcttttctcactttttacttgctcttttacccactgaagtgtggttttaacttccaccattggcccaaactattcttgccagggttaacaacagtttcttgggttacatccaatgaatgattgattattccctctttgaaacctggtcctctttcggtttctggtataccactttccctttaaaaaaaaagtttgagagctgattttcaatagatcacagtgagggagctgctctgctatgtgtgaaaccccagcctacctctttctttttgatgttcttatatctttggctgaacctgcactgtcttttttcatgggcttttcttctgctcactcttttatcgggaacctgccctgatattcacgtaggttcctttctatttttcccaagcgtcagccagcttgagaaataaagggacagaatacaaaagagagaaattttaaaactgggtgtctgggggagacatcacgtgtcagtaggttccgtgatgccccacaagccacagaaaccaggaagtttttattagggagtttcaaaaggggagggagtgtgcgaataggtgtgggtcacagacatcaagtactttacaaggtaatagaatatcacaaggcaagtggaggcagggtgagatcacaggaccacaggaccgaggtgaaattaaaattgctgatgaagtttcgggcaccattgtcattgataacatcttatcaggagacagggttttgagatcaaccggtctgaccaaaatttattaggcgggaatttcctcttcctaataagcctgggagcgctatgggagactggagtctatttcacctctgcagtctcgaccataaaagacaggtgcacttagggggctgtttataagcctatacctccaggcgcgtattctctttctcagggatgttccatgctgagaaaaagaattcagtgatatttctcccatttgcttttgaaagaagagaaatatggctcagttccccccggctcaccgcggtcagtttaaggttatctctcttattccctgaacaattgctgttatcctgttcttttttcaaggtgcccacatttcatattgctcaaacacacatgctgtacaatttgtgcagttaatgcaatacttacagggtcctgaggtgacatacatcctcctcagctgacaggattaagagattaaagtaaagacaggcataggaaagcacaggggtattgattggggaagtgataagcgtccatgaaatctttacaatttatgtttagagattgcagtaaagacaggcataagaaattatacaagtattaatttggggaatgagtaaatgtccatgaaatcttcacaatccacattcttctgccatggcttcagccagtccctccgtttggggtccctgacttcccacttcccgcaacactctttaaagttggtgttcttttttttttttttttttttgagacagtctcgctcttgtcgcccaggctggagtgcagtggtgcgatctcggctcactgcaacctctgcctcccaggttcaagcgattttccttcctcagcctcctgagtagctgggattacgggtgcctgccaccaccacacccagctaatttttgtacttttagtagagatggggtttcgccatgttggccaggctggtctcgaactcctggcctcaggggtccgccagttggtgttctttaggattcttcccttgacctatttattttctcagtcaaaaattctttctgggtaatattatccatgctcatgcttccactattatttgctgattattttcagctcatatatctcttctgagcttcagtttaatatatcaaactgggtttttgacctgtgtgaattttccagaagcaccttaaatcaaatggtgcaaagcttagctctttatctttcttcctttctcccccacttcaccatatgaaacaaaacaaaacaagataaatttgctccttcttttgtgtttttcatatcaaacaacaggaccatcatctacccaagtgccatccactctcttgctccaagtctgtccagatgctgtgccttctgcctctttctattcagctcagtcttcatcatgctcattcttcctcttctcttaggttttagtttaggtgagtgtcactccttctgggaagtcttcctgcagtcctacaaccaaaaccatttcacttccttgtgttgctatagtactctatgctttccctactatggctgttatcatgaggactatcattgcttttaaaatcctcttccttctcactagaccactgggtctttcttgtcattgaatggccagtgtctacctcagtgcctgactgtaaaaggggctccacaaatatttgtttattgaataaatggatacttcccaagactcttaaaatgttcttacacgaatccaggaaatcctctttgcagaagctagtctaaataaataattggaagtttagacaaagatttatgtacaaaggtttttatgatagtattctttctaaaatccaaatgtctaatactaaagaaattggtaaataagttatagcacatttgtaccatggactatgttgaggctattaaaattggatttttatgtatacttgttgacaaaaaaaaagtttggaaaagaatattaagttgaaaaaacctccagcatgtgcaaatgtgtgtgtgttcatgtgcacacaattcaattgtgctaacaatagtcatgcaaaaacaaaggattaaaaagcggtatgcctcaatattatcaatgattttttctgggatatggtattacacgtgattttaaaacactttcctatattttccaaattctgtatttagaattcattattcttctaaccagaaaaaaaatcccacttaaaaagaatttaaaatatccctcttgtagttggctattgctatagggcgtggttttctttcataaccttaggaactttctaaaatttgctttaacaatggtctaaattttttattacaatatacataaaaaacaacattaatgtatgtgatatgctcctatgtgttcacccaaatacttttgaacaccaaaaaatgttttgcaaaggagtatatatatatcagttaaggttctccagagaagcagaactaataggatgtctatctatctatctatcatctatctatctatctatctatctatctatctatctatctatctatctatacataaatatttattggaatatgtatatttattggaatatacgtgtaattattggttatatataaatcttggtccaagtctaaaggctcaagaatcagaagcactgatgttagagggcagggaagatggatgtcccagctcaaggagagagagaaaagttgtccttcctctgcctttttgttctattcaggccctcagtgaatcggatgatgcccacctgcattgattagggtagtctttactcagtctaccagttgaaacgtgaatcttttctgaaaacaccctcacagacacaccccacaataacattttaccagccacctgggtatcctttagcctagccaggttgacacataaagtcaaccatcacaacctacttaacatataatatataatataattattagcaccatatattagtttgctaaggccgtggtaacaagaggccacaaactgggtggcttaagcaacagaaatgtattgtttcacagttctggaggacaggagttcaaaatcaaggtgttggcatggttgtttccttctgagggctgtgatggaaggacctgttctacgcctctgttcttggcttgtagatggcatcttctccctgtacctcttcaaatttttcttctatttttgtccatctcggtgtccatattccccctttttgtaaggacaccagtcatcgttcaccagtttggattcgagcccacccaaataccacattttaacttgatttcctgtaaaaactgtttccaaataaggtcaccttctgaagtactagggatttgaactccaatatgcatatatattttttgggtgggaggaaaacacaattcaacccacaacacaccactaccatcagtaattactttcattccataggctgagggatagaaaaacttccagtgtttctacctccagttgcctggtatccagtaatattctccaaagtgaggtaacaggtggcaacacggaaacttcaagttccgttttttggcctgaaaaaggaagaccattttggcttggtgatatttcctgcattaaacatagtttgtatttttttttttttttttgagacaaagtctggctctgttaaccagcctggagtgcagtggcgccatctcagctcactgcaacctccgcctctcgggttcaagcggttctcctgcctcagcctcccgagtagctgggactacaggcgcgcgccaccaccacgaccagctaattttgtatttttagtagagacggggtttcaccgtgttagccaggatggtctcgatctcctgatctcgtgatctgcccgcctcggcctcccaaagtgccgggattacaggcgtgagccacagcgcccggcccatagtttgtatttttatagaacactctcgtttagaaataacttacttatgttcatttaatccttataatctctgttgccgagatgaagaaattgtgtctctcaaatggtgatttgaacaaaatctcacagctatcaaatccaaaggattgtttcaattcagtgtgtctaacttatcactcagtgttttcttccataactgaaaatagacttcatagtccaaaccaagctctctgctattgcgtttacaaagaaatgtgacgttccataaattgtgccgatctgagacctactgacttgtgtgaaacattttttctgagtatagttaccacaagaggtcgctgttgcaacgagttgcgtttaaagggtaacccatttattttcatttctgtacaaggtgttctagtatcttcaggtccctcataaaaacatctttgctccttcacttgttactgaggaaagcctggttatttatttcatgacctgtgatagctcctctgtcaaaatgttactagaagccatcaacactcactgattttttttttgcatgggaaaatggaaaaattgctgattcagaatgctttcggcaattctagacctagaagaggcacctcccaaatattttccagtgatttttttcattcctatattataagagaaaagaactcaaacaacataccactatcttttccacattaatgtgagtatgtaacaggttttgtttctagcattcggctgattcaatgagtactactgtgtcttttggattcaatgaatactactgtgtctttcggctcttttcctgaatggctttatttttcttttcagtttttgtgcttctgttataggatttatactaattatttcctgaaggaagtgtgtacagtaactacaaaaaattagatatataatcctacacgactgccttctactagccatggtactctgcgctctgaatcagatgagaagaaagggaaaggaactataatttactgttgactacgtgccacagattgaaaccctgaaatacatattattgttcccattttacagatgaagaaaccaagactcagaggagtgagctgcctgaggtcacaaggtggcagagttgagatttagatttagatctgtctgacacagcctgtgccttttcttcttgttcaccttacctcctccttggttaagtgagtgattccagaccaaatgtcctatcctagctggtcagcagggactaatgagaggtttgttcctctgttaaatatctgttacacagggtctgagaagaaggtattagttgtggacttagtgggattataaatgatcccagggaatcaggagatggaatgtccagtccagactgcctcatttgctctttcttggaataggattaggaatccctgtttcttcttggctaaataggggtcagtggagcactgcagggcataaagtaacaagtcaggcaggttacacttagaccatgactgtcaatgagtccatgagtgtcagaccgactacagtacatgaccaccctctcgggctgtggaaagtaatgtaatggggaataggagcccaatgtaatctaccttctcatagctttgcctcatttggaccaaatctttaagggattagacctctgcaaagatctaaaatgaaattcaggctgctgtgcttcagtaccagcagttttcactccctactcttcttggggctttagctgaactttgaggggagccctgctctgaggagctgctgccctgctattggctgctgtactggggcagcctgagtgacagctgctggtgtgggccctggcagttgctgctgggctcattgcagctcagacacagcaaaagagcctagaacctgggtcctagtttgcacctagaatatgaggcaagtggcgagagtgatcgtgttcctgaccctgagtgagttattttgggatgaagaggaatgggatctgggcctgatgatgctggaaaggaatctggaactttgcctgctagcagttgctctttatccaagatgtagagggatagcttcagggttccatttttctccaggcagctcctgagcatttatgtgagatgtgtctcagggcagcaaagattttcggggtttctaatccctagggtctatccatgggagggagatagtaaacctgacacttctgtgtatgcctgggataaatatttttgtactgaaacataaatgagaagtaaattgtatgtacatgtatatggcagggaagtagagcgtggggatggatttgactgtgagagggaaccgtggggctactgagtgggaccgtctaacttaccttgctttcaggataggggctaggattgtgttttactcccataggtactttgagccttgctaagaccacccagcccatctccatggactcatatgaaggacaagaagtgaacataacctgtagccacaacaacattgctacaaatgattatatcacgtggtaccaacagtttcccagccaaggaccacgatttattattcaaggatacaagacaaaagttacaaacgaagtggcctccctgtttatccctgccgacagaaagtccagcactctgagcctgccccgggtttccctgagcgacactgctgtgtactactgcctcgtgggtgacacacagtgagacagatgggcctgcacctgtgccgttttcctctgtggggtgggagtcacagcctagaaagaagtccaaaagtgctttctaaaatttttattttcaaaaggtattagcaaatttatgtattcttctactatttgcaaaatcaatcttatttattttttaaataggtatttcacttatgtgatctaaaattaaaaaagtataaaagggcatacagcatgatgtcttccttccaccatggtccctgagtactcaattatcaaagtgaggtatctgtggtatttatactattgttgctaagttcactggtactcctcagtttgtgtgtatagacagacacacactacatatactttatatgcataccacgcacagtcaacatgggcaatatgcttcttagcttttgaaacatttagcctaagtatcaggttattatttatagctgcacacattttgaacatttctgtggccatttccaagtatctacatgctggtttccatgcgtcccctgagattagatctctcactctctctgttgcctgtctttctcttttcttttgtcccacttccctattgtggatggtatgtaatggaaaatggaggtgatggtagaggaggagatgggagagaatttgtttctgatttgcattgtagactatttttgaaacatctaaatcagaaatggattctggatcattattagtttttaaagttgggttctttgaggctccaaagagagaagaataacagaaaatttgctgaaaatcctgcttgggctcctgaggcttcattaggatcatggggtatgtttttgtttgtttgttttttgtgggatgttgtctctgattttgatcacaaggaaagcaatatttgataatttttttattgagaatgagaggatcaggctatgtggcaggaggaggtttccatctagttcatctgagggtttggtgggggagtagtattgtggaaagaaaacaaacatttgtagagtattcgagcctatacactcatctcctttgtctgacttctctacacagtgacgaggagctggcagaaagtgggagtcctggtccccaaatgtccaggatgcagccaactcttctctgaagtgctccactatttccagtacttcatgtggcacagacaatatcctcaaaaaagcctagggtttctgattttcatattctcaatggagaaaatgaggaaggaatatttacagttcatttgaataaagacaatgaatacacccctttgcacaaaacagacccaaaggctggcgactctgacacctacatctttgtgagaagctcagagtgattccaaagtccctggagagcctctgcccaaagccgcactccagtcataagagttgagagagtgggatagagggacatctctgtaatgttcctgcctacttatgaaaatcaatacccacgtatgagaggctgtgtgggattatctaaagaagatactatactattctgtagataattgatctggaaaaggtggaatattggattggaaaatttcaaaatgttttctacccacttggagttcatcccatgcctgctcttgggatcttggttggatgatgcctttggggtagtccagaggaaaagagctgtgctgtggagatggggagccgggttacggtccaggttgtttcaaggaggaactgactgtgaggaaacaacacaactagcttttgtttcaaggtctgcttttatgaacaggtatctgtatgttagccattttggaagaaagagttgaacagccactgagggatggtagaaggggcactctaattctagttgtactttatttttactacatgctctgggcagcaaaacagactggaaaaataatcagctctaaagccaggcattcctgggtttgaatctgagatctcctgctgtaaagagtttgaccttagtcaaatacttttggcatttgagctttaatactttgtctataaaatgagggtcataatactatttttccagggttcttctgtggttaaaagactatcactaagaatgtcctggtttaatcagcactcatcagattaatgctatctatatcctgcattatcattgctattaaacctcacctgccaacccaaaaagctgtttggaggatgacatcacataccgggtgttcagactcttcagaaactgaaaaagacctgagccaatacaagaacatttttttgggagttaaaactcttggtctgtgacaaaaagatcaataaattgatcaataaattgatctgctatttctctgtagaaagatcacatgatttttttaaacaaaatgatgtcccctcagaaggggagatgttgggaggggaaagggagatgcaaaattacttgttgggtacaatgtacactacttgggtgatgggtgcactaaaatccttgaactcaccactatagaattcatctatgtaaccaaaaaccacgtttacccctaaagctatgaaatagaaaaaaattttaaaaatgaggccagggtcataccattatttttttctctgagagagaaacagccaaaattatttcatttggaactcattagtacatttactcagcaaatgtttattttgtattatgatgtgataggcaatgatgtaatggaggaagtaccttattctccaatatagataagttttctgcacaaacgcaggttttattcttctgtgggcagacaacacaaacaaagaaacaaatgatttccaaatataagtggcatttggaaaacaaaatagggtaatgtgaaggagaatcatggtggttatggaggtcatttagtggtgacatttgagctgaatcttgaatgacagaaaaatgacaaaaccatttaagacctggggtaagaaagagttttcaaatgcaacaatggtccttaggcagagcatgtttgctgcatttatgacagaagctggtgttccctgaatatagtgagaaggagagtggtaggaaataatgtcaaaaaggtagttatggacttgaaaatacaaagccttgtaaatcatggttagattcagattttattctacatgtattgggaagtatttgactacctaatttatattttagaaggatcactcttcgtgctctggggaatggctcatagggttggcatggggagagactagggcacaaagacagttagaatttgcaggggacccagtgagacctgatggaggtatagactaggtggtagaagtgggaatgaagaaacatggatgaattaacttatattttggaggtaaaaaatagatcttaatgatgatttgtatatggcagatggggaaaaaaagagagtcgatgatgacttttaagtttttggcttatgtagttacatggaagatgagatagggaattctgagagaggaaatatttttgattatagtaggcaggtaaaagtgtcatttcagatatgttaagttagagatgtctataaggcattcaactgtagttgttgaccagggagttccatattgagcctggagctaacagaggacatagctggcctatgggatagtgttcaagccacgcattgaatgagatcacttagggaaagagtgtggatggagaagaggttcttaacctgagcacttggactgtcagttgaggtttaatagcgaaggaaaaatcagcaaaggagatcgaagtctattagtgaattggaagggaagccaatagaatgtgctgtcacagaaggcaaaacaagaaaatgtttcaaggagtggtcaattgtgtctactatactacttctgggtttgggtgggagcttatagtgtgaaaagaagaattagtcagaagagacagatggaaaataacttcaactggaaaggattaatgatataatccattagtgttcttattcctgcatttaaaattttcatgaaattttatatattgactttttttcttaatggtttctggcgttggtatcacttaaaaaggcctttgttgccttgctattataaataaccttcaatttatatttcttctataattatgttagtagctttgttttcatacatggaaactttgtggacaatcataaacttatttttagaatatggagtggagcagcgacccagttttatttttccccaatatttattgagcgacgcatcctgtcttcactaatctgaaattgcgtatttctctaagaatttgggtctctgtcttgactctatctgtcctctcattgctatttgtgcacatattccatgctcatttaattacttgacaaattatttgataaattatttcagtagtattggacccagtttatgtactttcctgctttaatttggccattgttttctgctcagtgttaccgctaatcctccgggaaaactgcctagtacaaactgcattctctaatctggagagagaaagttaaacttctgtaggaaaaagttgcctcaagtcatagttgcgtttgctgaggggcagggaccactgaagtggctctcctgatctctcatgttacttgcaggcaaaggagaatttaccatgaaactcctcatttcagaggcattttccaaaatttctttagtgggaggtcctgtaatgctgcagttcccaacctttttcgcaccagggactagtttcatgggagacaatttttccacagaccaagggagtgaggatgatttcgggatgaaaccattagctcatcaggaattagttaggttcttataagaactaggcaacctagatccctctcatgcacagttcactgtagggtttgcgcttctatgagaatctaatgccattgctgctctgacaggaggcagagctcaggtaggttttatgatcagaaaaatattaaacaaaatttaacagccttggaaaagttatttataaacattgcattttatttaagaggttgaatatatacattgttttgccattttgaatttattagcagtgtggcaaagttagcttaatttgctattagtaaaactgaaaaccatttgataagctcttagaattatgctaatttgtctgaacggtagtagaagctattttaattaaaaactgtagctatatagtttaatctatatagtttaaccctcataatttgatagaattgagatcataggtgttgtgaagtatgactaatgccctaatataaataaacaagtaataaactgtcataaacagtctcaatatactctgaattctttcttccaacagatttaatttgtatagacaatagtaatacattcggataaaaattccaaatttgatttcacttatacttgttgatgtttgtaatgagagagtctttctgcgtatgttaaaattcatatgttaataggtgttttaaggagcttgtaaaaagagatgactatggaaacacataattaccctaaattttcatctttcatttgaaaacaaatttctcttaaatttaggatttttaaacaacctattatctgtctttgatcaaatggaaatttaatatatgtaaataggcaccgatgtttgcaagtaaacggcataaagagtggtaaagtaagttatgtgagggatgttttttaagtaacaagaagaaaaaatgttatgatttgtcggtaatatgtataaaataacactgtgaatatttgggaaatacacaaatgagaaaaaaatttaaaaatgctgtttgaaggttccaaacagtgacaaaatataagaatatactgcgggagatatgtcacttggacagaaacacactgagtgaagtccctgtatggtgtatggcacatggaaatgaagctcaagcagaaagcagctgtcttattggatttaggagtcagagtttggagttcggtgctgacagagtagctgaaattcaaggggggatccaggaaaagaaggatccacagtgtgaggagttacaaaatcttacaaagccacacttagttaggaactcggcaaaaataacaaaaaacaaataacctggctgggtgcggtggctcatgcctgcaatcccagcacttcgggagaaccaggcaggtggattggttgagcccaggagttcgagaccagtctgggcaacatggtaacaccctgcctctactaaacatacaaaaattagccaggcatggtggtgtgtgcctgtattcccagctactcaggaggctgaggcagaaagtacaactgagcctgggaggtccaggctgcagtgagccatgatggtgccattgcatttcagcctggtgatataagaaaccctgtctccaaaaaaaaaaaaaacaaaaaccaaatatatatatatatataaaatttattcacattatatatattttatatataaataaattattcatgtcctttactcactttttaaaccccataaaaaaagtgagtaaaggacctgaataattgtttaaaagaagacatagaaatggcaacaagcatatgaaaaaaggcacagcatcaataatcgttagagaaatgcaaattaaaagtaatgagataccatcttacaccagtcagaatggctattattaaaaagtcaaaaaaataacagacattggcaaggatgcagagaaaagggaatgcttatataatgttggtgggaatgtaaattaggatgacctctgtggaaaacagtatggagatatctcaaagcaataagaatataactactatttgatccagcaatctcactactgagtgttattcaaagaaaaggaaatcatatcaaaaagatacatacattcatatgtttatcacagaagtattcacaatagcaaagatatggaatcaacctaattgtgggataaagaaaatatagtatatagacacaatggaatactattcagccatacaaagaatgaaatcatgtcttttgcagcaacatagatagaactggaagccattatcttaagtgaaacaactcagaaacagaaaatactgtatgttcttacttataagtgggaactaaataacgtttacacatggacacagagagtgcataatagacactggagagtctgaagggtgggagagtgggaggggggtaagagatgagaaattacttaataggtacaatgtacattattcaggtgatggctatactaaaagcctagactttatattcatgtataagaaatgcacttgtagctcctaaatttatacaagttaaaaaaaataaaactatcccttggttgattcttgagctgtgcaggcataagacaagactctaagaaagtaagtagaaaacagcagccagatggctgagagaaaagattttagcagttaccctcaactagggcaatagaattttaaatgcaagtgctgccaagtgaaagaggttcggtaaaaacttaggctttctaatgaaaacccagaaggaccacgccctagaaataagaacaatactctgggactaaagggtataccctacaaataggtctataccctagaacaaggacatttaacaataaattaatgctgtgagtgtatgttatcagcagagtcatacttcaaaaattataaagtatttttgttaggtggtttgttgactgaagggaaatgatatcagatggaatttatgacccaaggaagtaataaagaacattaaaaatagtaactatgtggaaacattaaaaagagattacttttctaagtttttcaaaatacagttgacaaatgcaaaaataataacaatgtattacaccgttaataacatatataaataaaatcaacagcaataacacaaaaaactgaaggggcataggattaaactgttgtaagattcttgcattatgtatgaagccgtataatattaattcaagagagaatctgatgaactgaggatgcatatgataatctgtagataaacaattaaaaaaccaaagcaaaaaggtttagctaatagccaatgggggaaatagaatgaacgagtatagaaacttctcaaataaatcaaaagaagggagaataaagggcatattaacaaagactagaggaaaaacatagaaaatggattatcattgtagattcaaaccaaataaaaataattacattaaatgtaaatagcataaacattccaaataaaagggagattttctcaaactagacaaaaagacacaattgtatgtcattcacaaaaaatgtactttaaagacaaagatgagttgaaagtaagaggcaacctatgccatgcaaatagcaaccataagaaagctatgtgtctttattaatattaaataatatttgaaaatgaggggtgttatgagataaaagcattatttaataataaacagagggtcacttgatcaagaagagataatattctctaaatgtttatgtactgatagtagagttataaaatatatgaaaccaaattaacagaattaaaggagaaataggcaaatctgtaatcagagttggagactgtaaggctcctctctagtaattgatagaacaagaagacagaaagtcagtaaaaatatacaaggctggaacaatcaactagatctaattgacatttatagagcactatacccaccaagtgcactatatacattcttttcaagtacacacagaacgttcatcaaacagaccatatttttagatgtaaaacagtctcaatagatttgaaaggattagaatcctacagttttctcaccacaatataattaatttagaagtcagtaacaaggtatacagtagaaaatccccaaatatttgcaaattaagcaatatacttctaagtcacccattgataaaagaagaaattgcaaggaaagttagaagatattttgaagtaaaaaatgataaaatatagcccgggcgcggtggctcatgcttgtaatcctggcactttgggaggctgagttgggcggatcacctgaggttgggagtttgagaccagcctgaccaacatggagaaaccccgtttctactaaaaatgcaaaattagccgggtgtggtggcacatgcctgtaatcccaactactcgggaggctgaggcaggagaatcgcttgaatctgggaggtgaaggttgcaggtgagccgagattgtaccattgcactccagcctgggcaacaagagtgaaactgtctcaaaaacaaacaaccaatcaaaacaaacaaaaaaccccttaaaatttcacagaaaaattctaggctcaggtagcttcaaaggtgagttgaatagaacatttaatgaagaattaattctaacccaacacaaaacagaaaatagaaggagagcagtccggccccatctgtagtcatccacattgaatcatcagcatcagcatcaccttggaatttgttagaaatgcagagtcttaggccaaactccagttctggtgattcaggattctcattgtagcacagttcctgaatttgtacattttgttaagcaatgtggtcctgaagtgaggaagtaaacagaatgatgaagggaggtgggaaaaatatttttttcaagttctagttttttttttaaaaactagttaattgttttattttgttgagactctaaacttaccttagattcaatttttttaaatttgtgagtgagattgggctagaacagtggttcccctgtgggagcaattttatccttcaggggatattttggaatatctggagatattttttattgtcgtacagagagttgaaactggcatttagtggagagaggtcagagatgctctaaacatcctaaaatggacaggagagcttccaaccaagaattattttgtacaaatgttagtgctaatattgacaaactgtggactacagaatcctaagggtcctaatagctctgaaactctgggatccaatttaactgaaaaaacattcactgaatactgtgtgccaagttattatggtcttacattggtgtgccagcggggagacactgtcccacagcatgggcatacactatctggcccctaaccatgtataagaccattgatctatgccaaccagacaatacatgttcagaattttgaaaagaataggaaagctagggtcagccactctcatactacaaggaaatcagtaattcactctctgacataagtaagagtaggccaaggactgtttataactaacctcatcactcaggtgtactttctatttcatattattaataacaaattatactcattatcctgtatttataaatataatgtgcatcacatacagagtgaaagaaaaaatgaccaagggaaagaaaaagtagataaattgggagcaaaatgaacattgcttatgcatattgaaatccatgtcagtactagaaaataaagctattccatgccattgtttttgacaataaggcaacattttatgaaaaaatcataggggtagaaatttttccagaccataattgtgagtagtgttatagtaaataggtggaacagaagcagaccacctaacgactagtattttcaactctgcatgctatatatccgaaggacagatattgacctaaactgttaagaaaagttcaaggaaaatgcaactaagaaatatgataaaggatctgggaattatatgatatgatgaatgagtaaaaggataaaacaatttaaatgaaaactttaaataaatacatttgatgtatataaatctaaatacattttgtaatatgtacatatctttgtattttaggaaagtgattctgtataatcacacttgagatatattagttatgccatgcagatgaggaattagattaattttctacattgcttggagatctactaagtcaaagcacagggaagggactccaacttgtgaaaaacagtcagaccaagtttccctggacggagagtaaatttgccattgtcagtttcctacatatattatgctactaacaggcattggttttatgcttacttatatttattattacaggaatgaatcagaaagactaaagaaattaaaatagatgatgtagggtttggatagaaaatttaaaatactgaaggactttatcacaggggaatatccaaacaatgattttagcaatagacaataaaatcgagggaaaagtttttgggtctgaaatctgagttagcagtgcccagggtaacaggaggggaaattccactacagatcattcattattcagtgatcacatttgaggacaagccactcattctgacaataggaataagaatacacttggaaaagatgtacatttgtttacattatctcaatctgtagtctgatgtttcctgagatgtttcctcttttatgtcaatactttgcaataagtaagccacatatccgtaatttcagatgatctgttcttccagaggaaaatatttcagagtgcatgtcagatttttcatcacaatctataggctaaactctttcctttcattagaccaatattattaactcatggaagcctttctccctccttttatcttttattgtataatttagtcattttgaagaaaacaacactcatgttttgacctctggcactgtcaatttcctgggaatggcaagaacaggaacaaggccaggcttggaggagcagagcctgagatagcatgcatctgatatatttagtgaacctgtcttactccaatttttgtgcttaaatgctagcttcagaaagagttttcctctgtgagtgctgaaacaggatggctaatttggctgattgattttctggccaattcaaaaaatagtagagggataaggaggaaacgttttatacctcagtagctttgtagactgaatcatggcattttcttaatttcaagaagactgtcattaataaacacgaaaaacctctaacttcttcaaatatatttaacgtgactcagtagtgtgccgagaagatgcaatggaattctaaaacctacgtttgcactttttctgtctgctaatccacataatttctgactggaggtacacttggaatttactttatttggccttctgctgtttgatgtgccagaatctcccacagatacaggataattggtttagcgtttggggatctggccacaaggtggcagagcttctctgctcatgtagaatgtacgaaaggatccttttggttgacttctgtgagtaggctgacggcagaagcagatgcctctgtggacagtttaagaaaccacagtgctttggaggaaaggaagagatacttgataatatagctctcttggctggagattgcaggtcccagtggggagaacaatgaagacatttgctggattttcgttcctgtttttgtggctgcagctggactgtgagtcgagagcttttggggaacagagggtttagtaaatactcattagaagtctgaggaggagactcatctggtcttttccagaatgtctgaagttactacagtgaaaaaaataaaaaagcaaactccagagaatgatggcctgatgatcttgtctgacttttccttttgcacaggtatgagtagaggagaggatgtggagcagagtcttttcctgagtgtccgagagggagacagctccgttataaactgcacttacacagacagctcctccacctacttatactggtataagcaagaacctggagcaggtctccagttgctgacgtatattttttcaaatatggacatgaaacaagaccaaagactcactgttctattgaataaaaaggataaacatctgtctctgcgcattgcagacacccagactggggactcagctatctacttctgtgcagagagtacacattgcttctcaggcacctgtatcctgtacccaaacctgcacctgggactaaagccacactctatttcctttacctttaagtcagggattttgctgtaaggtatttttaatgtacggacattacaaaacatcctaaaaggtcagtttcaaaatgacttaatgattttcagaacattttgattaaactctttttgggagttaatgatttcttagttgatatcctggtcttagggttgactttatgggtgccataaagtcatctgaatgatttctcccctaccaaggacatcttggtgtcagagaatcctctccttgatggagtcttttatcttttaacattagtatttattaactttttctaactataaatatattaagtgcacggtataggaaaaaacaggaaattataaaatagaaaatcaaaatgtcttataatcctatcatacacataattcatagctaacatttagtattccttcttcattaaaaaaaaaattaggatcgcttttcctgtggcagcagctggggtgagaagagcagtggctctctcctctctctgccatggcatgtgcttgcccactgatgtcagcgtactctgagaagggagagtcatctggcaaaaatgtcactttgtctgccatattcaaggctcctattcgaccagatattgtgaactttgttcacgccaacttgtgcaaaaacaacagacagccctatgctgtcagtgaatcagcaggtcatcaaaccagtgttgagtcttggagtactggcagagctgcagcttgaattcccagagttcgaagtggtgggactcaccattctggccagggagcttttggaaacatgtgtcgtggaggctgaatgtttgcaccaaccaaaacctggctccattggcatagtagagtgaatacaaccccaaaacgatatgtcatctcttctgccctggctgcctcagccttaccagcactggttatgtctaagggtcatcgtattgaggaagctcctgaacttcctttggtagtcgaagataaagttgaaggctacaagaagaccaaggaggctgttttgcttcttaagaaacttaaagcctggaatgatatcgagaaggtctatgtctctcagcaaatgagatccagcaagagcaaaacgagaaaccatcaccgtatccggcgcaggggcgccgcatcatctgtaatgaggataatggtatcgtcaaggccttcagaaacatccctggaattactatgcttaatataagcaaactgaacattttgaaacttgctcctggtgggcatgtgggacatttctgcatttggactcaaagtgctttctggaagttagatgaattttctggcacttggcataaagctgcttccctcaagagtaactacaatcttcccatgcacaagatgatcaatacagaccttagcagcgtcttaaaaagcccagagatccagtgagcccttcgagcaccttgcaagaagattcatcgcagagtcctaaagaacccactgaaaaatctgagaatgatgttgaagctaaacccatacacacagatcatgcgccggaacaccattcttcgctaggccaggaatcacaaactctgggtggataaggcagcagccggcagcagcagcactagaagccagatcagatgagaagggggttgtaggcaagaagcctgtggtatgtaagaaaggaaagaaggccattgttgatgttaagaagcagaagaagcctctggtgggagaaaaggcagcagctaccaagaaaccagcagctgaaaagaagccggcaaaaaagaaatctactacggaggaaaaggagcctgctgcataaactcttaaatttgattattccataaaagtcaaatcattttgaacagcttcttttgaataaagacctaatcaaagaggcagtgaggaaaaaaaattaggatcacgcagacttgtattttaatttaatagtatattctaaccttaatgtttcacatttccccaatcttataaaaataaatttttaaatgattttgtgagtgattttataagccagcattttatttccactataatcgtcccatatatctgtggtgaaagacagtatttttctgaactcaggtgttaccctttaaatagtttcttacatgtaggaagttttaaattttctagaaatttattttttcttctgttctagaaataatttgtttcttcaatcacttatgctcttttcctcttgttctttcttcctccttgaagtgctgaatgttttcatttgtcccattttttttctatttttcacagcattttaaagggaaagttatatgtttctaacattgtatgttaaggtttctttcagcactgatgatactgggatttattaaatcttccaggagcagataaggaggtcagggttgatttagaattatttgccaagccagaagtcaggatgtcttttgctagtacgaatggtacatcacttatatttagatgccagttggagaacttgctggagaggtccatagtgatatccacttctgtgcctgaattgcttttatattaccatctctttgtatgattgtatcattctaacagggagagtagtttggtgacctatgttcagtggtttggttccttaaaaatgacaacgatgctatttggtattcctctaatggcatgcaaacaaaccatagtttctttttgtttttgtttttttttttttgagatggagtctcgctctgtcgctcagtggcacaatcttggctcactgcaagctctgactcttgggtttatgccattctcctgcctcagccttctgagtagctgggactacaggcgcccaccatcaggcccggctaattttttctattttttggtagagacggggtttcaccgtgttagccaggatggtcgcgatctcctgacctcatgatccacccgcctcggcctcccaaagtgctgggattacatgcgtgagccaccgcgcctggccgtttgtttctaagattaaaaattttgtttaaaaacagatgtttactttctgaaatgccttatagagatagttggtgtttagtttttcactttgtactcgttatcatcatcatcatcaccatcatcatcaagtggaagctaattcttcctcatataattcatgatcagaattaccctttattattttactctttgatctctttctactccccaggacccctgccactgctttataagtgttagtctaattgctcatttgtccttagagctgtctcaggtgagcttttatcatgtaggcagtaacacatgggttgattggactatccttcaagtctatcttctttataatatgtttaaaaagttgctcagtttttagggctatgacttgtgccactccttgcatctggcacttgtgtgtatttcaccgtttttaatgttttaccaatggacatttaaggaaaggggctaggtaaaatgcactgaatacacagatccatcaatatgtttgaaataatgcatgtgaagcacctagcatgatcctggcatgtactcatcattatttaataccaaatgggtactgacatatcagcagacttcatcctcaatatggatgtagctagataaaaaccaacagaatgtagctttctcttatttctggctcggtgtttcactttttctggtatcatgatgcccactaaattgaacatgtccaaaactagaatatgtcttttaaattttatttatttatttacttatttattttgagatggagttttgctctgttgcccaggctgcagtgtaatggtgtgatcttggctcactgcaacctccgcctcctgggttcaagcgattctccttcctcagtcttctgagtagctgggattgcaggtgcctgccaccatgcctggctaattttgtatttttggtagagacagggtttctccatgttggccaggctggtcttgaactcctgacctcaagtgattcacctgcctcggcttcccaaagtattgggattacagttgtgagccactttgcctggccaatatctgtctttttaaaaataagttttttgatatagacttggcaagatggctgaataggaacagctgtggtctgtagctcctagcaagattgacacagaaggtgggtgatttctgcatttccaactgaggtacccggttcatctcactgggactggtcagacagtgggtgcagcccacagagggcgagccaaagcagggtggggtgttgcctcatctgggaagcagaaggggtcagggaactcctttccttagccaagatagccatgagggactgtgccgtgaggaatggtgcactccagcccagatactgcacttttcccatggtcttcacaacccacagacccacaggagatttcctccggtgcctatgccaccagagccctgggtttcaagcacaaaactgggtggctgtttgggcagacactgagctagcttcagaattttttttcatacgctagtggtgcctgaaacgccagcaagacagaaccattcactcccctggaaagggggctgaagccagggagccaagtggtctggcttagcgggtcccacccccacagagcccagcaagctaagattcactggcttgaaattctcgctgctagcacagcaatctgagttcgacctgggacactcgagcttggtggggagacgggcgtctgccattgctgaggcttgagtaggcggttttacccttacagtgtaaagaaagccactgggaagttcaaacttggcagagcccaccacagcccagaaaggctgctgtggccagactgcctctctagattcctcctctctggcagaccatctctgaaaaaaaaagcagcagccccagtcagggtcttatagataaaacccccatctccctgggacagagcacctggggaaggggtggatgtgggggcagcttcagcagacttaaatgtccctgtctgatagctctgaagagagcagtggatctcccagcacagtgttcgagctctgcaaagggtcaggctgtctcctcaaatgggtccctgaccccgtgtctcctgactgggaaacacctcccagttggggccaacagacacctcatataggagagctctggctggcatatggcaggtgccctctgggacaaagcttccagaggaaggaacaggcagcaatctttgctgttctgcagcctctgctggtgatacccaggcaaacagagtcaggagtggacctccagcaaactccagcagacccggagcagagaagcctgagtgttagaaggaaaactaatgaacagaagggaatagcatcaacatcaacaaaaaggaagtccacttacagacccctatctgaaggtcaccaacatcaaagaccaaaggtagataaatacacaaagatggggagaaaccggcataaaaagtctgaaattcaaaaaaccagaacgcctcttgtcttccaaaggatcacaactccttgccagcaaggcaacaaagctggacaatgagttttacaaattgacagaagtaggcttcaaaaggtgggtaaaaacaaactcctctgagctaaaggggtatgttataacccaatacaaagaagctaagaatgttgaaaacacgttaggtgaattgctaaatagaataaccagtttagagaagaacataaatgacctgatggagatgaaaaacacagaatgagaacttcgtgaagcaaacacaagtatcaatagccaaatcaatcaaggagaagaaaggatatcagagattgaagatgaacttaatgaaataaagtgagaagacaaaattagagaaaaaagaatgaaaaggaacaaacaaagcctccaagaaatatgggactatgtgaaaagaccaaatttacgtttgattggaatacctgaaagtgatgggaagaatggaaccaagttggaaaactcttcaggatattatccaggagaacttccacaacctagaaagacaggccaacattcaaattaaggaaatacagagaacaccacaaacatactcctcgagaagagcaaccccaagacacataatcatgagattcaccaaggtcaaaatgaaggaaaaaatgttaagggcagccagagagaaaggtcgggttacccacaaagggaagcccatcagacaaacagtggatctctctgcagaaaccctacaagccagaagagagtggggccaatattcaacattcttttttttttttttcatcatttcagctttattttatattacatcaaaattatgtttttgaaactttatggagaccataaaacattcgctttcaaaaaattacccttgttgcctatagtggcttctccataggcatattctacatgtgttttatgattttttttaattttattattattattttttattatgctttaagttttagggtacatgtgcacaacgtgcaggtttgttacatatgtatacatgtgccacgttggtgtgctgcacccattaactcatcatttagcattaggtatatctcctaatgctatccctcccccctccccccaccccacaacagtccccagtgtgtgatgttccccttcctgtgtccatgtgttctcattgttcaattcccacctatgagtgagaacatgcagtgtttggttttttgtccttgcgatagtttgctgagaatgatggtttccagcttcatccatgtccctacaaaggacatgaactcatcattttttatggctttttaatgatcaccattctaactggtgtgagatggtatctcattgtggttttgatttgcatttctctgatggccagtgatgatgagcactttttcatgtgtcttttggctgcataaatgtcttcttttgagaagtgtctgttcatatcctttgcccactttttgatggagttttttgtttttttcttgtaaatttgttggagttcattgtagattctggatattagccctttgtcagatgagtagattgcaaaaattttctcccattctgtaggttgccggttcactctgatggtagtttcttttgctgtacagaagctctttagtttaattagaatcccatttgtcaattttagcttttgttgccattgcttttggtgttttagacatgaagtcctggcccatgcctatggcctgaatggtattgcctaggttttcttctagggtttttacggttttaggtctaacatttaagtctttaatccatcttgaattaatttttgtataaggtgtaaggaagggatccagtttcagctttctacatagctttctacagctagccagttttcccagccccatttattaaacagggaatcctttccccatttcttgtttttgtcaggtttgtcaaagatcagatagttgtagatatgtggcattatttctgagggctctgttctgttccattggtctatatctctgttttggtgccagtactgtgctgttttggttactgtaaccttgtagtatagtttgaagtcaggtagcctgatgcctccagttttgttcttttggcttaggattgacttggcaatgcaggctcttttttggttccatatgaactttaaagtagttttttccaattctgtgaagaaaatcattggtagcttgatggggatggcattgaatctataaattaccttgggcagtatggccattttcatgatactgattcttcctacccatgagcatggaatgttcttccatttgtttgtatcctcttttatttcattgagcagtgatttgtagttctccttgcagaggtccttcacatcccttgtaagttggattcctaggtattttattctctttgaagcaattgtgaatgggagttcactcatgatttggctctctgtttgtctgttattggtgtataagtatgcttgtgttttttgtacattgattttgtatcctgagactttgctgaagtagcttatcagcttaaggagatcttgggctgagatgatggggttttctaaatatacaatcatgtcatctgcaaacagggacaatttgactttctcttttcctaattgaataccctttatttccttctcctgcctgattgccctggccagaacttccaacactatgttgaataggagtggtgagagagggcatccctgtcttgtgccagttttcaaagggaatgcttccagtgtttgcccattcagtatgatattggctgtgggtttgtcatagatagcttttattattttgagatccgtcccatcaatacctaatttgttgagagtttttagcgtgaagtgttgttgaattttgtcgaaggccttttctgcatctattgagttaatcatgtggtttttgtctttggttctgtttatatgctggattatgtttattgatttgtgtatgttgaaccagccttgcatccctgggatgaagcccacttgatcatggtggataagctttttgatgtgctgctgggtttggtttgttagtattttattgaggatttttgcatcgatgttcatcagggatattggtctaaaattctctttttttggtgtgtctctgccagggtttgctatcaggatgatgctggcctcataaaatgagttagggaggattccctctttttctattgattggaatagtttcagaaggaatggtaccaggtccaccttgtacctctggtagaattcggctgtgaatccatctggtcctggaccctttttgttggtaagctattaattattgcctcaatttcagaacctgtttttggtctattcagagattcaacttcttcttggtttagtcttgggagggtgtacatgtcgaggaatttattcatttcttctagattttctagtttattcgcatagaggtgtttatagtattctctgatggtagtttgtatttctgtgggattggtgttgatatcccctttatcattttttattgcatctatttgattcttctctcttttcttctttattaatcttgctagtggtctatcaattttgttgatcttttcaaaaaaacagcttctggattcattgactttttgaagggttttttgtgtctctatctccttcagttttgctctgatcttagttatttcttgccttctgctagcttttgaatgtgtttgctcttgcttctctggttcttttaattttgatgttagggtgtcaattttagatctttcctgctttctcttatgggcatttagtgctataaatttccctctacacactgcttaaatgtgtcccagagattctggtatgttgtgtttttgttctcgttggtttcaaagaacatctttatttctgccttcatttcgttatataccctgtagtcattcaggagcaggttgttcagtttccatgtagttgagtggttttgagtgagtttcttaatcctgagttctagtttgattgcactgtggtctgagagacagtttgttataatttctgttcttttacatttactgaggagtgctttacttgaaactatgtggtcaattttggaataggtgtggtgtggtgctgagaagaatgtctcctgttgatttggggtggagagttctgtagatgtctattaggtccacttggtgcagagctgagttcaattcctggatatccttgttaactttctgtctcgttgatctgtctaatgttgacagtggggtgttaaagtctcccattattatggtgtgggagtctaagtctctttgtaggtctcaaggacttgctttatgaatctgggtgctcctgtattggctgcatatatttttaggatagttagctcttcctgtggaattgatccctttaccattatgtaatggccttctttgtttcttttgatctttgttggtttaaagtctgttttatcagagtctaggattgcaatccctgcattttcttgttttccatttgcttggtagatcttcctccatctctttattttgagcctatgtgtgtctctgcacgtgagatgggtttcctgagtacagcacactgatgggtcttgactctttatccaatttgctagtctgtgtcttttaattggagcatttagcacatttacatttaaggttaatattgttatgtgtgaatttgatcctgtcattatgatgttagctggttattttgctcgttagttgatgtagcttcttcctagccttgatgatctggcaacagagccagaccctgtctcaaaaaaaaaaaaagtaaaacagtaataaataaatagatacatatacagaagatacaaggagacaacttgcacgaggaaaagccacatggttcacaaacatatgggaaatgtttaaacctactggtattcacaaaagtgaaagcaaataacttaaaaaacctatcaaggaagagggccaaataggaacagctctggtctacagctcccagcgagattgatgcagaaggtgggtgatttctgcatttccaactgaggtacctggttcatctcactgggactggttggacagtgggtacagcccatggagagtgagccaaagctggatgaggcatcgcctcacctgggaagtgcaaggggtcatgggagatttccctttcctagccaagggaagctatgacagactgtacctggagaaatggtacactcctgaccaaatactgctcttttcccacagtcttagcaaccggcagaccaggagataccctcccatgcctggctcagtgggtcccatgaccacagagccttgcttactgctagcacagcagtctgagattgacctgcgatgctgcggcttgatgggcggatgggcgtctgcccttgctgaggcttgagtagctcacagtgtaaaccaagctgccgggaagcatgaactgggcagagcccaccacagctcagcaaggcctactacctctacagattctacctctaggggcggggcatagtagaacaaaaggcagcagacagcttctgcagacttaaacgtccctgtctgacagctctgaagagagcagtggttctctcagcatggcattcgtgctccaagaatggacagatggcctcttcaagcaggcccctgacctccgtgtagcctgactgggaaacccctcactgtaggggctgagagagtcctcaaacaggctaatacccctctgggacgaagcttccagaggaaggatcaggcagcaatatttgttgttctgcagcctctgctggtaatacccaggaaaacaggatctggagtggacctccagcaaactccaaaagacctgaagctgaagggtctgactgttagaaggaaaactaacaaacagaaaggaatagcatcaacgtcaacaaaaaggacatccacaccaaaaccccatctgtaggtcaccaacatcaaagaccaaaggtagataaaaccacaaagatggggagaaaccagagcagaaaagctgaaaattctaaaaaacagagcacctcttctcctccaaaggattgtagctcctcgccagcaagggagcaaaactggacagagaatgagtttgacgagatgacagaagcaggcttcagaagatctgtaataacaaacttctttgagtgaaaggaccatgtcctagtccatcacaaggaagctaaaaaccttgaaaaaaggtttgacgaatggctaactagaatacacagtgtagagaggaccttaaatgacctgacggagctcaaaaccatggcacaagaacttcatgatgcacgcacaagcttcaatagccaattcaatcaagtggaagaaaggatatcagtgattgaagatcacattaatgaaataaagcaagaagataaggttagagaaaaaagagtgaaaagaaatgaaaaaaggcttcaaaaaatatggactctgtgaaaagaccaaatatatgtttgactggggtaccggaaagtgacagggagaatggaaccaagttagaaaacactcttcagggtattatccggcagaacttccccaacctagcaaggcaggccaacattcaaagtcaagaaatacagagaacaccacaaagatactcctcgagaagagcaacgccaagacacataattgtcagattcaccaaggttgaaatgaaggaaaaagtgttaagggcagccagagagaaagtccgggttacccaaaaagggaagcccatcaaactaacagtggatctctctgcagaaaccctacaagccagaagagagtgggggccaatattcagcattcttaaagaaaagaatattttcaacccagaatctcatatccagccaacctaatcttcataagtgaaggagaaataaaatcctttacagacaagcaaattctgagagattttattaccaccaggcctgccttacaagagctcctgaaggaagcaataaacatggaaaggaacaagcagtacaagccactgcagaaacatactaaatggtacagatcatcgacactatgaagaaactccatcaattaacgggcaaaataaccagctaacatcataatgacaggatcaaattcaaacataacaataataaccttaaatgtaaatgggctaaatgccccagttaacagacacagactggcaaattggatagagtcaagtccaatcagtgtgctgtattcaggagacccatctcacatgcaaagatgcacataggctcaaaataaaggaatggaggaagatctaccaagaaaatggaaggcaaaaaaaagcaggggttgcaatcctagtctctgataaaacagacttaaaccaacaaagatcaaaagagacaaaggaggccattacataacggtaaagggatccatgcaacaagaagagctaactatcctaaatatatatgcacccaacacaggagcacccagattcataaaacaaattcttagagtctaccaagagacgtagactcccacacaataatagtgggagactttaacacctcaccgtcaatattagacagatcaatgagacagaaagttaacaaagatatccaggacttgatctcagctctggaccaagcggacctcatagacatctacagaactctacaccccaaatcaacagaatagacattcctctcagcaccacatcacacttattctaaaattgaccacataattggtagtaaaacactcctcagcaaatgtaaaagaacagaaattataacaaactgtctctcagaccacaacgcaatcaaactagaactcaggattaagaaactcactcaaaactgctcaactacaaggaaactgaacaacctgctcctgagtgactactgggtatataacgaaatgaaggcagaaataaagatgttctttgaaaccaacgagaacaaagacacaacataccagaatctctgggacacatttaaagcagtgtgtagagggaaatttatagcactaaatgcccataagagaaaacaggaaagatctaaaattgacaccctaacatcacaactaaaagaactagagaagcaagagaaaacacattcaaaagctagcagaaggcaagaaataactaagatcagagcaaaactgaaggagatagagacacaaaaaacccttcaaaaagtcaatgaatccaggagctggttttttgaaaagaacaacaaaattgatagactgttagcaagactaataaagaagaagagagagagaaatcaaacagacccaataaaaatgataaaggggatgtcaccactgatcccacagaaatacaaactaccatcagagaatactacaaacacctctacgcaaataaattagaaaatctagaagaaatggataaattcctggacacatacaccctcccaagactaaaccaagaagaagttgaatctccgaatagaccaataagaggttctgaaattgaggtaataattaatagcctacaaaccaaaaaaagtccaggaccagatggattcatatccaaattctaccagaggtacaaggtggagctggtaccattccttctgaaactatttcaatcaatagaaaaagagggaatcctccccagctcattttatgaggccagcatcaacctgacaccaaagcctggtagagacataacaaaaaagagaattttaggccaatatccctgatgaacattgtgcaaagatcctcaaaaaaatactggcaaaccaaatccagcagcacatcgaaaagcgtatccaccacgaccaaatcagcttcatcccagggatgcaaggctggttcaacatacataaatcaataaatgcaatccatcagataaacagaaccaaagacaaaaaccacatgattatctcaatagatgcagaaagggccttcaacaaaattcaacagcccttcatgctaaaaactctcaataactaggtattgatggaatgtacctcaaaataataagagctatttatgacaaacccacagccagtatcacactgaatgggcaaaaactggaagcgtacactttgaaaaccagcagaagacaaggatgccctctattaccactcctattcaacgtagaacactacgttggaagttctggctagggcaatcaggcaagagaaagaaataaaggatattcaaacaggaaaagaggaagtcaaattgtctctgtttgcagatgacatgattgtatatttagaaaaccccatcgtctcagcccaaaatctccttaagctgataagctacttcagcaaagtctcaggatacaaaatcaatgttcaaaaatcacaagcactcctatacaccaataatagacaaacagagagtcaaatcatgagtgaaccgccattcacaattactacaaagagaataaaatacctaggaatccaacttatgagggatgtgaaggacctcttcaaggagaactacaaaccactgctcaaggaaataaaggaggactcaaacaaatggaaaaacattccatgctcatggataggaaggatcaatatcgtgaaaattgctatactgcccaaagtaatttatagattcagtgctatccccatcaggctactactgacttttttcacagaattggaaaaagctactttaaatttcatatggaaccaaataagggccctcatagccaagacaatcctaagcaaaaagaacaaaactggaggcatcatgctacctgacttcaaactatattacaagcctacagtaactaaaacagcatggtactggtaccaaaacagatatatagagcaatggaacacaacagaggcctcagaaataacactatacatctacaaccatctgatcttagacaaacctgagaaaaccaagcaatggggaaagaattccttatttaataaatggcactgggaaaactggctagccacatgtagaaagctgaaactgaatcccttccttacaccagatataaaaattaactcaagatggattaaagacttaaatgtaagacctaacaccaaaaaagccctacaagaaaacctaggcaataccattcaggacatagcatgttgtacgtgttgacataggacaagacttcatgactaaaacaccaaaagcaatggcaacaaaagccaaaattgacaaatgggatctaattaaactaaagagcttctgcacagcaaaagaagctatcatcagagtgaataggcaacctacagaataggagaaaaactttgcaatctatccatctgacaaagggctaatatccagaatctacaaggaacttaaagaagtttacaagaagaaaacaaacaaccccatcaaaaagtgggcaaaggatatgaacagacacttctcaaaagaagacgtttatgcagccaacagacgcatgaaaaaatgcacatcatcactggccatcacagcaatgcaaatcaaaaccataatgagataccatctcacgccagttagaatggtgatcattaaaaagtcaggaaacatcagatgctggagaggatgtggaggaataggtacgtttttacactattggtgggagtgtaaattagttcaaccattgtggaagacagtgtggcgattcctcaaggatctaaaactagaaatagcatttgacccagcgatcccattactgggtatatacccaaaggattataaatcatgctgctataaagacacatgcacacgtatgtttattgcggcactgttcacaatggcaaagatttggaaccaacctaaatgcccatcaatgatagactggattaagaaaatgtggcacatatacaccatggaatactatggagccataaaaaaggatgagttcatgtcctttgcaaggacatggatgaagctggaaaccatcattctcagcaaactatcacaaggacagaaaaccaaacaccgcgtgttctcactcataggtgggagttgaacaacgagaatacgtgaacacagggcagggaacatcagacactggggcctgttgtggggtgggggtctgggggagggatagcattaggagaaatacctaatgtaaatgacgagttgatgggtgcagcaaaccaacatggcacatatatacctatgtaacaaacctgcacgttgtgcacatgtaccctagaacctaaagtataattaaaaaaaggatcaaaagcttttttaaaaaaagaaagaaatacttgtatttgtatgcagtgttaaaaaaaaacaaaaaaaaatttaggaaattatagaaatagcaaatcgaaagggagataatttggaaaaaatgcagtgaaacatactgctctggtgggagagtaaacttgtaagccattttaaaaagtaatttaaaaacatgacaataatctaaaaaatattcattttcttcattgtaatgattttctctagagaatctgtcttcaggaaaactctaaatgcatataataattatttacaaaggtatttggaaagttatgtacactaccccaaaatggaaaaccaaaatgtctcatctttaagggaaaggcttaatgacacaaatggaatattatgcaccaaataaatggtgtttacaaagataatctacaatgattattgaatagtaatgattattgaatagtaataattaaaaagaatcaagatatcgttgccacttaataaaaatctgaatagtgcaaatgttgggaaaaaacgcactgagatattgataatgcatatctttgcttgataaggtaagtagtgattttctctttcatcctatttttatcagttttccaaaatatgccttagttgattaaaagtctttccaatccaccattttctgtaaattttctaaaattactcttagctctgaagttcaatgaccctggttcagtcacctatacctcacaatgagaaagcagcaataacctcctgattggttttgcagccactattggattccttttcttatattaatagttcatatttattcagttcttactgtgtctgatgcattatataaagcattttatatacattagccaatgcattgtagtgatatcccccattttacagataaggaaattcatacttagagacattaagtagcttgctcaagctcactcagagattaaatggaggagtttcaaagccaggtttgtttgaggctggaatacaaactcttaactattctttcatgatgtctatcaacatacttctccaaattattcttgtagataagcagcctaattaatagaatgttaacagaatagaatgtccagtatatggacttccattttcataatattacctcctcaaaagcctcaaaagttccttgtttgctaacaaataacctacaaatgaatcctggcattcaaaaccttttgttttctagacctgaattctccttccaacttgattttctgctacattctagcccattctctctttcttctatctgtccatccgtctgttcagctgtcattgatctctccatggaatggcataaatgcatctaaggaagtgactacaatacatccatcctggcgttaaaaagtagaaaagaaaggatttctgatatatataatcagagagctgctgtattttaaaaataattttaaacaccctctcagagggtattctaggggtaaaaaacccttcactcgtttgaattctcgctgaatttaaagtgaatgtctacttatcatagcccaacaagataaagaaaaaaggccttttgaagtcaaagcaatactttttttttacctgtgggaaggcctattccctagatctgggaaagtttcctagaattcagccatacattttctgtgttttacattatctagagcacatgacatctgcaactgtggcaggaatgacagagtagttcaactgggcaatgaaatggagaacttggaaaacttgatcatttgacctgtatccagaattaatattgtcaattccatgttatgtactgagactcaattagcattcttctggacttgttacttacaagtgtggtctgagagccagctgtatcagcatcaccagtaaacttgttaaaatgtggaatatccagccccacctcagacctaatgaaacagaattcacagcttaacaaaatccccaggtgatttgcatacataattaagttttagaagccctgacctgggagcacgttccattattataacaactttctgaacacaagagggcagtatttcctaccccctcagagcctgtctcagatgtgaaacgaagttcactgcatagctggattaggccagtatgtgtaaggggctgaacaggcttgccattgattggctggataggaaggccagaacttccttctaggggtagaagaaccccagtaacacctatcaaactaaacagaatggctttttggctgagaaggctgggtctacatttcaggccacatttggggagacgaatggagtcattcctgggaggtgttttgctgattttgtggcttcaagtggactgtgagttggagatttcctgttgatggagacagagagatccagggctgcagtgcacaggatgaaggggaggggctaggatccattcttccccatctttggttatatctggggttgtgggaggaaaatagactcaacagtgtcagtgtagtgactaaccctcctacttttggtgttgtgtttctgcctaggggtgaagagccaaaagatagaacagaattccgaggccctgaacattcaggagggtaaaacggccaccctgacctgcaactatacaaactattccccagcatacttacagtggtaccgacaagatccaggaagaggccctgttttcttgctactcatacgtgaaaatgagaaagaaaaaaggaaagaaagactgaaggtcacctttgataccacccttaaacagagtttgtttcatatcacagcctcccagcctgcagactcagctacctacctctgtgctctagacacacagtagtgccctggcagctgcttcctgcacccaaactctgctaactctcacaatcagagctcatggctgtgctgtctcccaaaggctaatcacagctcctgacagaatgggggggtgttagttgaaagggcaattttcaaaacaaacaaacaaatgctctgaagaattcctcagagaaaggagggaggacttgcttttaaaaaatgcataaattctgcttagtttttgtgactagcctagagcagcgtgataaatttatggagttaaacacattacacttaagcattaaaacatggattcttctagatgaaaaaataatccaaacatttttgagtcccttcccaaactgaacactgaataatgatgatgatgatgataatgataaaaaattgacctttttaaaaattgttcatcttatgaatggataaccatgctatattggaaaacatgccataagtcatggcattgcagagataaatttagagcccttgtttactatgtatgtggtatcagtgagtaggtcaatatacaagtcttctttttcatttgtttcttaagagacagggtcacactctgtcacccaggctggaggctggagtgcaatagcacaatcacagctcactgcagaccacaactcctgggcttaagtgatcctcctgcctcagcctcctgagtagctggaattacaagcacacaccaccatgcctgggttgtacaactcttttaagaaagagaacttacaccttctcatgttaggcatgggttctgagttgaggacttctccgttattattgcctgaattgccatttctatcaatttctgtcatctatgtattaccttatttcttgatctatttttagattattgccaaaacagacagatcccataggtcatgcatgttcagttactaacatggcagaatctgtgggttttgactaactctgttttaggctagggctgatatttctgtctgctttgggccacatacagtcactgccaaaatgatatgatcatgaagctgtttgtgtttgagtgtaggaagaggtgcagagagaatatatgtaggataataggggaagaaaacaatacacctagaaaaacagaatttgaggacaagaagtcccttcttttaatcaccattaataaaatagaggcagctaggaataagaaaataatgggctctgagtcactggcatctgggatttgatagtcagagagaaggagagttcaatgcagagattgttaaccatagttggacatcttgaaggttcataaactccctgaaattgagaatagatggaatattattatgacataattattgtttgggaggagttttcctcccatttctggcaatgaacaagaaaagattcatataatttgaatatggataagagttatgtcagaacagggggctgagagaaggatgagggattgttcaacagctcaggccagagatgaggacagacctaagaaatgattgaatgtaggagaatttagaagggagtaaataattttctccaacaggaattggaatgtctttccctttgtaataaatggagggtataaattacaactggcagtacagcattcaaaagtatgggcgtgggagtgcaacatatcggtggaaaattctgacccagtcaatgactgggctgtgttgtcttggggaagtgtttctagatctctgagtaccaaattcctctcctgtgaaatgctagtaatagaattacctcataggattattgttaagaatacataaaagtataaaaatatatataaggcaactattgtggtggcaggtacaccagtgcactagaaattcaacagacacttgtttatagttcatttctttcaggaagttaaaactcaaattttctgctctaagcattaaatatatctttttcatgttctatttctgtagtctttttactaatcacctcaaaatctatttgaaatgatttggtatgtaaatatataaatgatctgtatttcacaaaccagagacattaacaaatattattgagtacctgctatgtgccagacactgctatatacagcagggatgcatcaatgaataaaatagacagaagttttggctctcctggagcttatattttattgaaaaaacagagtgaacaaaaaatgtgataagtaatatagtatgttagaagacagtaagtactatgggaaaagtagaccagggtaatggggatgggaaatgtggaggtggagctgtctgcagttggaattttaaatgtggggagggagtcatggtagttcttattgaataagtatgtgaagaaagtgggggaggaagtaatacagttatctaggagagcatgaaccaccttggcaaaattgtgacggtaagagaaatctgacatagctgactccattttgcttctaacctccaagctgtcctgttcattcctgggtgtaggccaagctgactttgggagaaatttagtttatagtttaaccttaaagcaaagatgataatagtccttccccaaacaaccccttccttggttgggggaccaaaactgcctttgtaaaactaacaaattagccgtaagattagaaattatgactcaggagttatgcaggcagaggtcacaacattagtaacctccccacttgctcctatggatatcaactctatcataggacctaagattggtgttcaaggtatttttcagattctaaatcctgctggaccagctggtgccacctggactggtaaactggctcaactggttttgtgatcccatccaggaactgactcagcacaagaagatatcttcaactccctgtgatgtcatccccaacccaaccaaccagcatttgtcaatcactagccccctgcccaccaaattatccataaaaacccaaatttttgggtctccaaatttttgagtgctgtgggtgggggtctggattcttgattttgggctttgagtctattcctgatgacttttggcttggtaaaaagtcttgatttagagccagctcttttacatggtttaataaaataatccacgcattattattaatgcaaagattaattattaattaataatacatattattaatgcatagattattattagtgtacttctctgtatggaaaagaagtctgatctctttagggtactgttttaactcaaccgtgggtccttcttactggaaagatttctttctttggtacaccataatttattcattgttttcataagcatcattgcagaggaaacagagatttttgttttttaggaaagctgatccaaaatttagagattatgagtttattggaggtctatgattaaaataggattaccatacaaaatattttttaaggcaaaacaatctttcattttatttgtttgcacaggtgacaccattatccacatggaaccacaaggatttatgaaaattctggcatgtcttgccagttgttccaactgaaaactatcctatgcgtggaaatttgcttctacctcagagtctaaaatttaagctaagaatcttgagtatgctgtggtaaaatagaaagaataactacatttaagtaaatatcgagcaactatttgctttccttattttcctcccaactcttctggttttaataagattttctagttatttaaattgaactatttagttgatttaagttgaaccaacccaagaaacaggaaactagttaagtcaccacttgagcaaaagagaaagacgagaattaagttaggttgacaagtgtgagaagaaaaaagagaaaaagttttgttgatctttttaacctcttaaatatctcatatttgtctattttccaccgtcaccaccacctggaggaatgcagtagcctcctaattgttatgtctgtatttactttagcttttgcatttctgatctatttaatacattagcctgccaagatattttaaaaaatgtgaatttaatcctatcatctccctgcttaaaatactcttaagccttcctgttgtgtttatcaaaggccgaaatccttaccaaaacccctccatggtttgctccctacttcttctctagttaatttttactgcaatgcccttttcattcttttatgctcccatcccataggtcagtttttatttccttgaaagtgccagatatcccttaccttggagtcttccaagataccattttccctgcctggaattttccctcattctttccgtgagatcccaattcaattgtcttttggaaaaaccttctttgacacttcacccagttttcaaatagataaaatttctttatgtaagttctcaaaacaccttcctattagctattattagatgagtttgtgttccatgaaagcaggaactatgtttatcgttttcttagcattttattactagaaaactatgacctatggctcatctagacaatggagtcactgtgtctaaaactaatactaagataaagatggtggaaggtcatgaatgttctttttctaaataaagacctgtttttgatctccacccttggacttttccagttttgttttcatagctcttcatattgccaggctgtactactttttgaggagacggtttccatgttgaattagctcccctgtgaaatgggtttctttccctttattctaacctggtcttcctaaagttctatagggaggctgtgtctaaccatcatgaaatttgatgagcctgtactctgatgattttacaggtccatcctgtgcttctcatgattttacaggttcctgtcccagctggtctatctttttattacagatgtgagtgtcttgatgtagaaatctctcttctctgctgtatgcttcctacccagcaacttttatttttattaactggaatgtgtctcactatgttgctgttttctaaatctgttaggagataagacattctgcttcagttggatgttgtttatcatgtattgtattacaataaaaacgtatgaaactttattatagtatataatgttattctggactacatgaatctatcaataaataattgttaggcatattctgtgctccaggcatcttactacatgctgttaaaatacagctcctgccttgaagcccttactggtcacacatcagaaactcttcttgttcctaaaatgacaaatcaaacaaacaagaataaaacaaacctcttttttgtatttctgtcttcacattgctatgtatttgtttcaaagaatgaaaattggtttctatctgaaactagtaattattaacatttgtttagtactgactacatgtaaagtatggggttaaaatttttacaaaacattgttaattaactttcatagcaatatctgagaagatttctttatcatgatgatgaaactattactggcactatataaaatattcataataagagccactgacttagccagcacaaaagttagatttgaaccgtgtctaccagatgcccaacgccaatatttaagcactatttactgctactagcctagagatctctgttttctgatgatgcagcttggacatgtatcattcctgtattcatttgaggaaaagaaacaaagtggaagctcaatagtaagtaagccaattattcgcagctgcctgtacctcagcacacagaagccagtcaatcagtgaaagtgttctttgatattgagttatataattactgaagagtcctgcttaaacagatgttgctgtgtaggcgctccagccatagcctggattttagtagatcctggagatacctgcaacaatagatcatggagacacctgttatgtacttaataagcatattttccaaattagaaaatggaacatatgatgtgataattgtaagtaaacacaatagacatatgcaggacactatatacagataggtatttcccagcatgtatttgtatttttaacaaacaatgttttgttgctgctgcttggcatcaatataggcaactgggcagatgttggcagtgagggggagaagggtaagtttaccagattcttcttagttggttattagaaatgaatgcactagttagtgtaaacaactttgctttcttatcatgagctgaaaaattttcactttaggaactgactagagaatgtacaacattcagaagcctgaaggtacgtaactattagttctcaggcagtcttcaaagcccatcataaatagcatttgtcatcaaatcctcccatacattataatgtgctgtagctgaatacagttactggttgaattattgatcttgctaaaaattaaactttacctatttgtatttccaagtgtcattgttactcaaataaggaagagttagtaaaaaaaagttttgacaaatggcactcaaacaatttggtatgcttacatatagaaaaataaaccattatccttatcttacattgtacaccaaaataaagtcaaaatgggtcatagatctaaaggtaaaggaaaagctgtagacctagaagaaaacattggagaagttattcacaacttttgggtaataaaaatttcataggtatgacaccaaaatcataaaccacaatgaggaaaaaatcatgtcttggacttcatcaaaattaaaaacttctgctctttcattaataaaatgaaaagacaagctttagactgggagaaatattctcatgctcttgatgcccatatctgacaaaggacttgttttcagatatctaaagaagccctacaccttaataataaaaagaaaaaaagatataagtagtcaaaagatctgaataaacagttcacaaaagaagatatgtaaatggcaaatgagtacatgaaaagatgctcacatcactggttatcagatgaatgcaaatcaaaagcatgagatacactacatactcacccaaatggtgaaaattaaaaaaacctataattctaagtattggctgggatgtggggtaacgaactctcatacttctctgtgatggttgggggacacagcagtgtatttctctgcacttattgaagccactgagagagaaatgatgaagatgggtcgaggagaggcatgtctaaccccaggactctgcttgaaatgcccagctgcttctggagccaacaggaaaatcactacacagacaagaagtggctaggggtgtggcaacacagatgtggaggttacagagaaaacattcattgtaagaaaaacacctcctgtctgagcccaaagagcgcatctaccagatgtatcatttaccagaaacatctttacctgtgaatcttgacttgaaggtgagtttaaaatcactatcaattaacaattaaggttaacaattacaacaattggctgtgtcttaattaaactaaactggctaatgaattggctaatgagactcagaaatacgtgtctgaaaataagtaaaatagctgtgaattgttggatgttcaaattcactcattcaacaaatattttgagtgtctaccatgttccagaaattgttctaaatattaatgcatctctttgtttcttaaaaataaatactgtttcacaaataatttggttataggccagtgtgttaagtcacagggctttcccccatggagacctaaatgtctgcatttgtgtcagaacaatactttccaaatgatctagttccctggagtgtgcagattacttgtgttaatggcttgtgatggtgaccccatctatcagaggtgtttgaaccagagcaactccatcttgaatgggggctgggtaaaatgaggctgagacttactgggctgcattctcagacagttaggcattctaagtcacaggaggtcagcacaagatacaggtcataaagaccttgctgataaaacagtttgaaataaagaagctggccaaaacccaccaaaaccaagatagctaagagagtgacctctggtcatcctcactgctgtgctcccaccgaaccatgacaggttagaaatgccatgacaacatcaggaagttaccctatacggtctaaaaaggggaggcatgaataatccactccttgtttagcatatactcaagaaataaccataaaaatgggccaccagcagtcctcagggctgctctgtctatggagtagccgttcttttatttctttactttcttgataaacttgctttcactttattctatggactcaccctgaattctttcttgtgcaagatccaagaaccctctcttaggggtctggatcgggacccctttctggtagcacatctgcactaaaatccgagtgtgcatcaggttagaatgaggattggaatatgtgggctatgttgtatgcagagtttaaattttactaaagactctcaaactgtgttttttttttttttttttttttttttttttttgcgactgagtctcgctgtgtcgcccaggctggagtgcatgtgcagtggggtgatctcggctcactgcaaactccgcctcccaggttcacgccattctccagcctcaggctccctagtagctgggactacaggggccacaacgcccggctattttattttttattttttagtagagatggggtttcaccgtgttagccaggatggtctcgatttcctgacctcgtgatccacccacctcggcctcccaaagtgctgggatttcaggcgtgacccaccgcccctggcctccaaactggtttttgaagtgttataactttgtgatttgactctcgagagtggtttctgagagtccctgtttcaccacttccttgacagccttggtattgtcaaacttaaattttgttcgtcaacctgataagtgtaaatgctttaatttgcatttgattactagtgaagggtatcatctttttatatacttattagtcaaatgagttccttcttttctgaattcgctgctcttctatggagctttcactattctctacatgatttatgggcatttattataggttcttgaaaataatctagtgtaacctgtcttgataaatgtcttccatatatggcttgcttcttcgttttacctatggttattttgtatgcagatagttaaaattttaatgtagtcaaattactagtcttttcttttatagtttagtgtttagtatcaaagataacaatctttcttactatgaggccttaatacagtgttttccaatgttttcttctaattattttaaatttaatttttctcatttgggtatagtaatgttgtttttgaacaaagcttgaggaaaagttatattttatctctccccacaccaataaataatactaggtattcaacagtttaatctttctcccatattggttcttccgtctgtttcccagctaattatcttccactactgaaacaagatcttcctgagaactctacctaataatccatgaattaggagtttttccagtttgactgctgggaacaggcaggattcttgttcccaagggagcaccaagtgggcagtgctccttgtaatcctcttggatgtttttttccgctggcctcaggtagttgtctcccatgcatgtgctggccagtattctgctgggtactcaagggagaccctacgcagatctctgcagttttttctcggtgcatctcttttccattgggtgccctatgatgtgaattctatctgccttgatctcccagatctgaactctgtttcaactcacagaactgaaaaagaagttaacccgagccccttccccatttattatgaaagacaggaatttttcatagaaacatttcaaagcgaatgttaaattagcattttaaaagttatattttaggcaaatttccagataaacaaactggttaagacacaattttttcacttctaattttgcatcaaaattaggttctcttttcaaaaaaattattttattttattaatttttttgagacagactctcactctgtcacccaggctagagtgcagtggcaggatttttgctcactgcaacctccacctcctgggttctggtgattcttgtgcctcagcttcccaagtggctgggattacatgcatgtgccaccacgcccagctgatttttgtatttttagtagagatgggtttcatcatgttgcccaggctggtcttgaactcctggcctcaagtgatccgcctgccttgccctcccaaactgctggaattagaggtgtgagctactgcatctgaataaaagtagattctctagtcttcccaggacgtaatggatctgattggccctgtccaatcagtgctgctgatttccttccagtctgctcttagctttgtatttacgttctccattattttctggagaaagactatccaaaagccatatctaaagaactgccttttggggagatttgtaaaagctacagtgttgctaatctaaatcaaatgtaactattttataattacacataaagtagattaaatgaattataggcaaaaggaaaattatttgattcttagtggataaatggtatgcaaaaggatttatattcttagtacacggtactattcacagatctgtactgttactataaacacagctacacatgcttatctttctgctatttagaagaaattaaagaggaaagctggaagcatcaaatctgcatgatgtttttgggggatggagtagggaggttgtggctatcatgggtgcaaagttgagttggcaagagtcaaaggggacttctagttttaattttaattgatgttttttcaaagcatgccattgatgtcattcacataatattatttaaaatgatgtggataggctgggtgtggtgagcccatgcctgtaatcccagaattttgggaggccgaagtgggcagatcacttgaggccaggagttcaagaccagcctgggcaacatagtgaaactccgtcaaccctgtctctactaaaaatacaaaaattagccaggagtactggcacacgcctataattccaggttcttgggaggctgaggcacaacaattgcttaaaccctggaggtggagattgctgtgagctgagattgcacccctggactccagcctggtggagtgacacagtgagactctgtctccaaaaaaaaaaaaaaaaaaaaagatctggataaaatcaaatggattttgattttgtcaatagtggtatgatctgggttactctctataatataatttgttatagttaaaaaaaatttgtgcttgaaatcaagatacggttgaggctggggatatgaagccacttatcttttgattaattcgaagtttacagctctatgatacaatcatatgctgttgcctaaaaatataatactgacatcttaaatgtaagttttcctccaagatatttctttctcacactgcattcttgactgagtgactaaggtttgtcatcacattctcttacctctctctaaggattctgccatatttgctcccagcacccatgtatctgatcctgatggcagtggtggcctgtctggagcagctgttgcggggatgcccgctgcagtgggggaggtgcggccagggctttgcactctacagagctgaagggagccgggaacaggcaggaattccctgcctcctaccgagttggtagacggggagcgctgtgctcctgggtgcaactgcagctgcccagctgtggctccagacccaggaatccttgtgcttttgggggcctgggaagcctccctgcccccacaggctcagaagtgcctgctcccattccctggcctctcctcactcctggcacccactccgagtttggagcaaagttgtggccgagtctgggtgctgtcgcaacccggccggttgtacacgtgctcggagaagtactgtcacaccagccccttactgctgccttggccccctctggactttgggtactgttgaacatgggaaggaggcttggagtaggggccaagggaaggttggtgtgggcctacaggcacacctctgcgatggcctgaagcctgggggctgggctgccagttctgggtggagtccaccgcccagagtgggaacttaccgtgctttttctgggtccacacatggaccaatcagcacacacttttgaacccataaaaataggtttcgaacccataaaatgtcttttgaaaaatgtcttttgaacccataaaaaatgtcttttgaacccataaaaatcttgaactcggccagattcacacagatgtcgggactatcaactgcagaaaggagctacccactttgggtctccctgacttgtcaggacaacctgcctgtggaaaggagctacccatttcaggtctcctgagcgctgttctgtcactcaatgaagctcctctctgccttactcaccctccatttgtccacgtatctcattcttcctggacgtgggataagacctcgggacctgctgaatgatgggactgaaagaactgtaacgcaaacagggctgaacaccaccccaaccccaacatcgcaccccctatgctcaccacgttgtgggaaatgaggagagagctgtggccctttaaggagcccagacctgggagctccctgagccagggctgtgacacccagtttggggctctgcagttccaggcatctccaagcttctgggtgccactgcattccctggtgcccattgtggaagctgcttgtggtatgcctggtccagcttcagcctggcagggagccagggcctgtgctggcacctggagctgcccaccccaccacagccggcatacctggctttgcgcaatggccggacccttcactaactcacatacccctttccactccgtgcctggcttacccttggcagctgtggtatctgggccagtagcatgagctgaatgtagcctgctgggctgagtaggtggaacgagcccagtgggcccaagcaaaacttgggcaaagatgccactggacacagaggtttcgagctggaaaagtgacaccctaagtgtcctgtgacaatcctacagaaaagttgtattgctttctagagtacatttccaaatacgtattcctaacattcactttgatatggctacgggaggccttgcattgtgtgttattttctttttcttttttttttttttttaagatggagtttcgctctgtcatccaggatggagtgcagtggcacgatctcagcttactgcaaccttcgcctcccgggttcaagcaattctcctgcctcagcctcctgagtagctgggactacaggtgcatgctgccatacccagctaagtgttgtatttttagtagagacggggtttcgctatgttggcctggcttgtcttgaacttctgacctcatgatccacctgcctcggcctcccaaagtgctgggattacaggcatgagccaccacgtctggccactgtgtgttatttggaacctccgtgtacctatgttagctttccttggctttatcagttgagattgttgcattttgaagagaacatatatccagttcttctgttttgcccatctgctccataatcactggtgatagttttgctctgagatagatcaggcctcaatgaacagattaataaaagaaaaacacaggagaaagtcatgataatcacattatagaggcttataaaataagaacaattcctccaatttagaagttggaggaatttttgcacgtggtgttagcagatgtgcacagcgttaacatttctttaataattttgcttatagccacaaggtgacaggggttctctttcatttgtaaactatgtctttcttatacctaggaagtatgtttacgttagaagagcatattgctgattggttgacagacagacaggctgtttcatttattagattaaaagaaacaaacaataaaagctttgtttggctacataattttatgcagcatttttggtatcaagacaaagtatcaggatggagaagatgcggagacctgtcctaattatattttgtctatgtcttggctgtaagttgagggttctaagaactggggaccccaggagacatttattcaagtccttttggggagatggggatgtagtctggacttacttgtcattgcttgtttgagattaagaaataaaattatgaaaggtctaaattaaaatgtacatattgtacctgatgtctttctgaataggggcaaatggagaaaaccaggtggagcacagccctcattttctgggaccccagcagggagacgttgcctccatgagctgcacgtactctgtcagtcgttttaacaatttgcagtggtacaggcaaaatacagggatgggtcccaaacacctattatccatgtattcagctggatatgagaagcagaaaggaagactaaatgctacattactgaagaatggaagcagcttgtacattacagccgtgcagcctgaagattcagccacctatttctgtgctgtagatgcacagtactccctaggcacctgcaacctgtatccaaacatgcagctgggtagaagtaccataacagaagcatcagcaataggggccctgagcctgagtagacgtgaagaactaaggcatgagtatgaccagagaggggaggagataaagggtgctgttcatttgactcatgtatcttttatcaggccacccttcacaaagaccgtctttgtgccttatttgaattgatcaatcctgacccttcctatcttcagcagaatcctttagtgcccaggtcagtcttctagcatagagagcacttgttctcttctcaggcctggtggaaacacatgtcaaagaaatttgaagactgttgtttttctactgtaaaatctgacaaaggaactacaatggttggaatcatatgtgaaaaatgctgtagcagtggttttcatttactcacccactgaacaagtatctctcagctcctgatatgtgccaggtactctttagtcattgggatgcattggtattgaacatagcagataagccatcatagagctcatgtttcctaagtttctgggatacacaaaggggaaaccaagtctgcctaggatttagaggttcccgagaaattgcagcaagagtttagtttcatcttcatcaatcatttttctcatggaaacatggttaaagattggggacagctgaatgctgcttgaatctgtgggtcaagaattggcttcacatgttgaggtattgtctgccagagttgaggagaaatgccaggtggttttcggtatcatctggccatttccaaacaagtctggaaagtgaagtgctacaggctgtcataaataaaacaaatctataaagcctgaccctttatttaatggaattgtggagttcaaataaaatatcaaatacgatgctattgatgaatagcactaaacattggacattattttaaataatttgtagagtagctttctgttactgtagattctagatgctcttttggggacccagctcaggacaggctaagtggaatttgtgaaaccatcagaaaggagaaaggagaagctcagtccactgagccaatgctgtaggagttctttatatccagaatacataacgaatggctccaactttatagtgccaattaaaaatatgtaaaagacttgaacaggcattttacaaggaagataaaggaatagccaataaacacatggaaatttgttctatgtcttaagtcataaaagaaatgtaaattaaaaccacgatgaaatattactttatacctatgtctaaaattaaaaagactgacaacatcaaaccctaggtttccagtggccttgctgtcctgaacaggtgcaaacagcccagagctggggaagtctacaggccctgaatatccaggaggaatagccattgccataaattgaaatgaatatgattctgggatcttgttaaaagtatacattaacttagggtaaaatatatgaattaacttagataaaatgacggcagtattatggcaagtcttcctatccaaaagtgtggtaggtttttaattcttttgtgatctccaggagagttgcaatatatccagaatatagaaagaacgactacaactttatagtaacgataaaaaacatgcaaaagacttgaatacgcattttacaaggaagacaaaggaacagtcaataaacaaatggaagtttgttctatgtcttaagtcataaaagaaatgtggccacgcatggtggctcatgcctgtaatcccagcactttgggaggccaaggcgggcagatcatgtggtcaagagattgagaccatcctggccaacatggtgaaaccctgtctctactgaaaatacaaaaatcagttaggtgtggtggcgcacacctgtagtcccagctactcaggaggctaaggcaggagaatcacttgaacctgggaggcggaggttgcagtgagccgagattgcgccactgcactccagcctggtgatagagtgagactccatctcaaaaaaaaaaaaaaaagtaaattaaatgagatatcacttcatactcatggctaaaattaaaaagactgacaacaccaaattttggtgagaatgtagagtccctagaacatgccttactcatataggtttaaatggatacagccacattggaaaatactcaccctatgatccagcaagtatcttttgaggcatttacccaagggaaatgtaaaaaaaaaaaatccactttcctgtacaggaatatttatagaagctttattcataatagttccaagttggaaacaactcgaatgttcatcaataagaaaatggagcaccaaattgtaatttattcatactcagcagtaaaaaatagactactgacatataccacattgtaaacgaatttaaaaattttagttgattgaaataagacaaacatggagcaataaaaagtgtatggttctttaaatataaagttcaagaacatgtaaaactaatatatgtgaatagaaattttaaaaagtgcttgtctgtgcagggtggagatccagtagaaggtggtgtagcattttctggggggtaatgaaagtgttctattactctattggggtgttgatttcaagagtatatacatttgtcaaaacttcagtgtacatttgagatcagtgcatttccctgtgtgtaaactctacctcaataaaaattatttaactaaaaaaccttattttgcaaggatttaaaacaatcaataaattgtatccttacattagcaatgaataagtaaaaaattagcaatgagaggcacacactcattcaataactgttttggatagacagcaaagtcactgacagtggcttttctttttgattcctgggatccttcagagactccatctctttgatgctgcagaaaactggggtcactggtggcaggtttcttgtggtaggtagatttcccatgagcacctgttttgatctgtgtttccctgcccttccaatggttgagaagcttctgatgctgtatgttaaatgccaagagagaattcagtttccctgactttaccctatttaatctaaatccttggattacaattgttgggtgctagaaatcagatgttcctaataaagcccactgttacttgggaaaataagcaatttgtgtccttgatcatatgattctgacatatttcactcaaacctactggtataattcctaagatatattctctacataaactcatagagaagaacaggatttcccccacagaaagagacagtgtggacatcaaaggaaactatgttaactcaaaaaggtgaagccgttatgaaaatagagtctcttcaccttataggtgtgctgttcatataagctaaacagattacagacaaaggtccaaggaacaggggaagagggacacactggttctgaccttcatgaagataaggcacaaaggaggagggagaaggaaaagagtctcgatgcttcgacctaaacaaatccaggagagtggattctgaaggaaatatactactttcttgtctaaggataaaactttacatggcttttcagagcaatgatctctctctctctctcttcagcatttaccatttttttaaaattttattttattattattatactttaagttttagggtttgttatgtatgtatacatgtgccatgttggtgtgctgcacccattaactcgtcatttagcattaggtatatctcctaatgctatccctccctcctccccccactccacaacagtccctggagtgtgatgttccccttcctgtgtccatgtgttctcattgttcaattcccacctatgagtgagaacatgcagtgtttggttttttgcccttgcgatagtttgctgagaatgatggtttccagtttcatccatgtccctacaaaggatatgaacttatcattttttatggctgcatagtattccatttttttcataagcacaaaaggcaagaagaaggaactaaatagtgtttatttattttaccatgagctgagagtttagcagcttgggagcatttttccacaatgccagaaccttgtctttgaatctttgatgctcctctagctcactgttccaaaatggcattttaaaaaccattgctgatactgcctaaagcaatttacagattcaatgctactcctctcaatctaccaaagacattcctcagagaattagaaaaaacaattttaaaactcatacggtgctgggcatggtggcttatgcctgtaatcccagcactttgggaggctgaggctggcagatcacctgaggtcaggagttcgagaccagcctggccaacatggtgaaaccccattgctactaaaattacaaaaattagccaggtgtgccagtggggtcctgtaatcccagctactcgggaggctgaggcaggagaatcgcttgaacccaggaggcggaggttgcagtgagccgaggtcatgccattgcactcctgcctgggtgacaaagtgaaactccattaaaaaaaaaaaactcatatggaaccaaaaatagagcccaaatagccaaggcagtcctaagccccaaaataatgccacatatctacaatcatctgatctttgacaaaatcgacaaaaataagcaatggggaaagtactgcctgttcaataaatggtgttgggataactgattagccatatgaagaagattgaaactagaccccttccttatgccatgcacaaaaatcaactcaagatggattaaagacttaaatgcaaaatttaaaactataaaaactctgaaagataacctagaaaataccattctggacataggacctggcaaatatttcatcacaaagacaccaaaagcatttgcaacaaaaacaaaaaattgacaaaatggatctaattaaactaaagagcctcttcacagcaaaagaaactatcaacagaataaacagacaacttacaaaatggaataaaatttttgcaaactaggcatccaaccaatgtctaatatccagaacctataaggaacttaaacaaatttataagcaaaaaacaagaaaccccattgaaaggcgggcaaagggtacaaacagacacttctcaaaagaagacatacatacaagtggccaacaaggatatgaaaaaatgttcaacatcactaatcattagagaaatgcaaatcaaaatcacagtgagatgccatctcacaccagtcagaatggcaactatgaaaaagtaaaaaaatgacagatgctggtgaggttgtggagaaaagattatgccctgctggtgggaatgtatattggttcagccatcgtgaaaagtgatgtgatgattcctcaaagaacttaaaacagaattaccatttgagtcagcaattttgttattgggtatatgcccaaaggaatataaattgttctatcataaaaacacatgcatgaatatgttaattgcattactattcataatagcaaagacatggaatcaacctaaatgtccatcaatgatagactggataaagaaaatgtggtacatatccactatggaatactatgtagccataaaaaagaatgagatcgtgtcttttgcagcaatgtgggtggagctggaggccattatcctaagcaaactaaggcaggaacagaaaaaataaataccacatgctctcacttacaagttggagctaaacaacaagaaaacacagacaaataagaggtggacaacagacactaggaattacttgaggctggatggtgggagaagggagaggatcaaaaaactatcttttgggtactatgcctatgatatggtttggctgtgtccccaaccaaatctcatcttgattttagctcccataattcccactgtgtcatgggaggaacttggtgggaggtaattgactaatgaaaagtgtgggtttttcctgtgctattcttgtaacagtgatacgaacaggaggcagggaaatactgggtagaagaagatggttccctggtaaaggccccaccctctagactggaaatcgtggccctaaatgagaacagttatctctgttttttcaccgaaatgttgccttttgggcccaacctgcccccctatcctgtgccccatataaacctcagacgtcagctggtaaagggacaagcagctgaacattgagaggagaagaagcaactgagtgtcggagactatggatagacatggcttaacttcagacggcatgacttcagaggggagcctggccagagatggctgggcttcagggaaaaagatcaccttcttcccacacccatctcctttccagctccccttccactgagcgccacttccattgcttaataaaatcctccacattcatcacctttcaaaccattagagtgacctgattcttcctcgacgccggacgagaattcgagatgcactaggtgcaggaacccaaaaaggctgtcactctgactcttcactgagatgtttaacacttaagctgtccgaagatggcaaagctaaaagagcattaactgtaacaaacccctaaatgctgccgtggggccagagcccaaaagcactcacctcagccctggcacccacttgcctacgtgctcatttctgtgaggggttcagcacagcaggtttgagcaagcgaagttcatccctgcaggcgctgaagtggctggctggacccagagctggtgcactccagttcctgcccaccaaagggtcaagggaactatcccatctcagtagcgaataagtctcacgagatctgatggcttcataaaggagaattcccctgcacagactcttttgcctgccaccacgtaagatgggactttgctcctcctttgccttctgccatggttgtgagggctccctagtcacgtggtactgtgagttcattaaacctctttttctttataaatcactcagtcttgagtatgtctttattagcagcacgaaaacggactaatatagctcatcaccttggtgacgaaacaatctgcacaccaaattctgagacatgcagtttacctatatagcaaatctgcacatatacccctgaaactcaaataaaagttttaaaaagtcatgactacaacataaatcacctgagggaactttttaaaaacacagcttccccaggacagtctcatagaggttatgtcagtatgaataaggtggatcacagaatctgcatttttactatgctcccttgctgattgtgatgcaaagctaggttcaagaacccatgctgtaagatgcttctgaacatcagctaccatgtctccatgtggtagaagagtgtttgaacttgctttccagtctttggaagcaaatcaacatcacctatatgtttaatcccctatgtgaaaataatttatgtatgtacatgtttttatatgccatctatactaaatgctatctaccaatcatctatctatctaccaatcatctatctatctattatctatctatctatcatctatctatctatctatctatctatctatctatctatctatctatcacctatctatccatcctattggttctgtttctctggagaaccctgactaatacagacagtgtcctgggaataaaataagcctctgaataaatagcaacaggtgttcttcagatttgaaaatggtcacctggcagctgaatgtgacttgaaaatgaggtccaaggtaagcatgtggcactatctttcaggagaaaacgttccttgcagtgtagtcccttgcctgtgagggggcacagcttctgaaaacaaatacatctcctgctaaaatcttaggttcatgttcagcattttattgagatgacaatattttttatgctatgcagttaagaattgaggatgccagaggttttaaagatggaattttcaccaggtccagcgattacaacactcgtaatgtttggtaagtttggggaaaataatatgcctgttaaaatttggatttttaaaatttgttatgtcagtataataaccacaattttgtccaattcaaactcagggtgatatgcagctttttatttctgaggaggaagcagtggagactcagggacctggatagaaagttagtggccttctcagaaggagctctccctattgtaaactgttcctatgccaccatggtgaacctacccttttctggttatgttcaatatcctggtgaaagtctgcagctcctcttgagaactgcaaaggaaaatgagaatggaagcaacaaagactttgaagtcacatatcacgaagaaaaaaaaaacacctttcagtgggagaaactttgagcttaagtgtcagatgtggctgcttagtgctgtgctgtgagccagacacaccgagtggggctgcaggcgagctgagacaaggttcagtggcccaggcaggaccttgctgctgaggagctgctgcatgactcttgctggtttaaggaaaacctactgtggtttgaccttcagacactctagcagatgtaaagatcacctacatcgactctaaggacacagcagaagaacgggaagtgaatatggcctgagcataactctccttgtagaaagaagaaacagggtctgacatccttttccagagatcagtgaagtaagctctgtcttcttcttactaagttcagccctgtggctttgaccaagggcacctaaagaaatagtgatgtatagtatattgttttctctttagagatgcaacatgaaatatgtaaggttgcatctgcataatgtctccctggaagagggagggttatttcctagagcacataaggaagaaccccaacgcaactagttgttaaaaaaggagaaaatagaagggaagaaggaggaaaaagagagtaccacatgtaaacaaagaatggactgagagtgacatttgtcatagtttgttttgttacaaatcaaatagcagacatgaaatggtgccctcagaaaagtgaaaacaagcacataatttgtttgtggctcaagaagacatgaagaagtggctcacgtccaaatcctacacacattccttttccccttctctccttctcactatatattggttagttggcttcgtaaagcaaatcctgaattgagacagatgggtggtgccgtagagcctgatgaaggagaacactcaagctcaaattcttcatggcagtatagctcagggatggtggatgggggaaatgctatagcttcctcaactccttgtgagcctttccttctcctcaaggagaaagaagtttaaggtagccatgtgggtaggggaagaaaatggaggagaaagagtacgactctctgaattgcattgcagatatacctgaggtctctgtaaatattggagtaacttttcttgtctagtacaggcatttaatgaatattcattttgatccataaaaatgaattttattttcaaggagaatggtgcttgttaagacaggaggatgatagagccattcaaggtgtctcaatagctcagggactgaagtgaagcaactgtaaaagtccctaaaaatgttattatcagcgaagggtccttatcctcaatcttccccttttctctgtttcccttcctaagttttttctaacattttcttttatcactgaccctctctctgagtcttatgaatgagctgaagtaataacccctctctaattttattttctaccttttttttttttttaccagttctgccttcttagtttacatttttaaaattctcttttaataaaatattacatgtgcatgggtaaatgcaaaacttgaaagagagaaaaactgtacaattttaaaaagttccagatttttggttgaacatggttgattaaatattcatgtttattctctgctccctcctgaggccctagtgaaatgctaataaagaagttcaaagcctgtatgaacatacaaacacaaagtgaactgaaaagatggtgacagcacaagagagatcaacataacgttgaaggcgttgaaagcaaatggagaggtgacaaactggtttaaccaagagagaaaacctgtgcctgtagaggggaaagctgagagacagcagtcctgtgcattctgcagcattctggaaatgctcaagaattagaagcatcaattttgatggggaaaaaggcatcaggtgtggagggtagatgggaaagaaataggaagattaatggaaagactagcctcaagaaggagcagttggaacccagtgtaaccctcctatgtcctttgccacactgtaccacaggctgcaagctacctcaaatctggtggaagattaaaggttgaatctgattattttgaactagacagtctctggattagagaatactagagatatctgaggatgaaatgaggtgccataggcaaaacagggggattaagtgaaattctatatttctagtgttaagtccatcagctcctgtgcccaattcagtttaaaattctagttttccaaataaattttcatcagaatctaatatttgttgatgctgatgagaaatctaattccagtgggttaccccaattggagatttttttacttttatctccatacacatctggaattttttcccaacttatccttggtgttctagttttgctagaatacgtttaagtgtaagtctttttaattcagtgataatcacactttgcgggctattttcatctgaatatgcaatgtccttcagttgtgggaaaatttgttctatcacttctttagtaaatctctctcttctggttcttttttctaggacaaatattatttgcttgttttatctccaagattgattttctatgtagtagtatatttcagtgcatttttgactctttttcttctgtgtcctgagagattttctcaattttgtttttcagactatctgctgatttttataaagttttggcaacaatagtttagtttttaaagagctctttgtggttgttgaatttttgttgttgattcttttaggttacatgtaactagatatttttgaacgttctcttttattcttagaattttgtttccctttgcatcagggtttctgattcttttcttgatatttatatttgttgctttatactgaggcctagtcctccctgctgtcccttcatattataagaaggaaggactatacagctacaggtatttcctgtgtcattgtttatgtaggtctgttttccaataggtttccttgaagatgtgatttagctaaggaccttgagataggaaaattagcctggatcatccaggtggactcagtctaatcacatgggtttttaaaattggagaaacattccctgctgtggtcagagggagacgtgactatggttgaatgatcaaagagatgaaacattgctggctttgaagatggagggaggggttgcagaccaagaaatatgtgcagcctctagaagttggaaaacagactcactcctagaggcttcagaaagttataatgctgataacttgattttaactcaaaagagactcatgttgaacttctaacccacagagctgtaaaaataactttgtcttgttaagacatcaagtttgtgataacttgttatagcaaccgtatgtcaatttgcagctttttatttagaatatgtgaacaagggtttgatgctgctttcaacctcctcactcttgaacccctcaaactcctccccactctccaccagtgcaccaatgccagattgaagggttactcattacaatttatattgtagtctctcatatttgtgtttttttccccatgacttccacttctgtagttaagtcatcatctcctttacatttttattcttttatcagtgggaattttggaaagataggcagtgagcaggtatggtcatctgatatctggaattagaagcattattcatggacttcttataagtgagagacaatctacaggcaaaaagaagcaaggcaatgagaatcccaaggacagatttgatttcctgttgctagaaacaatcacagtcccagaaaagatgctttctaactttagaaaaaggtccctattgccctgaggaaaggcagcgtgtttctctcttctcattttccctaaaattgatctcctggtgtgacagttacttgtttagccccagggtctacaggctgaagtgggagggaagaaaaggcctctttcagaagaacaggcttctttcagaaggacagccttgctattgccacaatcaacactaccttgttttacaagacttgactcatttatgtaaaactactggttgcctatctatgtcagatttcatgatcaaacagctcacatatctttttttcttttagatgtttttcttagctctggtctgctggtggtactccttcttggattccagggtaaatgcaaatgtatttttactctgtccctagttccttcagaaattatttatattttactttgcaatgccttcatcaatcctctcagttttttctgtagatactaaagtctatcaatgatgtcttgatgatgtagtacccagaattgggtgtaatactctggttatgttcccagcaaatagcaatgttattttactctcttatctgaatatcatattataatttttgttgatctaaagccactgtatctttgtaattctgcttgaagaagacaaagataatcctactttcttttcctagatgagggctcatgttctaggtgtcaggcctctgagcctaagctaagccatcataacccctgtgacctgcacgtatacatccagatggcctggagcaactgaagcaccacaaaagaagtgaaatagtcagttcctgccttaactgatgacattccactatagtgatttgttcctgccccaccctaactgatcaattgaacttgtgacattccttctcctggacaatgagtctcaggagttccccaccagaacaccttgtgacccccgcccctgcccgcaagagaaaaccccctttaactgtaattttccactacctacccaaatcctataaaactgccccaccccatctccctttgctgactcctttttaggacttagtctgcctgcacccaggtgattaaaaagctttattgctcacacaaaacctgtttggtggtctcttcacagatgcgcataacactagacttttattttgtacatctgatcttatttttaattttaccaaagtaggtatctccacatcctaccgcaacctcctctcaacctgatgctcactgcaacaagaccatttaaagctcagtcagaagagttgatctaactatttttgcttaaaggatgtctccacagcttttatacaaagatactgagggactccaaaatctgctagattcattgtgagatctttttctctgtaaattcctcctctcttttacagtcctcatttttcattgaggctaggattaatgtaatatactacagagggcaacacagtacagattagggaagaaagaaatgttcactggaagtttttgacatgtctccaaacaaggaaagcacaggttcacttcttgtggggagtctgtatcctcagtcctgaatctggcctccagagggtgacgttgcacaagggacagatggctgtttccaatgatgatcaacaaacactttctgctcagccccttcttcctgcagctggcttactgaagcaccgtcactggagttctttgaagatgggacaaatggagagaatcaaagattgaaaagcacttaagattatctcagcagattttgtattcttaccaaaacaagagacttgcctagcccaaccttcctcacgctcgctattctcaagacctgggttccagccactttcctactggccccgaggagaatttccaaagagacgcctgcagtgtttccacagctcagccatgctcctgttgctcataccagtgctggggatgatttttgccctgagtgagtaacattctattatggtctctagttccacagaagtaactgttttctgattcaaatcttagtagaaatacttttcatagacaagtctgcactattttcactgatacaacattgattttttcaggagatgccagagcccagtctgtgagccagcataaccaccacgtaattctctctgaagcagcctcactggagttgggatgcaactattcctatggtggaactgttaatctcttctggtatgtccagtaccctggtcaacaccttcagcttctcctcaagtacttttcaggggatccactggttaaaggcatcaagggctttgaggctgaatttataaagagtaaattctcctttaatctgaggaaaccctctgtgcagtggagtgacacagctgagtacttctgtgccgtgaatgccacagtgtctgggactgcaaagggagctgaacacaaacttcctaaggtgctagggagaataactgcctctgaaagattttggattctgtcacagtagaaaccatgatgttagtatttttaaaaaaatttatttttaatttttatggatacatagtaggtgaatatgtttatggagtacatgagatattttgatacaggcattcaatgcataacaatgacatcacgtaaaatggggtatccatcccctgaaacatttatcctttgtgttacaaacaacccaattatacacttttagttatttaaaaatgtacaattaaattattattgactgtagctaccctgttgtgctatcaaatactaggtcttatttattctttctatttttttgtacctgttaaacatccctcctctccccgaccctcccactatcgttcccagcctctggaaaccatccttatcttctactctctatcactatgagttcgattgttttgatttttaaatcccacagataagtgagaacatgcaatgtttgtctttcttgcctggcttatttcacttagtgtaatgatctccagttccatccatgctgttgctctaacccaaaagcatgtgagacgggtctcaatcaatttagaaagtttatttcccaaggttaacaacatatctgtgacacagcctcaggaggtcctgacaacatgtgcccaaggtagctggggaacaggttgcttatatacagtttagggaaacataatacatcaatcaatacatgtaagatttacagtggtttgatctggaatggcagtacaacttgaaggggagcttccagatcataggtagattaaaaaattttctgattggcaattgtttatcaatagaaagcaatatctggggtataataaggggttgtggaggccaaagttttatcatacagatgaagcctccacatagcaggcttcagagagaatagattgtaaatgtttttatcagactgaaaatatgtgttgatgttaatgccagtcagcccttaaattccaaaagggaaatccaaaagggaggggggtataaatgaggcatgtccaatcaccccttcccattgtggcccgaactattttttcaggttaacttcggaatgcccttggctgagagaaggggtccattcagatggttggaggcctgagaattttgtttttggtttatattacaaatgacaggatctcattcttttttgaagccatgatgttcttattccacagtacagagatgctcagggacttgccaggtgagtgtgaagttgctatattttaaatggttgagtatggaaattgtgacatggcacagagttttgcttttcattcaccattttatctttcaatatccagaacaaaaggtgaacttccttttgtaagcatatcttcttgcatacttactgttctttcaacttggtaattttaaagtagtttccctggagtcagcactctgtgctgattattttctctcctttttaagtgcttcatttaggaaggaggagatttattaggatgctggatggcttagaacaatggcatgctcatgtacagtctagtaaccttgtcaggaaaactgaagaaaggagagtgaataactcaaattccttagtagtttttacagaactattttttttttgagacagagttttgctctcgttgctgaggctggagtgcaatggtgcgatcgtggctcactgcaacctccgcctcccaggttcaagcgattctcctgcctcagcctcccaagtagctgcaattacagtcatgtgccaccttgcctggctatttttttgtatttttaatagagaaggggtttctccatgttggtcaggatggtctcaaattcctgacctcaggtgatccacccgccttggcttcccaaagtgttgggattacaggcataagccaccgcgcctggccgtaaagaactattaaggaggaacaaaatgctaggtctacttggaaagtcctatttattttttgtttttcccacttataaagaccaattcttattcttttgattcttaaattctgcaaatccacattataaatcttcaaaattgatgaaatagtaacttttgccaattcttccaaatgatgttattttagtttttactcttattccagtttcatatggttgtacagttggaatattagaaacgaattcttatctgtttaacactgccataattaagtgtgtgcaaaatttagcaatgtctggcccctgaagacattctaattaagtattgtaatgggaataaaaaggtcgaagggcatgtgatagatatatgacttctcctggttaggaagaaaaaaaatgtacaaacactttttaagcttcttacttgaagcctttaaggttaataatgacttgaagaaacgtaaagagaaagaggaggaggagggttgggcttttttgttgtgtacctcctgatgctgtcatgagtaagaggaataggaatttgaagatatagataataatagtggattgtttccagtgatttacctaagccaaaggggacaccagtagggatcagcattatttttcaggtcatagtgttatggctatttgtggtatatacctttgggggatttctggaaatgaagtaagatatataaaattattgataagaaatatatacttatttaaagtcttgttcttcagattatattctctactgtccccaagagactgatgatcttcataagacttaaaaacacagctaagtcctgtgttccagaatgactgcaagcaggtactttatacactacatatgagaaggacaaatggcaatttctttcaattccaaactgaagctcagtaccgaggaaatataactgctggcaccaagaacctcaagcacctggaaatgcattttctgctctcacaccaacaaccttgtttgagatgtcagagtagttctattgatatgattgttttataaatgtaaataactttatataatatagatattaaggagaaggtagaaatatttaacttctaacacaattatatttgccatatgaggagactgtaacattttaaacaatattatattatttctatctcttgatatcaataaatacataaatgtaaagtttcaaattttaaaaaataaataaaacattacagacaaaattgccatctcttttatttttttcctcagttttaatgccttcatccctctctcaaaataaacctattatgaacttttttctcaactccatgttttcatatttccaaacatagattttttaaacaatctgtggtgctgtgttttgtgtttttaaaatttacatgaatgtaatccaattgtatgtgtaattgtgaaacttgatttcttccctcaaatatttttcagatatagaaaaatttatatatgtagtatatttcatttcttttagctgatacatactattccattttatggatatactatatgtcccttttgatgcacattggattgtacatttacaaagctcaataggccacgtaagtattggtttccctcataccctgagtgttttcaagaggagtcctttcagctgtctatacagttcacagattactctttttgcaatgcctccctcccctcctcccacgtcaagtgctaaggtgcgagggaataagaccgaacaggccatccagacttagaaaccccataccccaaatagaaaccggtatctcctgtaacagttataaaagtcactgctccagaactatgacatcttaaaaagtattcacagtccattcacagttcagatgcagtttatcagtcaggatcatttttaccataaccatcttacttggtaatccagctgacgttctacctttattggatttccagaaaaatagagattagaaagttaatctaatttttttcatgtggaaggagaaaagattttgttaatcctttattcaatgagtgtttctgatcttttattataaaaattctacaaggaatacaattatgtttccttatacatagatatagaatgttttatgttatacacctggaagtggcatttgctgggttatatgattcacatctttaacaacgtacttgcaattgccgaattgctcttgaaatattcttacctatttttccctcattagtagcacagaagaattcctgtctctttacacccttgcaaacacttattatttcttatataacatcctgccctctctatctgtgtttcctgcatttctcaagtaaagtacgtatagtcattttttcaagatttgcttctggaagaacccaatataagagatctggtacagaagtggtcatagagaacaaatacatagaatgagattttggaattaaattattcatggccagaagggaacaaggatcccattattagcagtaggtgcagtggtaatagagatgctaaaagatcatagcatcacaattattaattgtggtgaattggcatgggattcatgtgtaagttgttgcagtagcttatgtgatatacttagcatttgagaagtattgtgataatggtaattttatgtgctatggagctggctatttattgtcaagtgccatcagggaagagcaataacaaaatggaaccagctaagaccactgcatatttcaacatctgtattcaatggtgatctttggaagacaatggctgctgcttcccatctgcctttcaaatcttgtgtaaatgctcttttgtattcagaaggggattctgggcactgtattttccagtgcagctacatcaacaatagaacaatccaacatagaaagccaagagccaagttcactggtgtgctacttagttcaccagtgtgctatgttgcacattgtcaactgggcttctttctcgtcccctttaatatattcccttgctttgctagggaagaaacccaaactacaattcacacaatccctttcattcacttagttttaattctacaaatgagaggcatttgggaataatatcaggcaagtagaaaagaaagagaaaccattattcttctgtagggactgtatgcaggcagctcagattaccagctgtgaggactttgtttgacttctgcgtttcttcctaagaatcactcattttggtgtcacaggcagctggatgatgcatcacacctcaaaatttcctgtaatcagtctttctcatctttgttcattagcccctccaatggttgtatgtctaattttgtgtattaaatcttactttttaaaagagttttaaaaataacttttactttagaaagttaatatgtgcattatagaaagctgagaaacacaataagcaaagaacaaagtcattcaccatcacaagcactttatagtttgatgtgtccttctgggtcctgtgtatgtatatagacaacatccaattttatgtgtgattgagatcatacagtatatatgatgttttttcacacatcatgaatatttaccagttcaaaatcccaaggctatatgagcattttgataacaaggaatataccacatcaactcaatctgttagaaaaaaagtaatcctgcctttcttggggacaaaaatttcaaagaagacaaaaatggaaacaggcctctaggttaaaagtaccgtcagagttacaattaaaataccacattccctttaatggtcaatttaaaaagagatgtaaagcaacagagtatactaagtataatgtttctaagagaattctttttctgatctgtactattaaatattagcaagaaggtatgttttcattgcattacttagtgtattcctatagtacagccaaaagagatgcacatacatcaatagctattatcaaaatgtaaatataaacatatctgcttacacctgtccctttatacttccttctgcccttcagctgccaatctactgaacacatcctgatacatacactgctcagaggtggtttaacaacaattccatgtccaaggtgcagcttttctatcaagcataaaaaatacatttacaaagtagctaatccaccagctctactttttctcatacgttgtcacctcagggcatctataaagcttagatgttgcaaaataaagactgaactttatccacaataaacacaggcaggttacagaaaatgcatatataaatctatggttaaatccaaaaaagtcacctaagtatggagatattagcaaagaggccttccctccatccttcctcttctttcaccattctagtgactaagtacctgattacatccagctccaaaagaaggattaacaaaggtcactgccagtagataggccttcttaaaaatgaacaaaaggacttttagaaaggcgttattttactacctctacctttaacatactttgggcattaggacttgtttatcttttaatacacagcaatattaacaaaaacacatacagggccgggtgcggtggctcacgcctgtaatcccagcactttgggaggccgaggcaggcggatcacaaggtcaggagattgagaccatcctggctaacacggtgaaaccccgtctccactaaaaatacaaaaattagcgaggcgtagtggtgggcgcctgtagtcccagctactcagagaggctgaggcaggagaatggcgtgaacccgggaggcggagattgcagtgagccgagatcgctccagtgcactccagcctgggcgatagagcaagactccgtctcaaaaaacaaaaaacaaacaaacaaacaaacaaaaaacaaaaaccacatacagaacaatggttagacgatctgaactaatctaacttacaggcacaaagcttctctctgcatacttccttttctccctatctcccagcatacaatgaacagtcagcaacctctctaagacatcaagtttaacagttccattccccaaatgcagctagtcctgtgaaatcacaaaaaatactcaaagagtgtcactttagctgtcttaatgtacatactttaacatatgttatgtacactttgaaatatctagaaagactagattttcatataagaacttaagttttccgttatacacagagtagcattgaattaactactaatgctataatgtgatagagttagtttactaactctatacctttgtcatacactggtaacctctttagcatctagaaagactagatataaattaggattaatttgtcctttatatacactatatacacagataaggaaaacaaaatgcacagacgtaagagacaatggctaatgttgcctcattgtaagcacattgccacagaactctttacacttccttctcctcccaggagccagcacacaaacataatgtgtattactcaagaggtggtttggccattcccctctccagcccccagtcaacatttcatatgaattttaagaaacagatatttaaaaaatttgttattttctacctctacttttgacagctatgaagcactttagaacatcaagaaaggcaagatagggcaggcgtggtggctcacgcctgtaatcccagcacaccactgcactccagtctaggtgacagagagagactccttctaaacaaacaaacaaacaactacaaaaaaaccaaaacaattagccgggcatggtggtgggtgcctgtaatcccagctgcttgggaagctcaggcaggagaatcgcttgaacccaggaggtggtggttgcagtgagctgaaatcattccattgcactctagcctgggctacaagagcgagactctgtctcaaaacaaaaacaaacaaacaacccccccaaaaaaaacacaccaaaaaacaaaaaaaactagatctatacagagcagaggcctcagaaataacgccacacatctacaaccatctgatctttgacaaacctgagaaaaacaagaaatggggaaaggattcctgatttaataaatggtgttgggaaaactggctggccacatgcagaaaactgaaactgaaccccttccttacaccttatacaaaaattaactcaagatggattaaagacttaaacataatacctaaaaccataaaaaccctagaagaagacctaggcaataccattcaggacataggcatggacaaagacttcacaattaaaacacaaaacgcaatggcaacaaaagccaaaattgacaaatgggatctaattaaactaaagagcttctgcatagcaaaagaaactatcaccagagtgaacaggcaacctacagaatgggagaaaacctttgcaatctacccatctgacaaagggctaatatccagaatctacaaagaacttaaacaaatttacaagaaaaaggcaaacaacctcatcaaaaagtgggcgaagggtatgaacaggcatatctcaaaagaagacatttatgcagccaacaaacatgaaaaaaaaagctaatcatcactggtcattagagaaatgcaaatcaaaaccacaatgagataccatctcacgcaaggtagaatggccatcattaaaaagtcaggaaacaacagatgctggagaggatgtggagaaataggaacgcttttacactgttggtgggagtgtaaattagttcaaccattgtggaagatggtgtggtgattcgatctagaaccaccaataccatttgatccagcaatcccattactgggtatatacccaaaggattagaaatcattctgctataaagacacatgcacacatatgtttattgcagcactgttcacaatagcaatgacttggaaccaacccaaatgcccatcaatgatagactggatgaagaaaatgtggcacatatacaccatggaataccatgcagccagaaaaaaggataagttcatgtcctttgcagggacatggatgaagctggaaaccatcattctcagcaaactaacacaggaatagaaatccaaacactgcatgttctcactcataagtgggagttgaacaatgagaacacatggacacagggaggggaatatcatacaccagggcctgtcgggggagggggagtgggggagggatagcattaggagaaatacctaatgtagatgacgggttgataggtgcagcaaaccaccatggcacatgtatacctatgtaacaaacctgtacattctgcacatgtatcccagaacttacagtaaaaaatacataaataaaaataaaaagaaagacaagatatttcaaaaaaattcttagcattgtcaacaatatatacagtagtgaggaataaaatgcgcacataaagcagtggttataatatgaaaatgtctcctaagcatgaccagtctggaaaagaaccttctcttcattctcactgccttctgctccatggcctctaacccactgaatgaacgtggtggtgtgttgctcctggagtcacttctacagctcgtctaacaactttcgtttcaaagagtcatttccagaaggcgtttgctttctaccattttttaaaagaacaaatgggcatttacaagacgtgattttcttttttctttattttattttatttttttgagatgggctttcactcttgttgctcaggctgaagtgcaatggcgccatctcggttcactgcaacctccgcctcccgggttcaagcgattctcctgggattacaagcatgtgccacctcgctcggctaattttgtatttttagtagagatggggtttccccatgttggtcaggctggtctcgaactctggacctcaggtgatctacccgcctctgcctcccaaagggctgggattacaggtgtgagccaccgcgctcggctgacgtgtgattttctaactattatacgtcagcaaccttttaaaatctagaatggctaggtagagcaaaaattttcttttaaaaggttgagggaaaagttgagagcagctttttcatattatttacctgggccttctataaaggccagtaaatcctcccaaatggtggggggcatttccagtccaccaaatgtggcatgtgatttctctctttgggtatcaaggtctggtagaacaaacggcaaccacgcaatggcctgctaaccactccacctgtccttgtgggggctctgctcaccttctaggcccttttaggcctttgtccatcatttctggcatttttgggaggaggtaaggtcttgtctaactgggacaaagtggtcagcccgggacccgcatctgtgcaactccatggcataatgaagttcctgagcttgtgtctctaggcccaccttcttgggttctgcaaactactgcagccctcagcgccttctggcggccgccattcttcttcctctgcgacatccatttcctcccaaaggcacggtgtcctccgcagctcggtgagggcttcgccaaggcgcagcaggatttctagatgttctaaagtgctttatagcccagcgaggtctgggcccagagaggctgccgccatcagctcactgaagtggggagagaaggaggtttgcagggccccagctcacctgcctctcagtgcgctgcttctcaccacattgtctgcctgaactctaaatgtctttctactgaaaatatttggattgttttatgaggagaccgaggaccacctcgtggccatcaagcagatcatccagaggcaaaactccttgtctgaggaattcagaagtaattattaatcgacgtccctattatcaaaagcaggcatctagtaccgggcttctttcccaaaaatgtataagtaactagaatttctatacatctctggaatgcatgtatgttgaaacttattgtgcagcccttgctgacatcaaagcaccaaaatgtctacaaatgtaatcatttatcctgacctaggtggctaatatggtccaaattacccttaagctcctgctttaaggttcataaatgctcctaaggaaaaatccacggtggcttgctcagtccgctcttgctgaagcgccctgctgcactcctctgcagcactggttctaataaagctttccttttcaaacccacactgttgtgggtaaattcttattaccatgagccaatcactttccgttgctgtggcgctgacacctcgcccagcatttctgtttgccggactgcctctcgactgacaacagatctgtataaattcaagtccttgaagcggagcttctgaggcttgcagtcagaccatttggataaatctagtatcagctgggaatttgcttaagcattttttcattgattacacagttctaccgtatttcactcaaatctactgctacagttcttctatggtattcatctccttttgaaatcatggtgatatggcttggacctgtgtccccacccaaatctcatgttcaattgtaattcccagtgttgcaggtggggcctggtgggaggcggttggattactggggtgggccattcatgaatggtttaacaccattcccttggttctgttcttgaaatagtgagtgagttcttgtgagatctggttgtttaaaagtgtgtggcaccttcctgccctctctctcttgctcctgtttctgccatttaagatgccgtgcttcagctttgcctttcaccatgattggaagcttcccgaggctcccagaagcagaagcctctatgcttcctgcacagtctgcagaatcatgagccaattaaacctcttttctttataaattactgagtctcaggtatctatagcaatgcaagaatagaccaatacacctggtgtggaaaatagattccctcaaaagaatggagggttgttacaatactaaggacaaggtttccgtggaaaaagtaaagaaagttaggaacagtgaaactgcttgctctatatttctgtttagacttcaggtagagtcagttagatgaatgggccaaaagaaccaggaaaaggaggaagatgcagcttgatcacagagatctgacacagggtaagagggaaaaggaggagagcctttgtatagagccaaataatatccagatctaaattttcttcccaagtttagagtttgttaacatttacaccttgctgcagaaccatgtagctgctgtctctgaattcatggagagtgaatattccaggaagcacaatggaaggcgtccaggttcaaagataaatggtagtggggctgacagaaaaacagcatccttcttaccaagtttgtcctgggaacatccagagatttttattataagtcgactaaacaagaatagtgagagttaacagcaattgttttagctactgtgacttcagtactaccatgaaaggagaatctgtgaggattggagttttttcctcatgctcatcccacaagtgcttcactgataccttgtctgtctgcttaggtcagtgttctcaaagattattttgtgaatgtgtataacactggctgtatgacaaacacctgaggagatttttaacttccaggatcttgattctgaacattttgattttgtaagtgaggagatctccaaatctgtattttaaagatgatcaccaactaactcttacatgaagagaagtgtcatccttgctatgattctatacatcagcagacatgtctctaccaatcctagaagctgagatgggctttttctttggtcttttgaggcaaatccaaattatttaagtatcttatcccgtggtaaaaataactattggtcaatagtattggtggatggacatatgtagggggtatataatcaaggctaaatttccattaaaaggttagtatcacaacactttgcctcatgcacataggccagtcacattatctgggaatcatttcttctcctacaggagaagaaagtgatgccagataattttgtagggatttaatgactttagttactatattttttcattataagagttatatattctttactttttaatcaatatatacacaagatataatttccttttttctttgaaaagaatttattaattggaaattacaattaatttatttctgtaattgatgccttaaatgtgaagcaatatgatatttcaagtagtaacaattcctcaaccaaagaccattcatttattcatgcatttgtgtatttaagaagtgtttcctaaccacctgctgagtgtttgacattgtactaggtatgggaatacagcagtgaaaaaaagcttaagtctctctcatctcaaataatctactaatgtttaaacatgtgctactgacattcctctggttttatcctaaaaaagtgctaatacggtattttagtggatcatgggttgggcaaagatggctaaataagaaaaggtaaaatgaattattctcagaaatgccatggtatgaaaagaacttgcaagtcagacagtgtgctgttaaaaaaaacagagttataaaaaagaccaactattctttagatatacaaagaactatcagacagctaataggtgtcttagaaaaaaaaaaaaagccagaagtgaagatacaggattgacttttgaaagaacagtcaacaatcctttgagtttaggatcttgcccacaaaggggtgcatcttcctaacacattcacatttcctgctcacgctcatttcttcagtgtgaccttaacttttcctcacactaagaagacaagacccaagggcaccagagggtctaaaaatgaattc

SEQ ID NO: 83 - DNA, 187745 bp, Homo sapiens
gaattctcttcctgatttgctcatgggaaaagaataagacaattagggattacaataacattggatgtaacgtgtagatactcagagatttttttaaatgacatgtaaaataatctacagaaagcaaaattattcagaaagcaactacttttctggggcctcctaggtagaaagtatccacaacagcccttgtatacaatacaccatcataaatcacaattagcatcaaataatcagagtagctgtaaagactcccgaaagtagtgtggtcttctgcgatacttcctccctaaaagaagaaactcaccttgctgttgagcagatccatgtctaggtcagcctttttggcccacttttgccaaaagttggggtcatccaaagaaatatctgtcctgttttcagaagcaacaaagcttgcctagagaaaaacaaatgcagaggtaaagctgacttttttttttaagtggtgcaaaatcagcaattatgttttaaaaacattttttttttgagacacagtcttgctctgttgcccaggctggggtacagtggcacgatctccgctcaccgcaacctccaccccctgggttcaagtgattctcctgcctcagcctcccgagtagctgggacgacaggcgcaagccaccattcctggctaatttttgtatttttggtagagatgaggtttcaccatgttgggcaggctgggtctcgaactcctgacctcaagtgatctgcccgcctcagcctcccaaagtgctgggaatataggcatgagccaccatccccagcataaaaacataattaaatcctagagattccggtctctgtgtttttctagcctctggcatagacagaacatgccttagcaaaggtggaaccttttccttcagattcaatggtgatggttgtagttcgtcttaacaagatctggtcaatgtcctcttcacaaaacttggagccttcatcatcttcctccatgatggctgcatatgctccttttcttaaaagatcttcaatctccttcttagagaactgttggatctgtaaaaaccaatagaaagatgaaaagactatcaagagaataatatctaaccatgccataatattttagctattatattttaagaaataataattgagaatccaaacaaggtagtcaaatccctgtgtacaaatagcttttgtttccctctatcacaatgatctactacaaacttatctataaactaagaggactcactccagtaatgttgccatcccgaccactcatggattgaagcacagccttatccaaccccaacttgaggctggccttatcaaacatctctctctcgtaggaattacgagtgatgaggcggtacaccttcacagctttgctctgcccaattcgatgacatcgtgcctgggcctggtttaaaataaaaacgaaaggaaaggagaaagatatcataaaattagcaagggaaaggatacaaaataccaatttatgattctttcacctctatagagcagccatgagatcaactcaaaaccaagagtcaatttcaagatgaaattatcaccccatcatgtagaccaggggtcagcaaactaaagtctgtgtggacatctgtttttaaaaataaagttcaatggggacacaggtgggaccacccactcatttacatattatctatggctgtttttgcgctacaggacttggagataagcagttgcaacaaagactcgatggctcacaaagcctaaaacatttactgtcttgtcgtttacagaaaacgtttgctgattccctgacctaactgccacccttaactaaggaaacaattccaaactctgtgaaaggtctttctaaaagatcctattcttgttgaaaaatctcccaagttaggtagttagtccctaagacaatgaattcctttacctgcaggtcattttgtggattccagtctgaatcaaagatgatgcaggtatcagcagctgtaagattaataccaagtccaccagcccgggtacacagtaagaagacaaagcggtctgagtcaggcttgctgaagcggtcaatggcagcctgtcgaaggttgcctctaactcgcccatcaatacgttcatataagtacctgtatgggaatcgcagaaaaaaaatgtaagtggctaagcagaagtggagaccaaaacagcaggctaggatcaataccagtactcccatatcaaagctggtcaaaaacccaagttgagagtgagaatcttaaaaacttctcttattgcaattggtgaactctaattaaatccaggccctcctactttttgctgctttatgaggacagagtaaccacaggctaggatgactcttttcttacctcctctggattaaataatcctctaggatgtctaggcagcgcaccatctgagagaagatcagaactttatggccaccagctttaagctttggaagcaacttgtcaataagaaccagtttgccggctgaacgaaccatggcctgcaggtgaaagtcatgaggtataatatggcaagcttcacggaattctgttaggattttttcttcagcacctgccaaaagaaaaatcaaattatgttgagatccagtgaaccatattaaggttgtagtctatttaactaagaaagcaaaaggaaaaaaatgtaatttgacttaagaccaacatttctcacacacagaatttcagcacaaaaaagtcttaaatcggctgggtacggtggctcatgcctgtaatcccaacactttgggaggccgaggcaggtggatcacttgaggtcaggagttcgagaccagtctggccaacatggtgaaaccccgtctctactaacaatacaaaaattagccaggtgtggtggcggaggcctgtagttccagctactcaggaggctgaggcaggagaatcgcttgaattcgggaggtggtggttgcagtgagctgagattgcgccactgcactccagcctgggtgacagagcgagactccaccttaaaaaaaaaaaaaaatcagccgggttcagtggttcacgcctgtaatcccagcactttgggagaccgaagcgggcagatcacctgaggtcagaagttcgagaccagcctgccccatgtggcgaaaccctgtctctactaaaaatacaaaaaattagctgggtgtggtagcaggcgcctgtaatcccagctacttgggaggctgaggcaggagaattgcttgaacctgggaggcagagttgcagtgagccgagattgcaccactgtactccagcctgggcgacaatagtgaaactccatcttaaaaaaaaaaaaaaaaaaaaaacttaaatcatcctcagatgtgtcatacaaaatacactaagtaaggcaggcctatgataactgggttaaaaaaagatgtaaatatgtggacaaggactaagatggaacacactatcagcacccaaaagagacagaaacagcaaaatggagtgtcgatgaggacatttatccaaggaacagagtaacctaagagtgttttttctgagacagggctagcttcaaactcatgggctcaaccgatcttcctgcctcagcctcctaagtagctgggactacaggtacatgccactgtgtggctaatctgagttcttcttcatgcaattctaaacagcaaatcctatttaatcttggagattatgtaggatcaaaggggtagaaagaactacagaaaaacattccaaataagaattgtttttatttactttatttggagacagggtctcactctgtcacccaggctggagtgcagtggtgtgatctcggctcactgcaacctctgccttctgggttcaagcaatcctccaagctcagtctccaaagtagctagaaccacagatgcctgccatcacacctggctaatttttgtattttttgtagaggtgggatttcatcatgttgcccaggcttagagtctcttttttaaaaggagaaccatttccctcccattcctcagtccgcaccccaaattaggttggttgagtcaatgcatccattgtccccaaggagaatcatccggaaagtaaacacaggtactacagaagttcaggtatataccaagcattccctcaccattgatgagatatgggtggttgcagcacttgcgcaactccatcattgtgttaagtagattaggcatgttggtatgacctgcccctttggaaaggaaggagaaattcttctccaaaatagcccgatagtatttcttctggatattagtcagctctacttcaataattgtttcctgtttgggtgccaagtttttttcaacatcctctttgagtcttctcagcatcattggcttaagaatggcctgtagcttttgaacctgtggtccattacagagagaaaaataaatcaataagatgagggcgaacattctcacattatgtagaaacatggaaaaattagagttttccactatctaagaaatgtatactttggatgatgccacaaatgatgtaggcacaaggttataaggagttcagaaaggcccttgagatacccatgacaacagatgtctgccttgtacaaacttcaccttctttgtcctgagttagtacctcatcagatagatttcctacctgttcctctgtcttgagatccccaaagtccttgagaaactctgattctgagggaaattgtgacggttccaagaaatgaagcaagctaaacagttcttctacagtattttgcaatggtgttcctgtgagtagcaccttgtgttcctagaaatggaggaaacaaaagaataaaatttaaaaacatgaaggacttctggggtttcctatcaagtatataatctttaacatatataacctttaatttctttatctataaaatgatgagaatggaccagtgatctggtccattaatttttcttccatttgtcccctctttcgataaacacaaagcattcaagaaatccctctgacattaatgtattgaaataacataaatattataagcaaattaaaaaacagtaattctgattatgtttattccaattacacatgtctctccatattcaactccccacagatatcctaaaatctgctgtcctctatggaatgtaactgagctggattaaatatggtcattaatttgctgctgttcctcctaacaaggttcacccctaggcttgccttattacttgcaagaacaagaatgtagcaaaagtgacactgtgtgagtttcagagcctatctcaaaggttactgtttctacttttgccctcttggaatactgccctgagactaccacacaaagcagcccaatctggcctatggaggatgagaggccatgtggaacccaggtgctccagataaaaaccagcatcaactgccagctgcagcaatactgactccaggcaagatcatcataagaaccaactagctgaactcagcctaagtggttgagctagaagatcatgaaaaatatagttgttgtaggacattaagttttggagtattttgttatgcagtaataataggtaaccaatatagtttcccacctcctcttctggttatcactaaacttcccaattctaaaatgtatgacttttacacgactttcaggttaccattcccataggtcatccccactgttcaataccacgattcagacttttcttctctgctaaactagggttattttaataccgcaaggaattacggtttattccaggtgtttctgctcacaagtcagtgtggaactcaccaggtccatgtgcttgagactatcaagcagcttgcaattacggtttttcagtcgatgggcttcatcaatgataacacaacgccattcaatttcacgaagctcaggacaatctgacaaaatcatctcaaaagtggtgatcagagcgtcaaacttgtatgcgcctgggatgaggcgtccctaagcatgaaggcagtaaagtcagaaaaaaccaaaaatgtacctaaatgaggagcttttctgaattacttgcctatattaaggcatgtttaataggcaatacaaactgcaccaccacccacctccaccgctgtttatcttcctgaaaaatagtgccatatcactgaatgtaagatacattgcttcctcaacatattcagcttcttgggaaaatgacagactcactgaatgagaggctagacattttttactctgctgtatgcctagctcatgtatctctgccccagatcttttgttgattaacaatgaaatccacaactgctggacaatgctgaaccatacaagataataaaaatgaaaatagctaatacagaacataatattggctgatgtctaaaaattgacaaaagaatgaaatcattttaacaaaattaaaagctgcaaaatatgatgaaaagatgtgatttggtagaaataaaaaaaagaaaactaatagagaaacaataaaattcatgttaatacacgatggataattccaattttgttttcaaatttacatggaaaaaggaactgatcctttttttttctttttttgagacacagtctcactctgtcacccaggatggagtgcagtgtgacgatctcggctcactgcagccttcgcctcctggtttcaagcgattctcctgcctcagcctcctgaatagctgggattacaggtgcccaccaccacacctggctaatttttatatctttagtagagatggggtttcaccatgttggccaggctggtctagaactcccggcctcaggtaataagcccacctcggcctcccaaagtgctaggattacaggcatgagccaccacgcccgaccatttagaaaaagaaactgatcttgatgaaaatttccgtagactaaaaagaggaaaagaaataagctcaccaccgcatggattaagtggctaaaggaatttaatttttgtaaaatactgtgattaaaattcattgatgctgacaaaattctacttaaaatgtgtatgttcataaataaaatcagaacttctaccagatcaaatgtctactaggtaaaaaaaatagcaaagtcaaaaaaatgccctgcacactgctatacaaaaatgccttaaaccataggcatttttgcataggcatattgaagactttcaataaaagtcttctattcatatatagcccttaaaataccaggtaccttggccgactttctctaactcatagtattcccaagacatgcaactcacccgtgaatctttgcagtacatttcatactgttgaatcatctgcctgctggccagactgccatggtacacaatagtgttcatttctgtccatgtattaaattctcgctcccagttagtaattgtggacagtggggcaatgaccaagaagggaccatggatgcccacattatatacttcctgcaagaaggcaatggactgaatagttttgcccaatcccatctcatcagccaggatgcagttctgcctgcagattcaccatgggaaaaaaaaaatgttaaaagatactatctttaaaaaaaatagagtatgtaggaagaaattgtttcaatagaaaacaaataaaaataatcccagaactaagcttacatcttatggcccattctttcctttacctgttataccaattaaagagcagccaattaaccccttccaactgatattcccgtagctggtttctgtttttatattcatgtgatagctccaatttcttccaggcacttgcctgcggacgattctaaaaaacaagacgtttgaataaatggagtggagacattatcaaaaggtaagacttactaggtaagttctaatagttaaaatcaattcaaaacaacattgtttggattaaaacatgtcaaatatatttaaatttatgagttcataacgttactttatgggtccataatgatcacaaatggctgacaacatcacaaaacacaacctgatggaaggacacaccaccatctatgaagcagttactggcttccctctctcatctgatcaagcctgtagaacagtgatgtctaatagagctttctacaacattaaaaataaaaaaacaaacaaaaaaacacggctagtggctactgtattagacagcacagctctaaaatgttttattggacagtgtagctctaaacctaagcattcatgtgaaacataagggacagagaacatgtaaaaaagtaccaagggtaatcagcaaacttcagcctatggaaaatcctacaaaacaaatcacctgatttcttcatgagaaaattataacggagggagaggaggagattaagggggagcttaaaagaaacttgagacatattaactgatagcaatatatggaccttactgagaaccaaatttaaatgatttaacaaaaattagaagacaatcagggaaatgtatgcaatgattggtaccaatgacttgatgatattaaagaatgattaaattttttaggtgtaataatggtattatttcttttaggcaaaaacactgtaatatttacagatgaaataaatgaatctgggatttgatttaaaataacctgggaaacaggaattaatgggtaggaaaatatatgacacaagactggatatgtactgataattgttacgtgggtgatgggtacattataccatttcttcgatttttatatgtttgaaatttccataataaaaagctaaaacaacaaaaaatttcataggggaaaaaatttaatcatttcttatgtaggcctttatactttaatgcaaatgtacttaccacccttttgagttctgggtgccttgactgaatccgtttaaattctcgaatcttgccctcatcaacatcttcttttagctcccatgtgctatcctcatagggcagagagcaccatttcaccaggtagtaaataacgggctaggagagaagaaaccaaagccttaagaaactgattctgtgttctctgctccagttaaagaataaaaatttgattgtaaaatcagatcacaaagtatcagtacctagaagccgttgaaaaagtcaggccaaacacatcgaccaaaagttcaccttctgatgcactatatggctttgatcattcttcaaagcaatttatcagaatctgttctaaaaggaaaatttctacccactagtttctatcacactaagcactaaaacatgctcgtcaactaaacagatgaaaaaaaaaagactaatcttttcctataccatgttgaaattaaaagatatgtttctgtgccatactattctcctggagccaaatttgacacagtggcagctaggctacctttaggatgaggactatcagcttatactggcttctgggcccctagagctcattgcagatgcacctcaagagcacttacatggtgataaagaaatgtccttgtgagccccaggaagctaggagctaacaagaggttatcaccaaaaagaggtactaagagtaaagaaggaagagaaaatgctaaaaagttcaactacagtaagtactagtttatgtaggtattccactgaaagtgaaggggcagtgaccaatggtaaatggctcctattttcactattcaagatgatcactgcacttactgcatctccatttttggcttatgaagtataaagcaaggattagattgggcctagtgtaatcaacaagaatctctaattatcaattcatagaaaacttaaaatagccaacaaaatatgtgaaagtgcctcaaggtagtcacagatctcgaatctctggaattgatccagctgcttgctcttttacctttttctttatcatagtaactcaggtcactctctatataaagccatttgtccaggtcacatatttccagcataatatctatttatttccaccattaggtaatataaaatggatgacaaacttattttgcagaggtggggaaaatgggtatatagaatagtattagccaatactgggagcataaattatagtattagagtatgaaaacattatcatctgtcacgtcatttgcaagacattccaaaggggcctaactaaaggccaattgcttttagaagggtaggtatgattaaaagcataagactgtcaaggctggaaaggctgagatcctgaaaaatgataagaatttaagagtagctaacaacctgccctaaaacccggcccattctccattcaactcacacaaacaaacacacaatactaccaccccaacttcaaaagcagaatacgttatgtgaagcatgcttgttaggatttaaagacaatgaattctaccgtgtcctggatatctaagattctgaggctctgagtgaacctgaagacttataaagtagaataaacttcggaattttatagaggaaagaatttaactcagaggtcctgttagaatgatgtatgggaggatcaagtcacttgaaaaagtcatgaaaaagcccagctcacccactgaacattaacatcttaaaaaggctctgctgttctctactggtcactgtataaagtgtcagatgtgatagaaattttctttatgatcctgctaagctaaaccaaaaagtgctactggaaggaaaaatataaagtgacaaattctaagaaaatgatggtttatagcctaaaaaaaaattagaagtaaatttaaaagaaagctgaattcactggtggctaagacctagatgaccatttgaaaatgaaaaaggtgccaggcgtaggcggctcacgcccgtaatcccagcactttgggaggccgaggcagggagatcacttgaggtcaggagttcgagactaagcctggctaacatggtgaaaccctgtctgtactagaaatttaaaaactagccgggcatgatggcacacgcttgcagtcccagctattcaggaggctgaggcatgagaattacttgaatctgggaggcggaggttgcaatgagccaagatcacaccattgcaccccaacctgggtgacagagtgaagatggtctcaaaaaaaaaccaaaaaaaaagaaaaagaaaaaagagaaaaataaactaattaaaatacagattcaaatgtagatctgcttttttgtttgtttgttttttttagacggagtctcactctgttgcccaggaatggagtgcaatggcatgatcttggctctccacaacttttgcctcccgggttcaagcgattctcctgcctcagcctcccgagtagctgggactataggcacgtgccaccacacctggctaatttttgtatttttagtagagacggggtttcactatgttggccaagctggtctcaaactcccaacctcgtgatctgcccacctcagcctcccaaagtgctgggattacaggtgtgggccaccgcgcctggccagcagatctgttttaatgacaaatgaagagacatttaactaatggtgagttcaggaagtagcccattctcaagaacatgatttgtagaaagctaggagcgagcctgtagaagtatttttatattcacaaatttaggaatttgtgaagtatccctttccccttcccaacaccccacctccaactgtatgtcaagagtctcccatttaaaatatgaggaaaaatgagaccaagatgaatgacttttcagtacttagcctctacatgtctgactttacagaaatctttccttttagcatctctccctacactcttacctcccattatctttcaaaggattccacagaaaaatttagaaataccttttcagtccaagggattctgcatccatacccgaaaaataaaggattggcaaacccaccagcagaaatctaagaggatgttcacgttactccatgcctcaacaactcacctccccattgtccttgtcaatactgtgagactcatccaatatcctatccacctctacgtagtctggattaaagggctcttcatcctagatgagttaggaaaccaaacaataagaccaaaagatcactgtccagtaaacccactcctctacctcacctttagcagagaatcctacttcaaaatttttaaagaaattagaagctatccgatgggtgttctcctttttcataacagcaaatcctatgaatttaccagggtctatacctgacttctcacctgctaccagtgagtgtctctttctaacagaggtccttctctccatatatgctctgctgttcattgcttcttgtattcttaggaatccctctaccgagtcattgccataaatacacgtatatgttccacatttcacattttaaaataagacctctttttattctacaactcccgcaactatttttctactctgctttatacctaaacctttttttttttttttttgaggtagagccttgctctgtcatccaggctggagtgcagtagagcgatcttggctcactgcaacctccacctcctacgttcaagtgattctcctgcttcagcctcccgagtagctgggattacaggtgcccgccactatgaccggctaatttttgtatttttagtagagacggggtttcaccgtgttggccatgctagtctcaaactcctaacttcaagtgatctgcctgccttggcctcctgaagcgctgggattacaagcatgagccactgcgcccggccccatacctaaactttttcaagggtttaaacacatgctatttccattccttcatctctttcacttgtccatccattccactttttcttctacttgcaacatacaaccaaaactactcttatcaaggatgaacgccgcaaatataacaggcatatttcttcactcatcttgctccagtgtttaggggtaaacctggatattggaaattaaagctcctttatccctatttctaatcacactggattagaaatttgagaaaacaaatgttctctcttaataataggtctacagaaaccatcaatagctaaagaaagacaaagaatgcctcaagtggaccagcagtcagtgtatcatcagttttgaaaatacttcatgtgcattgaggaaatcagtttcaaaatatcctataactaataaatgaaccatatttaaacctaacaaaacaatgcaagggcagttaagtaagggaagtcaatgaccaaaattgaaagtttacacccatatatagaaaccaattacaagtattttgaagaatcagccaaggctgacaaccccagtaatttgtgcttctgtgaaagaaatgacaggcaatacctattcctaattacctcatggaagaagtgtctcatctgagccattttggttttgaagcgctttaatttttgatgtatcctcttatccttctctagttgggagatagtagcccattcacaatgcagataggagctaagggggatggaaaaatccagtcatggtgcaagtaaaagaaggtggcaggctactgtctgaaattttgggattagtcagaagcagacataacaaatacaggcttaaattgggagacagtctcttaggtcagtgcttctgaaactctaatttgtatacaaaccacctggtatgggatgtgcttgaaagcccacatttttaaaaagcacccaagtaatgctaattctgctgatccatgggccatattttgagtagcaagatcttagtgctaaactaaggtaaagagaatcacatgacattttatcaggaaccaccctcaccccacttacctacaaggaaataataagagtcatgtcaattcctgaatttctctctgaatagccatttttccccattaaaaacagcaacctgggctacaagactataaaaaagggacacattcccacccaggatacccaggagaactttttaccaccctgtggaatttggggtgacaagctttttgcacagatcacgtactagttcttgtacttgacaaagaattcttctgcttcagtatattgtccagaagggagctaagaaaaaagaaataaattagtcactagtcccttatttgtaaaagaatgaactttttaattttaaccacacattgcagaacttcataccaataatctctgaatatattaataactcagagattaaggaactagtctggtacttcaataatagaggcctgatagctggaaaaagtaagcctttatccactctaaacaggtaagtaaaagaagcaccagtaaagcagttcctgttttctagctaactttcctccatcatctctcacaactacaccttagcaatatatctgacatccaaaggtgctcattaaataaagcctgtgaacatagcattacgggttaatattaagatagagaaaagccaggcgcagtggtgcacaatggtagtcccagatactcaggaggctgaggcagaagaatagctcaagcccagaagttcatagtgtgctacgatcatatctatgaatagccactgcactttagcctgggtaacacagttagactctatttcaaaaataaataaataaataaataaataaataaataaataaaaataataataataataaaaagccctcacctccttcttcacaatccgcatagaaagcactttgtctacaatggctgcatcttcttcactgggattctcctgcagcaaaagatgcagtcagtcaacagatgattgtgaccagcaaggcaatcctctgaaatcatttgagtttacagcttaccacaaagaactgcatggaaggcaaagtctcgccatctggttcttgcactggttcagggaggataggctcaggttttattggaccagttacatccacctcttcttcttcttcatcatctgtgatctttatatccaggtcctctgtatatttttttcgcttaacttggcggtttgagcgtctcttctgtagagcaaaaagtagttagagtgactagttaggtctctcacagagaagacttttaaaattatttgctcatggtcatatacttagattctactccaaaattttcatgaaaaatcagaccaaaagatgataaggagattatctgtcaaacaatgtgattatgctatgtactgaccatatatcaatttgcttaactgctttatgaaaggccaagaatccactgagaaaaacctgtccactagtggcaagaagctctgggaaatcaaaactggattctcaggctgcagggtgcaatataattcacactagaagcaacccgttagtgcaaaaatgcaagaagattttgtttccattttttgcttttttgtcttagttctgaagttttttttgttttaataaacagaatctactgtatgtactattctgccacttacttttttatttaatgatatttcctggaaatgttttccatatatattttttatttaccttattctttcaagtggctgaattaaacattttctaattaagtaatttaagcaacacttccagctcatgataaaaaactgggaaggaggcttggtacagtggcttatgcctgtaataccagcactgtgggaggccgaggcaggcggatcacctgaggtcgggagtttgagaccagcctggccaacatggtgaaaccccgtctctgctaaaaatacaaaaattagccaggccttatttttcaattatgattatctctctggaaaacctcaaaggatcaaatgaaagaactactgaaactagtaaacttgaatggtataaaactaatttttaaaaaatcaatagcatttctacatataatcagccagaaaatataataaaagatcccatttatgaaaacacaaagattaattatctacaaaactaaattggctgggagtggtggctcacacctgtaatcctagcactttgggagaccgaggcaggtggatcacctgaggtcaagagtttgagaccagcctggtcaacatggtgaagctctgctaaaaatacaaaaattagccgggcctggtggcggatgcctttagtcccagctactcaggaggctgaggcaggagaatggcttgaacccggggggtggaggttgcagtgagcaaacttcattagtataaaattaattttataccaatacaaatataattttatatttaaaaatgttatatttttgtttcacccaacagactggcaaaaatcagcaagtttgatcaaaatatttttaagtaagaattcatacatttttggtgagagtacatataggcacgacttccatgaagaaaaatttggcaacaccctttgaacctatcaattccacttcaaagatactatcctataaatttgcatatgtgcacaaatctctggagcattacttgtgggagtaggagaccagaaaaaacctaaaggcccatcaacaggggattggttcaataaattatgctatagccttaaaactgaatactacagaactactaaaaaagagtgcaggctgggtgcagtggctcacacctgtaatcgtagcactttgggagactgaggtggcaggatcactcaagcccaggtgttcaagaccagcctgggcaacacagtgagaccctgtctctattttatacaaaatataaaaatagccgggcacggtggctcacgcctgtaatcccagcactttgggaggccgaggcaggcgcatcatgaggtcaggagattgagaccatcctggctaacacggtgaaaccctgtctctactaaaaatacaaaaaattagccaggtgtggtggcgggcgcctgtagtccccgctactcgggaggctgaggcaggagaatggcgtgaacctgggaggtggagcttgcagtgagccgagatcgcgccactgcactccagcctgggagacacagtgagactctctcaaaaaaaaaaaaaaatatatatatatatataatatatatatatatacacacacacacacatatacacattaaaaagaatggggtagatttataataccaaatgttgaagatgtgtatcaaccagaactctactggtgaagtataaaataacataatcactttagaaaacttaacagattcctacaaagtcacgtttgtatattcataaagtcaaatattactgaagaaaaaaataaactactcatttatttagcatagatgaactatcaaaaacattatgcctttctcattgatgtgtgggcagaagaaaaagaacaacaaaaaattatgctgaaagaagtgagacccaaaagtacatactgtatgatactacttaaagttcaaagccgggcacggtggatcacgcctgtaatcccagcactttggaaggccaaggcgggcagatcatttgaggtcaggagttcaagaccagcctgtccaacatggtgaaacactgtctctactaaaaatacaaaaaaatgagatgggcatggtggcgtgcacctgtaatcctagctactagggaggctgaggcatgaggatcacttgaatgcaggaggcggaggttgcagtgagccaagatcacgccactgcactctagcctgggtgagagtgagaccctgtctcaaaaaataaataaaatagccaggcgcggtggcccacgcctgtaatcccagcactttgggaggccaaggtgggcatatcatgaggtcaggagatcgagaccatcctggctaacacggtgaaaccccgtctccactaaaaatataaaaaaattagctgggcgtggtggcaggcgcctgcagtaccagctactcagaaggctgaggcaagagaatggcatgaacccaggaggcggagcttgcagggagcggagatcgcgccactgcactccagtccagcctgggcgacacagggagactccgtctcaaaaaataaataaataaataaagttcaaaaataggctaagttaatctaaggtaagagagagcagaacagcagttagctgcctatgccctggagtgaggaactggactgactacaagggagtacaggggaacttactggggtgatggaaacattttcttcacttggtgaagtaacttcgatacatttgtcaaaactatacaaacaaaatttgtgcatattttatgatatgtatattctacgtcattttaaaaagtctgggaggatatataaactaaattatttctagagaataacaatttctagaagatactttctactttttacttaatatatttctggatgacttgatttttatcacatccatcatatagtattcttaaaatgacctttttaaaaaaaaaatttaggaaacactttaaacaagtacttagatttggtttaaaataatccagggtgggccgggagcggtggctcatgtctgtaatcctagcgcttcgggaggccgaggcgggcagactgcctgagctcaggagttcaagaccagcctgagcaacatggtgaaaccccgtctctactaaaaatataaaaaatcacctgggtgtggcagcatgtgcctgcagtctcagctactccggaggctgaggcagaagaattgcttgaacccgggaggcagaggttgcagtgagctgatatcgtgccactgcactccagcctgggcaagacagtgagactctgtctccaaaatataaaaataaaagaaaacaaaaaaaataatcctgggtgccgtacactggagaccatgtctagggacagcaactgcagccagaccctgagctgggccatccctgccactcactgggtggtgctgggcaaaggcatgcagctacaggacaaccccccaggggcacagtcttcagcaccaccctgggaggtaccaggatcatctacgactagaaattcctggagtgtcggaactcacccatgaccaaaacatccccgagggatctgcccaccattcctggggtcaccagccctgccagtgatgagcccccaaaagaagccagccagggccacctgtgcaatggcccagaaggtaagtagtcgggccgtgaggaatcacaatttgagatggacatttaaaggaccagccatcagattgcgcattgcctatgggctcctccaggcctttctgggaggaatcacaccagctaggccttatgaaagttatcacactgggcaggtgtgggacatggggtcggccaccccagctttctctccttcactcagggcacctgccctctcctctttgtgaaaactagcagattatctcctagtgccctagtgcctctgctgatgtggtagctgctgccccaaagggtgtgacccctgccagcacacccttcagcagagtgccaggaagtggacaagaatgagcccttccttccaaataatccaatgatcggctcttctagccctgtgctctgtgggcgcagccaccccttctttaggttgatgtgcctgggaaagctcccctccccctccttccacaagagaggaaataaaagccactttcaccacagggccaaaggcgggcaggactagagtggaagtaaggacagtgggaagtgagccatctgttgataaatattaaagtgggagaatgggaacatgggacttcattaaaaatctacttttgtgtatgtctgaaaattttcctaataaaaaagaaagtagaggaggagaatgggtatatctatcttttccactaaagaacaacctccaagacgtatcattagggaaaacacacagtagagaagagtaggtatggaatattaatatttagtggaagtagaagtagagtgttcatgaaagtaagaaatatttctagaagggtatacaagaaattggtaacagaggctacctgttgtaatttttctcatacacattttttttttttttgaaacggagtttcgctcttgttgcccaggctggagtgcaatggcatgatctcagcttactgcaacctctgcctcccaggttcaagtgatcctcctgcctcagcctccagagtagctgggattacaagcgtgcaccaccatgcccagctaattttgtatttttagtagagatagggtttctccacgttggtcaggctggactcgaactcccgacctcaggtgatccacctgcctcggcctcccaagtgctgggattaccggcatgagccaccgcacctggcctcatatatgtatttttaaactgaaaaatcaaatggcaaatggtccagttaaaaaatttcacacagggccaaaggacaaaaaattaaagcacaataatcatgacccacttaccattcaacccttctcttcaaagatacatattcttatccatttcttgtatatccttccagaaaaaaatggatgcatatacatatatatacacacacagacacacatacatactttaaacattaaagagatactacatacaccttttttcattaataagtcttccttattagcacattccaacctacttcattgtttttaactgccatctagtattctactgccatctagtattctactgcatgaatattgccaattttacttaactatttctccaccaatggacatctaatttttagacatttttgctattgcaatattgctacaatacatatatcactgcattcttttgagaacatattcataaggtaatttcctaggtgcagaatcattgagtgaaatgaaattaacattctaaatttttctatatattgaaacaccgacttgccaaaaagattgtcccaattaacattcccatcaactgtgtctaagtgtctgttccttaacttcattgccaatattgtcattctcacttgtcatagactgaattgcatccccccaccaaatccatatgttgaagcccctaacccccagtacctcagaatgtgagtgtattaggaaattgggaatagggcttccaacggtcattaagttaaaataaagccaccagtgtgagccctaatccaatctgactaatgttcttacagaaggaagaaatttggacacacaaaaagacaccagggatgtgtaccaatagaggaaagaccacgtgaagacacaatgagaaggtggccttctgcaagccaagaaaaccttcaggagaaaacaaacttgcagaccatttgatcttggatttctagcctccagaactataaggaaataaatgtccaggccaagtgcagttactcacacctgtaattccagcacattgggaggacaaggcaggtgaatcacctgaggtcaaaagattgagaccagcctggccaacatggtgaaactccatctctactaaaaatacaaaaattagctgggcatggtggcacacacctatgatcccagctactcgggaggctgaggcaggagaatcacttgaacccgggaggtggaggttatagtgagccgagattgtgctactgcactccagcctggagaccctgtctcaaaaaaaagaaaaaaggaaaagacaagaaatgtccatagtttaagccacctagtctgtggtattttgttatggtggtcctagcaaactaacagaccactttctaaattttagtaatctctgtgtattttgtattattaaaaatttccttcattttttttgtttaacaaatactttattactttatttgcacaaccctctaagccttatttaacctttacttaaaaaacaagttgttttaacaaatcacgttcattttgtgttgctataacagaatacccgggactgggtaatttattttaataaaaaaagaaatgtagccaagtgcagtggctcctgcctgtaatcccagaactttgggaggctgaggcgggtggatcgcttgaggtcaggagttgaacgccagcctgaccaacacggcgaaaccctgtctctattaaaacatacaaaaattagctgggcatggtggcgcacacctataatcccagctactcaggaggctgaggtaggaaaattgctcgaacctgggaggcagaggttgcagttagccaagatcgtgccaccgcaccccagcctgggaaacagagcaagactctgtctcagaaaaaaagaaggccaggcacgtggctcacgcctctaatgccagcattttgggaggccgaggcaggcagatcacctgaggtcaggagtttgagatcagccaggccaacatggcgaaaccctgtctactaaaaatataaaaattagctgggcgtggtggcgccacctgtaatcacagctacttgggaggctgaggcaggagaatcacttgaaccgagaggcagaggttgcagtgagccaagattgcgccattgcactccagcttgggcaacagagcagactctatctcaaaaaataaaaaaaagaaagaaaaataaatttatttctcacagttctaaaggctggtaagtccaatatcaaggtgcccatatttggcgaggaccttcttgccacatcatcccatagcaggaaggtgacaggtgagagcacaagtgagagaaagcaagagaggtcccaacttgattttataacaaacctactctctcaatgacattaatccattcatgagggtaacgccttcatgacctaatcacctcttaagggtcccccctctcaacacagttgcatgggggatttagcttcctatccatgaacttttttttttggcggggggagtcagggggtgcagtaacagtctctcattctgttgcccaggctggagtgcagtagcatgatcacagctcactgcagcctcaacttcctgggctcaagagatcctcctgcctcagcctcccaaagtgcagtgattacaggtatgagccaccatgcctggctaacccatgaacttgggggacacattcatccacagcatatgtatgtaagtcttaatatgtgttcttactatgagccaaacactgttatatgtgctttataaatgtgtacatttaatccttgaagcaaccctatttggtaagtactattacccacatttcaaaggtgaggaaattaaggtaccaagaggctaagaaactcgctcagagtgacaaagctattaaatggtagagtcaagaaaagaacccaagaaatctggctccagagtctgtgctctcaaccactatgctgttcatggaatttttttgttgtaataccatacataatttttatattatcaagtgtaccaatattttccttcatgacttctgaattttaataccgtctttacaaagattactccaccggacagttactttaaaatgtattcatgtcttatagacagttcataaatttcatcttttatatttacaccttcaattcggttgggatttatttttaagatggcaaaaaaatccagcttttcctaaatggttagccagctgtcccaatttattgaataatctttttccctgttgattttaaatggtgttttaatcatatatagtaaatttccacaagtatttgagttgatttctaagctctactgtgttttattaatctgttttttcttctccaatttcaaagtcttagtaatcattatttcataatatattctaaaatttttttttggcctcattttcctttttaaaactttctcgactattcttttgttttgttttgtttttttgaggtggagtttcactctgtcacccaggctggagtgcagtggcgcaatcttggctcactgcaagctctgcttctagggttcatgccattctcctgcctcagcctcccaagtagctgggactacaggcgcccaccaccacgcccggctaatttttttgtatttttggtagagacggggtttcaccgtgttagccaggatggtctcaatctcctgacctcgtgatatgcccgcctcggcctcccaaagtgctgggattacaggcgggagctaccgcgcctggcccagctattcttacacagtaatttcccctagaaaaacccaagtatcagtttgtcaatgtaccgaatgtatattatgaaagaggggaggcacttataaatattaatagagaaacacttaaggttcatttagtccaaatctccatttacagatgagaaactgagactcaagtaagttaagttggccaggccacagagctacttagaagcactatgggtctccttaatcagattttttctatggttggaaactagagccaaagatggtaccataaggcaacaaatcagagatggaagcctacgcttctggtctggcttcttttggtctcttccaacgtccctcatcttcaaaacgtagcaagaaactttgtgcctaactaccctagttcacagagtcagaatcctgaagtgtagaaaaggtaaggcaaaagggattcttggagagttctaagagagagtcaagttctggcccaaccagaagggcaatcaagcagcatgatttcatatgatttgctttgtatttgaaacactggaatttgaggaaacgagtattgctatttttttttttttttttttgagacagagactcgctctgttgcccaggctggagtgcaatggtacaatctcggctcactgcaacctccacctccagggttcaagtgattctcctgccttagcctcccaagtagctgggattacgggtgcctgctaccacacctggctaatttttgtatttttagtagagatggggtttcaccacgttgaccggactggtctccaactcctgacctcaggtgatccacccacctcagcctcccaaagtgctgggattacaggtgtgagccaccacgcctggccaagtatcactatttttatagtaatatgctctttgcctaaaaaaaaaaatttaaagacactgaccagtgggaggccaaggcaggcagatcacttgaggtcaggagttcaagaccagcttggctaacgtggtgaaacctggtctttactaaaataatacaaaaattagctgggcgtggtggtgcatgcctataatcccagttactcgggaggctaaggcaggataatcgtttgaaaccgggaggcagagggtgcagtaagctgagatcatgccactgcacttcaggcctgggtgagagagcaagactctgtctcaagaagaagaaaacaacaacaacaacagaaaaaagacactggccaggtccatccaccttatttaggcctacgcccagtttagaaaagccaaagaaatgtgtatagacttacgatttctcaatatctgcttggcttggttagccataattaaacatggttttttctactaaattcttttgggatccttttacctgaatgctgctttcttcatcttctcgaggtgactgtgcaggcatgacttccacatctgaattatcagatgaggtattacgttttctcttcttacccactacaggagtgatggtgctaaaaaggaaaaaccaaattcattttcagtgaaagcaaagaaaatttaggagtaaaaaaacataattaatctaaaccatcacatacaaaacttccagacagaagtttttagatcttcagtcaataggacacacagctactaaatatggtgtttgaaaaaaagaagatattagggtttgtaaaccactgactgacccttataccatatttgacaaatccttgttattactgtgttcacaaatacctgaaggaaggtagcacaagataggagaataaataccagattaagaattagaacacttattgcagttccacttctgtcactacaagagcattagtttcattatttgtaaacattagagagataatacctgtcctgacagttactgaggctcaaataagaaacataaaactgtcttttaaaagctgaaaaatccggtacaaatacaaagcattattataattacaccacaaagccttaagaatcccagggagtaaaagctagtaagaaaggagaagatacaggacatggaagggaaagagaggacactcaattatgacaagaattatgtggcaagccatcacttttctgtcaacactgcttaaagctaatggtagatgctgaaatctccaattcacagaagagatgcaagaacaggacagctatgtctccagtagttctctttttactgatgtgggtggtaggaggtagtgagaaatctctttcacactacagtaatacaaaatcaggacaaatatatgaatgcagagtcacagcttttaaaggtaactcccagcacagtaactatctttcctgtgccttcgtgttttcctcttaaaatatgctaatttcagttttccatttaacaaatcctataagcattaggacagaaaaaagaaaggccttattattttctataatagatcaccttgaactatgtagctggtaaatacacataagttcctcaatgcttcttagaaatgagtgctctgccctcaaatgtcccatcacaatagcaaggagtactcaatcttgagcttgctcttgcccgtcccatcccaatagcaaggagcactcacttgagcttgctcttgcccgtcccatcccagtagcaaggagcactcacttgagcttactcttgcacgtcccatcacaatagcaaggagcactcacttgagcttgctcttgcacgtcccatcacaatagcaaggagcactcacttgagcttactcttgcacgtcccatcacaatagcaaggagcactcgagcttactcttgcacgtcccatcacaatagcaaggagcactcacttgagcttactcttgcacgtcccatcacagtagcaaggagcactcacttgagcttgctcttgccctttgttttggaggtaccagatgtttgctctgccctcaaatgtcccatcccaatagcaaggagtactcacttgagcttactcttgcacgtcccatcacagtagtaaggagcactcacttgagcttgctcttgccctttgttttggaggtaccagatgtttgctctgccctcaaatgtaccatcccaatagcaaggagtactcacttgagcttactcttgcacgtcccatcacagtagcaaggagtactcacttgagcttgctcttgccctttgttttggaggcaccagatgttttactcttctttggcttctcctctttcagcctctccccagcactcttcttcctgcgtttcttctcgccttcctcctctggccgaacgctgggcaactcgtcctcatttaagactcgaggtatgttctgctcaccgcgggcacgggctctcgcaatggcctctgctacaatccgatttgctttctcttgcttcttctggtgttccaatctgcggttttcctccattcctgtctttccccccgaatgaggagcagagcttgctggtgatgacaaagctgccacttcactggcactcagaactttaactacagagagcccagaagaggccccttgggaagagccagcctatagaaacaaagatactacaatttcaacttgcttgtagttaaatggcctaaataaaatccagctctgaagcaggggggctagaaactagttctttaatccctcaagaatcaagctcagactaaatcttattgaacctacacctactttttaaaatgtattcttttggtgggaaaggggtgagaaaaaccaagaattctgccaaaataaactttagtatctttttgctatgcttccattaatatacatctccattacctcagaaaaattacaactaatatacccaatattggtctctggcctaacggtaaaaaaattcaaattctactcttggcctaccttttatctgcctgggcggggagaggggaggactgatcacttatttcttcaagtcatttctgaactatcatttaaaggatatcacaaatcatttttatttcacaataatattaggaaaagattataaataaaacaattcaaagataaatactaaataatctcatatcccaaacccaacaatccctctctaatcttttaataatataattaaaataaggtttccatgaatgaaagaattaagtctgcacctcagttcagagatataaatctagaatggccccacattcaagaataagtggttgctgagggcaacagcaatggactaagtatttttgttttctttcttttccttactatgtaagtctctcacctgtggctgcagtaccaccttgactggtactgaaagtctttgtcctgggctttgtcctggtcccattatctgagcctgctgtacagaggacagagtcactggctgggtggagggtggctgctggggctgtggctgcgatgatggtggttgtggtacaatctggattttttgctgtggctgctgcacctgcagctggatagttactaccttggcaggctgcccttgggcattcttggcttgagtcagggctgccagctggttgccctgtaacactatcttgcctggtagactccctagcacaacatgccgatgtccttggggacctccagactgtggctgctggaggaccagggtgatgcgtttcgattcaccctaaagtgaagaaaggaaattgcaagagtacaacattaaagaatggtatactctgaaatatttacaccagttttcttcatgctagaatcataaaaactacaggtcagaagacacagtacaactcactttgttcatcatcctatctgtcttgatgcaatcttttttgttatttttagacagggtctcgctgtattgcccaggctagagtgcagtggctattcacaggcacaacactactgctgatcagcaagggagtgctgccctgctccgtttccaacctgggccaattcatccctccttaggcaacctggtggtcccttgctcctgggaggtcaccatattgatgtcaaacttagtgcagacacctgattggcatagcacaccacagcccagaactcctaggctcaagtgatcctcccgcttcagcctcctgagtagctggtactataggtgcatgccaccatgcccagctaatttttattttgcttttttgtagagatgaggtctatgtttcccaggctggtctcgaactcctggcctcaagcgatcctctggcctcagcctcccaaagtgctgggactatcagctgtcctgatagaatcttttctataatgcttctgctcagtaggtatcaagctatgttttaaaaactcctgatggaaggctatcttctaatgcagcagttcatttttggaaacctaataatacaaaattccttatattgaattgaaatctgcctccttgtagcttcttcccactagtcctactttttttagagacaagggtctcactatgttgcccaggctggtcttgaacttctggcctcaagcaatcctcctgcctcagcctcctgagtagctgggatcacaggtgagagacattgtgcctggctagtcctaattatctcaatgctgcgcccccacccccaccaactcttttggccctttattcagatgctagagcctctaccttcttacgctagaaactaacactttcactgagcaaagtaggagggggacaatcttagtaataagaataaaagaaagatataaatagcttttacaagtcttgcaaatataaagataattcttcaaagatgtttctttgttcccatagcatcccatacttctcataaaactttgtatcacacaattattgtgaactcttgcttaatatctgtctttcctggcagacggtgagctctgtaaggacagggactgtgtttgccttatttagcaccagctaggtacaatgtaaatgtgtagtaagagctcaaaaaatatgttaacattaactgcttccaaccagcaagtactaagtatgtggctgtcacactaactgataaaaaccaaagatggaatttaaataggctttcccagagaaagctctcatgtgctcactctctcaaagagttgctgggccctctatgaaaccaaaattcacctccccctttcactcaagtcacctgggtaggtgtagaggtcagtgtaactgcaggcttcagtgggggccctgtggccccagggtttccagcaggagctgaacccttaactggctggaggaccagctgctttactggtcggctgggctggacaatgcgctgaacagcagcctggttcccagggaccttggcggccaacactgtattaccagagacaatggaaacacctggtcgaaggggtgtgccggttagcactttggtaaaagtgacttttccaccattggctgtgcctgccaccaggggctgagctgtgctggtgataccttgggcctgaatttgtgccacatgggcaccagtgactgaggagcttggtggggccttaaggataacaatcttaggggctgactgaggtggctgccctccagcactactggaggagacagctgtggcagagacacccatgaaaggattcccttggctcaggatctcctggctcttggagacttgcaaaagtcctgatgttggcgtcgatgtctgtaagacaggttgggctggctgctcctggctggcaggctgagtggtataatcatgcaaggttatggattctggagctggagctgtggattctttggaaagttctgtgggagctgtttcctctggtggagggaccagttcacttgctgatgaattccccacatcaccacctccaccatcctggttcatctgatccaaggagtccagagagcttggcagtccaagggcttcctcaatggggtcttgtgtgacctggttaaagctgtcatcagtcagagagtccaggccaaataaatttgggtcatcgaacagatccatgatggggtctgccatcttgggaaagtaatggagggtacttctccaaggtctagggagggaaggggagggggggtactggctctcccctcccctcccctattaagaaaaaaatgtacacaatgtaagaggactactcttcaagtatagaggcaagaaacaagtgcatgtcagattgtcctgaccttcatggagcaagatggctacgtcttcagaggaagatggtggaactcctgttgtaggaatacaaatacaaatgaaaaataggcaaagttggcgatctcagagaaaattttcccttcttacgtactgttcttaatatcaaatagcatgaatataagagggaaatgtgaggaaatctgaggacggacatacagcagaaagacactcatatttctgcttcaaaactaaaactaaaagagaaaaacaataacaacctcctcttgggcacttacacctacaaactttaaagactctgtcaagagcatttggctgtctttctccgtttcttttaacaattattattctttggtaaagataaaatttaatattcatttaccttctattttcagtttttaagttagtagaactcaaaaatatgccaccagaattacagtgactctatagataaaggtttctggatatattctattgtataaatttttcttgtgttttatatatttttacttactattggcaaaaataaccacctttaaccaaggcttatagtacaatctcaccaaagtgatcatacaattttacccaggaagttttgcaacctttattctagttaacatattaatctataatgggatttttgttctgaagtcccctctcaagaaaactttctcatatttaagataaaaaaggtcaattgcaagggattcaacattgtttccaatttatattcccaacttcctcttaccatctcttacatatattttacattccagtccaactagactacacaattcccttaatgtgattcctacctgtgtgactttgcttatgatgctgtgctttctgcctggaacacgtcctctccatcccaatgccaataatctctcgcagctaaaatcctaccaaccctcaaaggtcttctactccattaagtgagccctgaacctctgacgctttaacaactgagcaacttgtgatgacttgatccctccacctcctttaaatacccacaccattgtttataccttaaaacacttatatttaatattttattataatgacctaagtctgtaatatatcctctgaaggcccaaatggttcctttgcgcaaattgtaaaaagttgcccacttctcaagatgcctggaaaactgccatactaaatatataaaaatttgttatgaatgtatgcaatgtacaccctccacaactctgtaccatggcccagctcctctttctctgggagaaagttcttggatggtggggactatgttttatttatctgtggatcccctaagaaccagcaggacatagcacatatagtagctaatcaaaaaacagttaatgaattatacttgctcgcattatctggagtaaaccattcgatcctcacagaaactaaatggtatcctttgattctaacatgagatggtaaaaagcttcctatcttgaaaacatgtcttatgaatggctgaaagtaggttcacaaaatccatgtctagggttttaagttcatgaaactagtggaaaaaagaaaagctatcaaagacagggaagtatatcaccataaaacccaaatatatgaaaaagaaatatctgttctttgtatatgatgacagtatttgacaatacaggaaagtcttgcttggtaagaccatttctcctaacttttggaagacaccagataagaaatttgtcagaggcacagtcctgactgaaggagacttttccatataacccccatgctatgttttttccttcccaacccatctcacttatccttataaaacaatataatatgggttaatatatcagatactccaaaacagacaaagagaacaaacacgtgagtcaaaattacaaagtatacatggtatctccaacaatgttaaacaagatcgtccttgcttcagtaattgcatacttttcatatctcaacccaagatccataccatctcccattcctggctagcctattccaccagctcattccagcctctcatatctaatatttgcctccaaattactcaaaatggcaatcaggaaagttatgaatgcttcctgatttaacgaaaacctactcaataacttgatattaataaatttccttcccattatcatcagcttttttccagtatacctactttggcaccaattatttttcattctctactcaccgtcagaagttaaagtatctacagctaggagtaatataaaaacaacagtgaaagtttctttttttttttttttttttttctgagacagagtttcactcttgtcgcccaggctggagtgcaatggcgcgatctcggctcaccgcaacctctacctcctgggttcaagcgattctcctgcctcagcctcccgaatagctgggattacaggcctgcgccaccacactcggctaattttgtatttttagtagagacaggttttcgccacgttagtcagactggtctcggactctcgacttcagaggtgagccgtcgcctcagcctcccaaagtgctgggattataggcatgagccaccacgctgaaagtttctactaaccagaagtttacgttgcaaatagtttatagcctgctccttattccatggagtattttgtcgcttccatgattccttgctatttgttaattctaatgctcttcctttcccccataatgatccaatcttaggcccagatttttttttttttaaataggagaaacaaggctgatggtttctgatgaatctccttacccccatatgacttagtataagctttttaaagatcaatgcattgtcatttatctctcccttcccaattttcgaaccaaatttctgcttcttctagttcggtctatgcctaataattcaaaaaccttgccaccaagtatcattacttctcagtcccatcattctcacctatactgacccaattcatctcatatttttatgctagtttcctacttcttttctagttcctatctttaaactgtccttgactcttacaagattaaaccttctcccaacatacatctaactttttttaaccctccttctactactacttgtgggtcaccctggctatatccacatacggcctatttattctaccaagctcatctatctcatgaatcctctcaaccatctcatgaattctctttccttgattcaaaccctaatagcaaaaatgaacagatgttaagttggtttcaatgcaaagtaactgcctagataaagaagtcacaccaacttttatcatattaagaatgaaaagccagtgttggcccaccagtccccaaaagagaaacacatgtatgtgctcaaaaggaaagacaaaacttagtggttgtacttagtcactttccataattacaaactaatgaccagaatcatgacagaaatcttggagggcatgtagggggtgagggatggcagtggaagggaaaagtaacaaactagtcagttaaggttaaaatccaagcccatctatctataatcgccaagtaacaatacagttacctgtagaaaaatactttattatatatgccagtatagcccttcacttcatctccttcttaaaggtgaaactactgcttccccttgagacaagtacaaactgatgttcttctgcagctttaccacctttaatacagttcttgatttttttggaaatctagagtcccaactctctcattcttatttgacattattcctcacccttgcccatttctataataaactgtctgtcctatgataaagtattttgttttaattctaccctatatttttccatctcaatctctccatacctttcaacaaagcagtgattctcaaccaggggatggagactaaggcccttaagaagggcttctgggaaccgagggtggagataaatgtgcagttcttaaaggtgtattcaatattataattttatatttatcaagtgaaaaaactacatctcattgtttaggctatttatatttattaacactggacaaagccttcttggccagtgaagatctgtaaaagacacgtgaggagtagagggcagagaaagaaacattcctggcttggcagagttaccagtatctttgggatgggataagatttcctatagcctctcaaaaggagtttatcatcatttactgtttatgatggatgagaaacactgcaagagattagttctgtcgtctaatagataaaattatgtaaaatgagctacagatatctattgcccacttatagatttctccgtagtgacaacctcttagaagacaatgaacgaatgcagtattgagccatgctgacctctttctgtaatgtgcacttttagaaagtaccactcatgaccacttaacctctagctgctcaaaggttcagaaaagaataaactattttatttacttcaaagaacaaatcttgttgttggaaactgtatcctttcaagaagatcagttgcagatagacataaatacatgttactgaaacataagatgggtagaagcagcttaatttaaatgagaaataccttgaaaataaaataatccaaagggctaaaatgaaaatcaccaacataattttaaaagagaagtattttaaaactgtaccatgaagacattcgtgagacacgaagggtctcaaatcttatacagaaatgaaaaataaacatccaaagtgaatgcaatcacaatttagggtcagcaaaggatcaggatggaaagacataggaccaaattggagccactcagatttcctaagtagatcaagatcctaggccattttctctgtcttcaccattctcactgccaaatgtgtggctactctgtttctgttttccaattactgaaagagaaagcactcacacctcaatcaagggtatggtcatttgggggaatataaggctggtaaagtaagaccttgtgaataaatcggaaaagcaaaataggcaactacgacagctaaagacatgtattttcagggggtaaagaagaaactagagagattctgcactcatgaaaaaagggaaagggcgaggtgaggaagtgaggggttgatggagaggaaaacgcgactggggtgggggtgggggggacccgggtacattacctgctcatactgccggggttggtgccagtaaggtccatacagcagaggcggaagatttctggtaactggagaccccaaaatggaaatgaggtacatgcacttgaggtaaggagctagcgggggtgccctccagggtggggatggccaagacgggaagatgcggggggtggggggtgtggatgcccgggataggagcaatgttagggcggaagctgcaggccgagaggcccgacaagccctgaaggagaaaacgagctgtgcctcaccccagtggaggagagaggtggctttacctgcagtggctgtggggggccggttcgcccctctccctgtctctccagcaccagttccccctcctcctgcgcaacctaacctgatgctcctgcccgccccgcgccatcattggctgaagcgcactgccactcaccaaaggcgaaaagacgcaaaacagcgcaaagggtgggactataaggagctcccttccccctcccccgcaggttaggttgagagcgcacggagaggcctatccggtttctagggccgaggcgaagcctgcagcttgcttgaaaaaagggggctggccagaggaacagtctcatagtacgcgaaaccagtcctggagattaaattccctaccatctactctgaattcttcaccctgaagagtataaacttgggagggagggttccgcgctaggccagctccgcctccctctgaatccccggccttctagcagccctgtcaacccctctcctgtagtgactacaccgtatcccactacctaataaaaggggccaaatcttcttccctccatcgtgggagtcagcccagctggaatatggggccttttaaagcactctttctgccacaacacataaggttgccgtgcatttttgacactgtgacccttcaataccaatacggctttttagacagtaattcctggggccctctaacaattcccgacccttagcccgctcaaaacaaacactcctcaccctctaaactcggtttcctgttctcccatctcttgaaactcagcccatttgaccttttaatcagtgtccactttgcgatgtcacttgaaatcactctaattcccagtgagactagacaaccccagaatgatggtgtgcaagcttaaatccaccaaagtaaacttgttttttccttttttgagacagagtctgactctgtcgcccaggctggagtgtagtggcgcaatcttggctcactgcaacctccgcctcgcgtgttcaagcgattctcttgcctcagcctcccgaatagctgggattacaggcgcctgccaccacacctagctaatttttgtatttttagtagagacagggtttcactatgttggctaggctggtctcgaactcctgacctcaagtgacccacccaccccagcctcccaaagtgctgggattacaggcgtgagccatcacgcccagccaggacactgttattaaaaagagcagtttagtccgggtgcagtggtggctcatgcctgcaatcccagcacttagagaggccgaggtgggcagatcgcttgtatccaggagttcaagaccagcttgggcattacatagtaacacctagtctcttaaaaaaaaaaaaaaaaaaagaaagaaagaaaaaagaaagatgccgggcgcagtggctcacacctgtaatcccagcactttgggagagcgaggcgggcagaccacaaggtcaagagatctagaccatcctggtcaacatggtgaaaccccgtctctactaaaaatacaaaaattactgggcgtagtggcattcgcctgtagtcccggctacttgggaagctgaggcagaatcgcttgaacctgggaggcagaggttgcagtgagccaagatcaccccactgcactccagcctggtgacacagcgagactctgtcttaaaaaaaaagccaaaaaaagccaggtgcagtggctcacacctgtaatctcagcatttgggaggccaaggtgggcagatcacttgaggccaggagtttgagaccagcttggccaacatagcgaaaccccatctctactaaaaatacaaaaactagctgggagtggtggcactcacctgtagtcccagctactggggagggtgaggcacgaggattgcttgaacccagcaggtggagggtgcagtgagccaagatcatgccaaggcactccagcctgggcaacacagtgaaacaatgtctcaaaaaagaaaaaaaaagggcggcttatctcctgaccattagtttcctctgaaagtatcctcaacattgaaatcctattttcttatactctgaggacacaaattaggaaaatcaacttgctttagatgtcttattttttaaagatcctagcattaccactgtcgctaaaaacacctaattaccactcctgtaaacagcaatactgttttcccattcactgtggctcaaaacctcaacagtctctaaaacctcccccctgtagccaccatccaatcatttgccaagtgtcattgattctcttacaatatataacaaagattttggagctgccaaagactctgtcaaccttcttagtgtatagatgagaaaactgaggcttagagagttgaatgtttgactatgaaactaagtggcaagttaggattcatatatctgactcctatttctgctgccatctcccttacttatgtagttgcttatgtaagagaaaagcctcataaaaaatctctctactcaccctactaatccattctgcaaccagattaatatcctaaaacacggtatggccaaatcaaacttgtgctggaaaattttcaaaggctcccaattacttaagacaatatcttatatttcctgtcttattttctaccatttgtctacatatacttgctagccaaaaaaagacaaattactattgtcgtattttttctaatctgagcctaatattgctgccttcaaattatacacatctttaatttctttctttgcattaccaaaatcttacttattatcctctaagttcaacatcaaatgcttcttattacttcaatatgtattgagtatgtaacatgccaagtaatctgctagcattagggatccaaaaacaagtaagacataatccctaccctcaactcacagtaagtaagagtgcatttgtgtatgtatgtgggaagagggtaaagagtaggcagtatgacaacagtgacaaataaaaacaattataatacaaggtgacacattcaataagaccagcaggggctcaggaggaaaaaacatcaataaagtagtttctcttttttgttgctggtttttttttcttgagatggagtctcactctgttgcccaggctggagtgcagtagtgcgatctcggctcactgcaacctctgcctcccgggttcaagtgattctcctgcctcagcctcccgggtagctgggattacaggcgtccaccaccatgcccggctaatttttgtatttttagtagagatgaggtttcaccatgttggccaggctggtctcgaactcctgacctcaggtgttccacccacctcagcctcccaaagtgctgagattacaggtgtgagccaccgcatccagccaagaaaatagtttcttaaacaatgaggaaaagttaccaggtgggagggaaaggtgggctgtaagaaagggatattcaggcagcagggacaggaagagggaaggcaaaacaaagcatagcaatgagaaacagcatgagacatgtagaggaaactctagttctgtagttcagccttgctaaagtgtaaatcgcgaagaaggaactggatagagatgaagccgaagggacaggtaagggccagagcgtggagagccttgaataacattttcttacaggtggatgaggagccactgaaacatggaataacgtaatcagaattacattttggttagctaactctggctctagggggtgagaggacagaggacacagaagcagttaggaggctgctgagaccagaaaggagttgtatagtgaacatttgctagtttttttctgctcagcaaccaaaaggccccttcctatattttccatggaaagctggatcttatctccccatatggagcctggggagatagggttcaattgcctcctccccttcctagcaaagaggaagtatgcatgcacatgacctaggctagtttaagtggatactcctgctggggaagtcttgactttgcaggagtaatgcaaagacccaggaccaaccagttagacaatatttggcaatggcagatattagagtccaactgtagcatcctatatagactggtcagcagtgtgaccttgaccttctctttggtcttccctcctttgatttcacaccattctctaaaccaggttctctaatattcccattacttttttgagccattcagtatccttgcaataaattttcttcctgcttaagttacccaaaagatgattcctgttgtttgcaaccaagaatcctaacacaattattagggcctaaattatagcaatatggttcaaaagatagtgatagaattgtttattggccttttgctaagatcaagtttaaaaaataataatgggagggaaatgacaaagccagaaacacttaagggataaaaatcagtagaacctggagttcagagggaaagatgaatagtttagccatattgaaaatgagctgcctagagctgggcgtggtggctcatgcctgtaatcccagcactttgggaggccaaggcgggcatatcacgaggtcaggagatggagaccatcctggctaacacggtgaaaccccgtctctactaaaaatacaaaaaaattagctgggcgtggtggtgggcacctgtagtcccagctactagggaggctgaggcaggagaatggcatgaacccgggaggcggagcttgcagtgagccaagattgcgccactgcactccagcctgggtgacagagcgagactccacctcaaaaacaaacaaacaaacaaacaaaaaccaaaaagaaaatgagctgcctatagtatgttaagtagtgacattcagtaggaggttggctgtatgagcctaaaagtctggcttggagatagattttgagagttattagcaactaagtgttagctgtaaaagtggagattacccagggaatgtgaagagcaggtcaaggataggaaaaactgcaaggctgggaggccaaggccaaagaattgcttgagcccaggagtttgagatcagcctgggtaacaaagggagactgtttctacaattaggccgggtgcagtggctcatgcctgtaatcccatcactgggaggcggaggcaggcagattgcttaagcccaagagttcaagaccagcctgggcaacacggcgaaaccctgtctctacagaaatacaaaaattagccaggcgtgtgacacaggcctatagacccagctgctttcagggctgaggcaggaggattgcctgagcccgggaagttgaggttgcagtgagtcaagactgtgccactgtactttagcctgggcaatagagtctgaccctgtctcaaaataaaataaaataaaataaaaaattagccaggcatggtggcatatgctgtggtctcagctacttgggaggctaaggcaggaggatcgcttaaggcttcagtgagccatgttcatgacactgcattccagcctgggtgacagagaccctatcagaaaggagaaaagagaaaggggaggagaggagaggggaggagaggagaggggaggagaggagaggggaggggaggggaggagaggagaggagaggagaagggaggagaggggaagagacgggaggagaggggaggagaggggaggagaggggaggagaggggaggagaggggaggagaggggaggagaggggaggagaggggaggagaggggaggggagaaaggaaagaaaggaagaaagaaagagaacaactgcacaaatattgttgggagagacaagagaatgttaatgactgtgaagaactggagaacctatatccattctgaagaatgtagctgcaattcacctctaattaagtcctgtcaaatacaaacacacatccaaggttgaaagaaaacttcagattttccaaaagccagaattttgactgtaaataactaattttttaagaaaactaaacactatgcaggataaagaaaacacttagctgggctgggctcagtggctcacacctgtaatcccagcactttgggaggccgaggcgggaggatcaccaggtcaggagattgagaccatcctggctaacacggtgaaactccgtctctactaaaaatacaaaaaattagccgggtgtggtggcgggcacctatagtcccagctacttgggaggctgaggcaggagaatggcgtgaacccgggaggtggagcttgcagtgagccgagactgcgccactgcactccagcctgggtgacagactgaaaagctaaggaggaacccaggagaacaacagaaattaagaatcagaataatgccttcttaagcaggtagagaaaaaacagctagagaagcaagacagtgcagtgtcacagaggcagagaatagagatttgcaggggaagagtgatcaattatatcaaacaaagcaaaaatgtccaaccatataagaattttaggactgggcgctgtggctcacacctgtaatcccagcactttgggaggccgaggtgggtggatcacgaggtcaggagatcgagaccatcctggctaatacggtgaaaccccatctctactaaaaaataacagaaaattagctaggtgtggtggtgggcgcctgtattcccagctactggggaggctgaggcaggagaatggcgtgaacccgggaggcgcagcttgcagtgagctgagatcgcgccactgcactctagcctgggcaacagagcgagactccgtctcaaaaaaaaaaaaaaaaaaaaaaaacaacactttaaaatgtccactggatgtaatacttgaaagcctttctgatacctactttccactgtcaaaccagaagtgaatctgtccatgtgagttttcatagcattatgtgtagtcctcttttaggataattatcttttactttatattttacttacatttgtatatggaaatataatgagctttgaagtccaagggacctgggttcaaatttctgtcccatcaagaaaatcaacctttctgagtctagctcattcctctacataaaggggatagcagtattaagttacaggaacatttatgaggattaatgaaacaactggcacagtgcttgacacataaccactaagtcctagtaggtacttgacaaatgttgttggataaattggaaaaaaaattgtttttgctaatatctatacctaggatactgtaatgagcctgagagagggtcactacccagattaatggcctccaaaatagtttagtttcagttggctaatacctatgagcttgagtgcacactctagctctctctccctttatattaaatctaatttaaggtgaacaggaatagctacattctagattctagagtctgaagatcatgttcaactaaatggctttggtcagcctaagcctgctctagatgttctatgtcactagtatcccattttgagtggtgagacttcacactctaaaggatccaaggaagggtcataaaaattgcaaaaacaccactcccaccctcaaacatattttttttcccatggcttacaggacaccacacttttcaagttttccttcaatctatttaaccacttttttaaaaaaaaaaatttatttgctacttttttcctataccacccctttaattgaagttcactttggtcctagaccttcttttcattctatactttcttttcaaggatgtttaattccaatacatcacctcaattattattcattattttcttcaataaattatatgcttatgtctctcatatctctgggcaagatgtcacctttgaactcttggtctgtatatctccctgcttaatccatagcttttcttggtagactctccagttcccccatccctatcccactaccacatgtgcacatacacaaactggtaatcattctccagcatctcctatctggatagtcatggttgcacagaccagaaacctaccttactacccgtacccagtattttaaattcccatctttacctcctaaagatccctcaaatccatctacttctgcctttattaccctttggctcaaaagatggctcaatttatcatgttcatttccctagactactgcaattaccttctaactggttctcttccattctgccactttaattcttacttatccttcaaagctcatttcaacaaaaagttgggccaggcgccgtggctcacacctgtaatcccagcactttgggaggccgaggcgggtggatcacgaggtcaggaattcaagacctgcctggccaagatggtgaaaccctggccgggcgtggtggctcacatctgtaatcccagcactttgggagaccgaggcgggtggatcacctgaggtcaggagttcgttcaagaccagcctggccaacatggtgaaaccccatctctactaaaaataaaataaaaatttagccaggcgtggtggtgtgcacctgtaatcccagctacctgggaggctgaggcaggagaattgcttgaatccagtaggcagaggctgcagtgaggcaaaatcgtgccactgcactccagcccgggcaacagagcaggattcggtctcaaaaaaaaaaaaaaaaaaaaaaaaaaaagtcagctgggcacggtggctaacacctgtaatctcagcactttgggaagccaatgcgggtggatcacgaggtcaggagttcgagaccagcctggccaagatggtgaaaccctgtctctactaaaagtacaaaaattagctgggtgtggtagcgggcacctgtaatcccagctactcgggaggctgaggcaggagaatcagttgaacccaggaggtgaaggttgcagtgagctgagatcgtgccactgcactccagcctggcgacagagcgagactccgtctcaaaaaaaagatggtgagatcccgtctctactaaaactgcaaaaattagccaggtgcggtggcaggcacctgtaatcccagctacttgggaggctgaggcagaagaattgcttgaacccaggcagcagaggttgcagtgagacaagatcgcgccactgcactccagactgggtaacacagcgagattccgtctcagaaaaaagaaaaaagttttccttgatttcccagactagtaacagctaaaattgctgaatgtacattacatgccaggcactctaagcaatgaaaatgtattaacatacttaattttcttcttcttcttttttttttttttttgagacagggtatcattctgtcacccaagctggaggtggcaccatctcggctcactgcaacctctgtctcccaggctcaagcaatgcctctgcttcagcctcccaagcagctgggacaacaggcacacgccaccacactcggctagttttgcatttttggtagagacggggtttcgccatgttgcccaggctggtctggaactcctggcctcaagtgatcggcctgcctcagattcccaaagtgctaggattactttggcgtgagccacagctcctggcttcttatttaattttcttaacaagactaaaataactatctctatttcacagatgtggaaactgaggcacaaagagataataccttgcccaatatcctacagctagtgaaaagtagtaccagatgcaaatttaggcagtgtagctccagaagacacattcttaaccaccttactatactatgctctaggttacatgccccattataaattatcttataacttccagtacttctcctttgttgtaaagattgaataactgattatataattgtttgatgtctactctctctcccccattagaatgcaagttccacaagggtaaaggcttgtctatgacttgtccattacagtattcccttggcttatcaggtggtaatgggcattcaatgtatttttgttgaaggaatgcactgaatttccagttgaaggtgtgtgggagagaggtttctgagccaaagcaatggcttccctcactcagactgcatgacaacaaaaggacagtagcacagtttcctaccagaaacattcagaagtatcataaaatcacaagcaccttcactttttagtagctgtagcagacacagcttttacataaagcaaaaggggttgtatggcactacacataaaagactgttttctagagtgaggtactcgctgttgacagtaatgaaatgttagttaccccgttagggttaggactataatgcctcagtggtgaccaattccagctgtggcaagaagtgaacggatgacactatatcccttttttttttttttttgagacagggtctccccatgttgcccaggtttgaatgcagtaccacgatctcagctcactgcaacctcctcctccagagttcaagttattctcccacttcagcctcctgagtagctgggagtacaggcacgcaccaccacgtctagctaatttttgtatttttagtagagacggggtttaaccatattggtcaggctgctctcaaactcccaacctcaggtgatcaactcgcctcagcctctcaaagtgctaggattacaggcgtgagccactgcgcccggccggatgacactatatccttatgactcaaaaatagagcatggattctttttttttttctaagtcaacctcattgtagattttttttttcccagtaaacccctcaagttttggtctaagtctgaagacagaaaataagagcctaatctttggggaacattagacttaggtcaagtttggactggatctggagaagttgctcttcactggctcatggtcactaaggtgaaaataatactctctgttctagatgagaaatctctaactgggccaatgttcaccttatactaccacttttgcgatccaacataagtaacaatgtatattaatttaggtaacagattcatgtcctcttcatgctcccccacatacattcctgcatgccctattttaactgagccaagtacacataaatgtgttcagcctaatagaaatatataaatatttacttaataaccagaggctatacggaattgttttcactgcaaccattatgctaaaagagtatgtgtgggaggagaaacatcataaagcactgttattatcagacttgtgcctaaaaactgaccccagtgacatgggattcatgaaattttaatgggctaaactgacttgcattggctaaaaaagtgaattatatgcaagactgaccaagtcattttcccctgtacagcttaaagtatttcacataatcttatcttcaaaataactaagttaaataaaagaaacaaactatttactctttttccttttaacagagatacaaagacgtaaataaatcttacattctcaaggttctacaattttcaaaggcacagctttaacaggctactgaatacctacctgtctagtgctgtggtcaaagacagtttgcacacaggggtcagcactgaactttttttttgttttttgagacaccgtcttagtcacccaggctggagtgcagtggctcaatctcagctcactgaaagctccgcctcccagattcaagcgattctcctgcctcagcctcctgagtagctgggactacaggcgcgcgccactacacctggctaattttttttttttaatttttagtagagacgggggttttcatcatgttggtcaggctggtctcaaactcctgacctcatgatccacccgcctcgccctcccaaagtgctgggattacaggcgtgagccaccgcgcctggaccagcactgaacttttaaaaggaggaggctgggctgggcacggtggctcacgcctgtaatcccagtactttgggaggccgaggcgggcagatcacgaggtcaggagatcgagaccatcctggctaacaaggtgaaaccccatctctactaaaaatacaaaaaattagccgggcgtggtggcgggcgcctgtagtcccagctactcgggaggctgaggcaggagaatggcgggaacccgggaggcggagcttgcagtgagccaagactgcgccactgcactccagcctgggcgacagagcgagacttcatcgcaaaataaataaataaaataaaataaaaggaggttggctggataataaatggggctttgaagtcagaccagagctcctcctactcttggttgtgttacctaacctcacagtctttttttattttccctgtaaaatgaaactagcaccacatacatttcagttattcttaagattaaaagataacatacaatgtttggcacatagtaggcaaataaaaaggaatttattattctccatccaatatcttaaaacagtaccactgaaggcttctctcaaagcaaaattactcctcagagacttggcagagctgatctgttaggcagaatggagggataccgaaatagatgtaaaagtttcacaattagaatggcaggactgctgggcaggatgaaaggactccagtactaccgtgctgagaaagcagcacaagtctttaacatcataaccatgaaacagatttcaaccagcacttgtgatctagagtaacatcccaggtaattcaactaatcacttttatgtttgtaggaatatgtcagtgtctatttcttaagtattcaatttacttcacaatacctgcttgtggtaacttttagtttccaactgactagactgtcccttggtagttcacatgcccagatccagcttacttagcttttgactccaatgactttcaggagcgtagtgaaaggaagtaaccactgcctacactatatagttaaattttcatttaaaaaagcagtcatatttgtaaaacaggcgaaagcactaaattttataggagaattgatatgcaaattaaggaagaactgactaatgtgccccagacccaggaaggggaggaaaaacaagaatgactgagtactgagtagaagaaatgaaaaatactgagtaaaagttcaatgtttatgcaacttgctagcccctattcaaaaatccactaatttgtgcagcagcaatagaaaatgaaaaaaaagatgaaaaaattcagaaatccagaaacatcttaccattagtgctgtttacttagatagatgtatatctgataaaatcatgttccatacacgaaattctgttatgatttgggtgtatctaaataagcagccaaactatagaaatcactggtttcttccagaactaaccaaaaagaaattcccatatcactaatatgacaatgtacttctgaataaccatatcccaaagaaataatccccaaagatatagtgcatccccaaagcatgtagtggaagaaaaaaagaaagcaggaaattccaaaggtttctataataacacaagagacaatctgagaaaccttaaacattttacaactctcagctgagcactgtgatatgggccggcctgtaaccccagctacttgggaggctgagatgggaggactacttgggccaaaaagtttgaggttgcagtgagctataattgcaccactgcactccagcctacataacaaacacagtaagatcctgtctcttaaaaaaaaacaaaaacagaaaaaaagaaaaaaaaaagcgtaagaccttatagctgttcagtagccttcttctcaaataaaattaagaattcagttactatatatcctttattggaaagctactgacatagtcttagaagaattacagactctgaaaacaaaaaggtgttattaggaaattactcatcactggaatattgagacactacccaaaggattggcactatcacatttaaggtgctaacatacaagggagcaatgaagcacagtcctggaaattatctggtaatttcagtagcatgctatttaattgtctttttaaaatgaaataaacaacaaataaaatgaagtcatatacaataaatatctatgaaatattaatatacaaaggaaagaaaataagggatatttcactccttaaatgacaaggtcaaccctttcttaataattacacataacagtaaatcatagttctggaaactctttccaaacaaactagtgagaatatactacaggaaaatctgaatttgaagaggttagaatgttgtctaagatccctacactgctccactgcttaaaatatattcctggatctttccctgctgaagactaatgtaaaagtaattatcggctgggtgcggtagctcacacctgtaatcccagctcttagggaggcagaggcaggaggatagcttgagcccaggagtttgagaccagcctggccaacatagtgaaaccccgactctactaaaaatacaaaaaattagccgggcatggtggcacgcgcctatagtcccagctactcggggaggctgaggcaggagagtcacctgaacccgggaggcggaggttgtgctgagccgagatcgctccattgtactccagcctgggcaacagagtgagactctgtctcaaaaaaaaaaaaaaaaaaaaaaaaaaaaaagtaattatctatgccaggctaatttctatctatgcctgctggaatttttattatcctgtaccatacaattaatgggtagaaattacgtgctttaagtctcctgctgcaacctgaaggcaacaaataagatattttgaagttgaccattttgcttcatgtaacattaacaaactaagggcctagtgaaggatggaaactatataattaataataaaagggcaaaagaaatgttacctagagaacagcttaatgagaaacgtcagagattaagatactttgtagtttaaacgtaaaacattaagtaactacaaagaggtggacttattttacaatacaaatacaatgaaaactttagagtttcatttaaagtttactcacccacaaaactgagagattaaaggagaaaaaggttatccaagacaaaatctagaatgcagtaaatgttttgttgttgttttgagacagagtctcgctctgtcaccaggctagagtgcagtggcacgatctaggctcactgccatctccgcctccctggttcaagtgattctcctgcctcagcctcccgagtagctgggcctacaggaccacgccaccacgcccagctaatttttgtatttttttaagtagagacggggtttcaccatgttggctaggatgcccgccttggcctcccaaagtgctgggattacaggcgtgagccactgcacccagccagaatgcaataaatgttaaataaactttaggtaaaagaaaacttcaggcctggtgtggtggctcacgcttgtaatcctggcactttgggaggccgaggcaggcagatcagcctgaggtcaggagtttgagacaagcctggccaacatggtgaaaccctgtctctgctaaaaatacaaaaaattagccaggcgtggtggcacacgccttaaccccagctacttgggaagctaaagcaggagaatcacttgaacccaggaggtggaggttgcagtaagccgagatcgcgccactgcgctccagcctgggagacacagggagacttgtctcaaaagaaaaaaaaaaaagaaaacttcatacaacaatcccattacatagaaatacaactgtcagccgggcgcagtggctgacgcctgtaatcccagcgatttgggtggccgagacaggccgatcatgaggtcaggagttaaagaccagcctggccaatatggtgaaaccctgtctctactaaaaatacaaaaattagccgggcatggtggtgcgcgcctgtagtcccagctactcggaaggctgaggcagaagaatcacttgaactgggaggcagagctttcagtgagcaaagatcgcaccactgcattcctgcctgggtgacacagcgagactccatctcaaaaaaaaaaaaagaaaacaaaaaacaaagaaatacaactgtcaggctgggtgtggtggcccacacctgtaatcccagcacttcgggaggccaaggtgggtggatcacttgagccgaggagttcaagaccagctggggcaagatggcaagaccccgtctcttaagaaagaaagaaagacaactctcatttgggtgctaggtaccaaagaaagaccacatcttgaaaattagataccctaaaaggtttcaattttcacgaggtcaggagttaaagaccagcctggccaatatggtgaaaccccgtctctactaaaaatacagaaattacattccctaaaaggtttcagctaaacagaagcaaaagtgtacaacgtcagtgaattaagtgaaaaggaaagtgagcaaaatcacaggaagatgaaaagatcaccaacttggtgagacaaaagaataaaagatcatagatcatgtaagaggggatataaaaagttaaagtgagataagaaacatgatagtctgtcaatgaatcaaatgctaaaggtaaaatagtaaatattataccacaatggtcacagtaatgtaaggacaggtcatgcgaagacctgcagatcaaggactggctcaaatccaactccagaagtagagagattctagaggtgaaagtggagactcgagagaaatgtttgtcttctgttttcctcccaagtattaggctcaatgtaagctcagaagatagcttaactcttccagagctgtagacaaacagttcactaaagcatttagcattcatctgaatgttacagtcctttcacatatgagaatatcaaatcttatttcttcagtaagcaaacacagttttgacacccacaacttaatcttaagtggtaattttgcttagaaaagtggctcatgcctgtaatcccagcacttcgggaggccgaggcgggaggatcacgaggtcagaagttcaagaccagcctagccaatatggtgaaaccccgtctctactaaaaataaaaaaaaaaattagccaagcatggtggcgggcgcctgtaatcccagctactcggaaggctcaggcaggagaattacttgaacctgggaggcggaggttgcagtgagccgagatcctgccactgcactccagcctgggtgacagagcaagactccgtctcaaaaaaaaagaaaagaaaagaaaagaaaagaaaagaaaagaaaagaaaagaaaagaaaagaaaactgacaaaaccaaaagagcagatgcacaggacagatcaaacatggagaatacaaaaactgttcaagtactcatacactgttccattatatcccttatcccaatccattactcctttgctatcctctggctgtgtcgcccaggccggaatgcaggggcacgatcttggctcactgcaatctccacctccagggttcaagcgattttcatgccttggcctcccatgtagctgggactacaggcacgcgtcaccatgcccggctaatttttttttgtattttttgtacttttagagacggggtttcaccatgttggtcaggctggtctcgaactcctgacttcaagtgatccgtccgcctccacctcccaaagtgctgagattacaagcgtgagccactatttcagttttaaactttctcctaagcctgtctcttcaaacttgcctactctctctttggccaatatctttcacttgccttcagatccactgacacgcctctcttgcagcagaaggtcttcttacatggaaaatgtttttcttatcataactctttttttaagggttgggataattccaaagtacttgaaataagtttctcatatcttgctctatgaggttgactagaatttgttctgaaacctattggatgaccaatacaaaagaaattcctaagcagaagacacgatctaattaactaacacaggacacgattcaaatcacaaactcactttcgatatgtaatgtgccccacaccagatgacttcagcatatgctaacctaggctgagaatccttgactgagtcgacaaactcagaaaagcatggagatgaaacgatctgtagacgccgctgtgatggtaggatgcagcagacactgataaggcagctcccctggcttgtgtttggggcgctccgctgtttattctttaatagaaaaagacagagttctaaatctttgacttctggctcactttgcttagccatacgaaagagatgggtccactatataccttttctgtgaagaccctaaccgcttcaagactgtcccttaaaaagcaagaggctgctgcatttatacagctgctgcagggaaattccctgcgacactagagacaggtaaataaactgcattcgttccaaagcagggggaagggtcttctatcagtgacgagtttacataatgcaacggaaaaccagtgagctctgcagacctgtcaaggaggatgcaaggcttgagctcctctcttcccaccatctctaaacattctccaacagcctgctcttcactgccaggagacccacagaacttacacctgagaatgagtaacaatctgcttacgcttaccccatgctttcctacccacctttattattaaaatacagaagaaaaaaaaataaaaagaagtagaaaaccctaaccacctatttctgaatccaaagtatggagtaaccaaacggggccgaggagttttcccttctctgaagagaggagaacaaggcgccgcctccaatctacactacgcccagtaatgcaatgacaagccctgaaaactccacagcgtcccaagcagtccctcgcggctcggcccggctcggaccccgcggcccggcagccaccctctcccccggcctctcacaaaggagactggttcagtccggagcatcaccccgcacctgatccctcacaactggggggcgagcagggggtggaagagagaggagaaggagttacttaaatcaaatctctgagagcctcagcttttgctgactcctggcccagcactgaggagcgggtgcgagcgggaagcctacctgtgcaagtcctggtacttcctttccaggcagcgtttcaactcaccctctccgagaacaaggcgccttccggcggagcatggccagccctcgcctcaatctagcttgctagtagtccattctccctaggctccgcccccctgcgctcccatccgccaatggcagcaccgaagcccggcctcttccagcgagctagtgtgagcgccatccaggaagtctcttgagggtggaaggtcctaggaggatgagaagggtacgtaggcgaccacaaatatgcctgattgaaaataaaatctggcggcggctcgcctctgacgactcagttcacaggcggccaggcccctcggcatctttttttgacccccgccattgggggcgctgtgaactaaaacaacacttagttacctacttctgggaagccatcttggctcggactccgggactgggtgagagtgcttaaagaatgtgaagaccctgtcggtgttctgtccgactatctaggtccagcccgaacatactctgctgtatacacttaggaggcccctcagtcacgacgtgaaaccctggagtaatgccgtatgtggttacgggcaacaaccaccaccaccctctcacttaactgtaggagtaaagcaattttaacaaatcaaataagcaaaaattaattcttctaatgagagtgaaagttgcactttcctagggtaatcctttatggacacctcactcaaaatatcaggacatgtatctattataggtgctactaagctttaggattcactgcaaattttccagtaggggcactgtgaatcagttggaaatcaagaacaggacttaaggaggaattcctttttttttttaaaggcctaatttttttttttttttttgagatggagtctcgctcggtcacccaggctggagtgcagtggggcgatctcggctcactgcaacctctgcctcccgggttcaagcaattctcctgtctcagcttcctgagtagctgagactacaggctcccgccaccacgcccagctaatttttgtatttttagtagagacggggtttcgccatgttggtcaggctggtttcgaactccagacctcaagtgatccgcccacctcggcctcccaaagtgctgggattacagacatgagccaccattcctggccaagaaatcttttttaaagttgtgagtgagggaatccttccagattattaaaggaatttctcaaggagtaacataattgcatggtcttacatgataggagctcagagacatcaagaagtcatatgagtgataagactcggccttaagctgggcgcagtggctcacgcctgtaatcccagcactttgggaggctgaggcgggtggatcgcctgaggtcaggagttcgagagcagcctggccaacatagtgaaaccccgtctctagtaaagatacaaaaaaaaattagccgggcgtggtggcagacacccataatcccagctactcgggaggctgaggcaggagaatcgcttgaacccaggaggcggaggttgtggtgagccaagatctcaccactgcactccagcctgggcaacaagagcgaaattccatctcaaaaaaaaaaaaaaaaaaaaaaaaaaaaaaaaaaagacttggccaaatacatttccctgtgtatcaaaatctgtcagccaagacaggcgcggtagctcacgcctgtaatcccagcactttgggaggccgaggcgggtggatcacctaaggtccggagttcaagaccagcctgaccaacatggagaaaccccgtctctactaaaaatacaaaagtagctgggtgtggtggtgcatgcctgtaaccccagctactcaggaggctgaggcaggaaaatcacttgaactcgggaggcggaggttgtggtgagcctagatcatgccattgcactccagcctgggcaacaagcgggaaactctgtctcaaaaaaaaaaaaaaaaaaaatctgtcaaccaaattctctcctggctactgctgccattatatcaatttgatgttagtattaagatttatcagaacaatgtgtttgtctgtaaatgcatatacagatataaccttaattattaatagtttctaggatgagagcctattatccatctggtacagaatagacctgtcatcaaaggagctatagatattatggaaatgggaacaggtgtgcctgaaccaatttctggtacctacactgatcttagtatgatttccaatggtcttggccttcaaaaaccaatggacattggtaagactatagatggaaaaaaaaaaaaagtggacattatttcataactaccattcttcatatggggtggcatatccactttttataattcttcatgaccacttcactcagaatacagatgattttgcccagatacttttttttctcatgcttcccttacaattggtgcaatacccaagtacagaaggtcataagtcggcttggttaatagaacaagatatgggcattaatattaaaaaactgtgctccaaaatatcaaaatggtatcctttattgactctgaaagcagtagctctaggcagaatgctgtctttgaccaatcctctaatgcttctcaattgctaaagattgtttttttgggtagtaaaaaaaaaaaaaacaaaaaaaaaaccttctgtacagaaactagtttttattactttagttttcgcccagaggtaagggggcaggctaactccaagttcaacagcttcaaatcctttttggaatcagataggattttaaaaacaaaacaaaagcataaccaaagcaataccccaaatgtcttccaacttcctgtggtgcactgtcaactattactactactactggggtcagaatcgagtatagcatgaatcccaaagaggcttcttcattatctttgatttaattccctgagaggagagtatctactaatgtttgggatacaattagaaatgacacatggagtatgaatagctttgatacatgcatatatttaataatgaaacaattcatcaacagcaaaaagaaagtagaaaaattcgtaagacctcagggctgtggaagagaacgggacatcaaggaaaaaagatatatatagcaaccaacccagaaggctgcatgatgagtgaagcaaaggcaagtttggctaagatagtattatatgctctgaaaagagaatggctggataggtacccacttatgtgactgcttactagcaggcagccttactgtatgcctcatggaatggaggcaaaaagccagggaaaggtgggaggggagaaggaagagaactgtataaaacccagggtaaacaaatgagtggggcagaattacagagagaggactctaaagtcttttgtttccttgaaagtctaaaataaaccttaagtttttaactatgtcagtcaaattcaatgaacacataatgagtagcactaggcactgtaaaggaatgatagggggaataatttataaaaataaaggaatgacatggatcctgctctcaaggagcttacaacttatacggaaagacaagattccacacaaaaacaactgcaaaccatatttacatagtaacatacataaaaataaatatacatataaatagacatatgaataaccaacatatgaaaactaaggaatattgtgttaataactgcttagcagtacctaagtctgttactaaagaaaaaatttttggacttttaagtataattagtggagagtagggcatgtgcaaaggtatggaactaggaataaatatgtcacattcagtaagtagattagcctgattggagtagaaagtctaggtctagttaagaagggagtttgatgaaacagtagaagtctatctggtgaaagacactacaatgttagatctggcccctaaaataaaatgaacagggaacaaatgttttctttaggtaataataagtggccacatgtccctgaccaacttcactgctcttaaaagttttgaagttacactaagagatagaagctaataataggatagtagagaagtactcagtgctcttgggcaagtagaggaaactgccttctacaagaattcttaggaagtggcaagcagacacccaaaggcaaggaagaaaaaaactcaatgaaattccgaggcagaggatctatcaaccaaaggccaactagatctaggtaattgcaagtgttcaaatagaatgtctttgaccctaattcttagtgggaagtggattgtatatgcttacgaaattatttatttaggccaggcacggtggctcacacctgtaatccagcactttgggaggccaaggtgggcggatcacgaggtcaagagatcaagaccatcctggccaacatggtgaaaccctgtctctactaaaaatacaaaaatgagccaggtgtggtggcacatgcctgtagtcccagctactcgggaggttgaggcaggagaactgcttgaacctggaaagtggaggttgcagtgagccaagatcatgccactgcactccagcctggagacagagtgagactccatccccccaaaaaaaaaaaaaaaaaaagaaaaaaaaaattatttatttatttgagacagagttttgctcttgttgcccaggctgcagtgcaatggcgtgatcttggcttagcgtaaccttcacctcctgggttcaagcgattctcctgccttggcctcccgagtacctgggattacaggcatgcaccaccacacccagctaattttgtattttcagttgagatggcatttctccaagttggtcaggctggtctcgaactcttgacctcaggtgatctgcccaccttggcctcccaaagtgctaggattacaggcatgagccatggcgccccgccatgaaattattttttaactactgtgataatcaactttgatcctaacaatttaagaaatttgtataggaggataagaagaaccctaatctatagggaatgctcatgtccctgaaggaggacaggtcagtaagggcccaaattctctcctggtctttaggtggaaaggcaaaacatcacactttaaaaagaggctgctctcagccaaagcaagaaagacctctttcattaagcctattgatctgaagctattccaggaaggacaaaaaaagttcaagccagatgttcagcagcagccagagttggaccctatgtcacgagagttccgctgggaggcactgggtcccactgatgttgaaattgactgttggggcccaatcttgatgccatttgcctgtaaaagaaaagaggcaatagttcccacctcagtgttaaagtgaatgagagacaggagggggctatctctgcttgtatcccagggtagaaagaaaacagaaaggggagaaaggagaaatcattaattatattttctaaaagcagatttgaccttggcaggtaaccagatgccctagccacgctgatgtggaacaataatctgtgacagtaagaataagatgactacctgtggtctaaatatcctagttgactacagtggcttttgtgcactttttttttccttgaggaaatgaggtctccctatgttgcccaggctgcagtgcagtggctattcacagtatgatcagtgtgcactatagcctcaaacttctggcctcaagtgatcctgcctcagcctcccaagtagctgagactatgggtgcgccactgcacccctgtgctcattttagagacggagtctctctttgttgcccaggccggtctcaaagtcctggcttcaagcaatctccccagctcagcctctccaagtgctgagattataagcatgagccgccacacctggcccctgtgctcatttttaagggacaatgttatacttaaatgtcatagctacgtgcagaatcagggtgtgacgaggtagaagtggaggcggcaaagtgcagaagtagcatatgattctttttgtcttgttccagaatttactttatagaaattactctcctaagcaattatgaattatacctcccttacgttctagaatagtaaaaaactgaggttgacaagaaaatctcccatattgtgtaagtcttttaaatcaccaataatctctttaagcattctgagtgtcagacttgagaaaaacagaaaatgatgacaggtctctgtgtacctagatttaaaaaaaaaaaaaaaaaagtgttgaattggcagagcttttaaattgtataatgatagatggggaatgtaagcattccattctagggaacctccagttgtattcagaacaagccaaagttaactgccagcacttctaccctttcttacctcattgtggacatcaaataaaccctgctggatcttcctatatatttctttggctgtgttaatgaaggcctgaaagagacataaatcgtatcatcagtctcaagttcaggtagagaaatgagggaaagagaatattaattattattcatatttgaatttctaaggtgaattaggaaccattagaagacagtaaaaaacatagaaggtcggttgggtgcggtggctcatgcctgtaatcccagcactttgggaggccgaggcgggcaagtcacttgaggtcaggagttcgagaccagcctgcccaacatggtgaaatcccgtctccactaaaaatacaaaaatcagccgggcgtggtggcgcatgcctgtaattccagttactcgggggccaaggcacgaaaatcgcttaaacccaggagcgcaggttgcagtgagctgagatcgcaccactgcactccagcctgggtgacagaacgagactcagtctaaaaaaaaaaaaaaaaaaaatcaaaaaagaaaaaaaacatagaaggtcccccaaatgtccttgtaaaagccattaagagtagtttcaaacacaaaaggattatggggtattctggtactgacccaagatgttcctaggctggcaccttccacaaataaaacaaacatactctattctccactggttaccgaagataccatcaacaccaggcctaggaatgactacagtagaacccattagacactccaaccagagtgatttactagtaacaagtgtggtgtctaatccacacttgccaactaatgttacccaaagcaaaagtaaaaccttgggaatcagggtaaaagaaaatgggacaattcctttaaaaggaatgagacatgtagtcactacgatcagaagacattctttctttttttttttttttggagatggagttttgctctgttgcctaggctggagtgcagtggcgggatctcagttcactacaacctccgcctcctgggttcaagcaattctcctgtctcagcctcccgagtaactgggactacagacacacgccgccatgaccagctagttttttgtattttagtagagatggggtttcaccatattgcccaggctggtcacaaactcctgagctcacgcaatctgcctgccttggcctcccaaaacgctaggattacaggcatgagccaccgcgctcggccaagacatcctttctttaccaatttcttataggagaagagaattctgaatacaaggacaaataatggtgtaatctctaaagagctttccccactgttttccaaatagtacctcttcaacattgcaggctgttttggctgaagtttccatgaatataagtccatgctccctagcaaaggcctctccttcttctctcttcacatccctgcgggactctaggtcactgcaagagattaattaaggagaaaatttaaaaaaaagatccaagtgaaagaggaaagtctatttctaaaagaattccgtcgtggtttcaactgccagttatttcataaagaatgtagatcctacatgatactcttatacagagttactgatttttgtagcatcttggaaaatattctttagttttgggacagctgctgcatagttgaagataatacctcactctattacagagaaaatggcttatcaagggttaggcaagcccccatagttacacaaagcttatgctctattgcttgtttttccaatgagatcaaggagagcaaagtatagatgaggaaaaaaaaaaacttggctgggcacagtggctcatgcctgtaatcccagctctttgggatgccgaggcaggtggatcacgagttcaggagttcaagaccagcctggccaagatggtgaaatcccgtctctactaaaaatacaaaaattagctgagtatggtggcaggtgcctgtaatcccagctactcgggaggctgaggcaagagaattgcttgaacatgggaggcggaagttgcagtaaactgagatcgcgccattgcactccagcctcagcgacagagcaagactgtctcttgggcggggaagaaaaaaaggaaaactctagttactagaaagcagaaaagtcataagatgtcccatccagcagtgatgagcatcttccttttttactggaatcaagccacaagaagagaatgagccaggaataaggaaaacacagttgtcttaagtctcactggtttcgttactagtgcatataaaagcagcttgccaccagggaattcagagacagtgatatggataaaattaggtgaaaaaaaagataagagctaaggactgaaaaagggaataaaaatggcaacaaaagaccttatgaaaaacaggataaaaggctgcagagctgggcgtggtggctcatgcctataatcccagcactgtgggaggctgaggcaggaggattacttgagcccaggagtttaagaacagcctgcacaatacagtgagaccctgtctctacaaaaatttaaaaatcagcagagcgtggtgacacatgcctgtagtcccagctacgtgagaggctgaggtgagaggatctcttgagccctggaaacaggttgccgtgagctgagcacgttactgtactccagcctgggcaacagcacgagaccttgtcgcaaaaaaaaaacaaaaccaaaaaaacaaactgaagaataaggcaaggttgggctgtttgtgattcgtatttttcaatttgaaaattttcatttgggaggtttccagttttccaactccttggaaaaaaagtgtaagaccattaaagaacaacaaatctacaatattttaatttattataccatcagctgtgtgaagaccagggaagatctaaatgtcaaccctcccaaatttgtacctctagcccagatgcttgactaagcaccagatttgtacatttgtgaattcttcatttccacactgatacataaaacggacttcaaacttaacacatcaaaatggaacttcttttcccctagcctgtgtttgctgcaggcttctgtatctcagtaaatggcataagccaaaaaccaaagtgttattattgataccctttgctccctactccaaatatctaatccattccaaagtgaagtacttccaatatgtaccttaaaattatcctttctttctctttccagggtcacttcctagaccaagctaccattctttctcatgtggactattgcaactgggatactacttcagtccttgttctcctccagagtgatcttttaaaatctgatcaagccacttctctacttaaaactttaaaatgcttcaggtgtatttatttattattatttttaatcccccatctcccaagcttcaatttccatgtatttagaataaaatccaaaacccttactcaggcctctaaggtgctataaaatctggtccctacctacttttccaacctcatcttgcactattccctcttgatttagtccaatcacactaggtttctttcaataaacgtgtcaagcttcttccaagttcaaggtgtttgtatagtttgttccccccaagtaatacccttttaaaaaaatctttgcccagcaggctcttgcccatccttcagatcccagcttaatatcactcctaatcaaaagtaggtaccctgttattctttcgtagcaccctttttcctccattgcatttatcacaatttacaatttgatacaaataattttatatttaacatctatgcccccactagactgtaagctgcacaagagcagggggacgacttttttccaccttgcaaactcagaatctggcacagtcgttttcaatacattgactgatacactaaaaataattagcaggatgggtgtggtggctcacgcctgtaatcccagcactttgggaggccgaggcaggcggatcgcctgaggtcaggagttcaagaccagcctgatcaacatggagaaaccccgtctatactaaaaatacaaaaaaattaactgggcttggtggcacatgcctgtaatcccagctactcgggagactgaggcaggagaatcgcttgaacccaggaggtggaggttgcagtaagacgagatcatgccattgtgctctagcctgggtgacaagagtgaaactccatctcataacaaacaaatgaaaacaaacaaacaaacaaaaaaccaattagcctgtggccacagttctcaaatagtacactctgggcactactacaaactcacaagggtgccatgggatacctcaaacttttgagaaaaacacagtaacactcaacacaaggatacttactacatgaattacaagcttaagacagttgcaatgtcaatatcagaccatgataaaattcgttcaatatcttcatatctctgagaagctgtttctggcagttgctgttataaaaaagcaagcactacacaaaaatcaatatgaaatgggaaatgagagtagcagtgtgcaatcgtgattccaaggtttgagaagctatgcagtgcccaacagacacatagaggtctttagtaagtaactgttgctatttaagaatgaaataatttttttttttttgagacaaagtctcactctgtcgccctggctggagtgcagtggcactatctcagctcactgcaacctccgcctcccgagttcaagcaattctcctgcctcaagctcccaaatagctgggactagaggtgcgtgccaccacgcctggctactttttgtattttttcagtacagacggggtttcaccatattggccaggctggtcttgaactcctgactttctaatctacccacctcggcctcccaaagtgctaggattacgggcttgagccaccacgcctggcatattttttcttttttttatatagggtctcactcctgttgctgaggcaggagtgcagtggtacaattacagcttcattgcagcctcgacctcacaggcccaagtgatcctcccacctcatttaaaaatttttttgtataaacaaggtctcactatgttgcccaggctggtcttgaacttatggactcaagcaatccttccagagctgggattacaggcatacgccactgcgcctggcctttttattttcaaacagttactaagcggttataaaaaatactcatgttgtttgggtataactatttaacaaaactattaggtatttcttttggcctatgggtgtcaaaaaaaatttactgataataaccagtgttgttaaggatgtagagaaactggaatccttgtacattgctggaaagaatgtaaaatgagacagctgctatggaaaatggtatggtggttcttcaaaaaataaaagaattaccatatgatccagcaatcccacttctgggcatatacccaaaagaattcagagctgggacttgaacagatccatgttcatagcagcattattcacaatagtcaaaggatggcagcaacccaagtgtccatggacagatggataaacaaaatattgtggtatatgcatacaatgaatattactcatctttaaaaaggaaggaaattctgacacatgctacaatatggataaacctcgaagacattatgctaagtgaaataagccagtcacaaaagcacaaatattacatgagtctacttgtatgaggtaccagtagtagtcaaattcataaagtagaatgatggctgtcaggggctgagggatgagggggatgggggagggaagatggagagttagtgttgaatgtgtatagagtttgagaagatgaaaaagttctggagatggatgttggtgatggctgtggaacaatggatattcttaatgctacaggactgtatgcttaaaaatagttaaaatggtaaattttgtgtcatatatattttatcacaacaaaattttttttttttactgaaacactaagaccactataaactgagaaagtttggggatcaatgtgcatagagtacctagatgactcctgttaactattattcacatggatacaattttacctcttattcccaatgagcatgataaccatgttggaactagagtgctgccgggcatcctctaaccatgaggtcaggtggttgaaggtttcacgcctacagcagaaaaatttagaatgtgggtcagagacacatttcaaaaggccaaaacaactccaagcgtatacgaaaagaggggaagccatacgtgtaaagaaaaatattagagaggccattcctagttaacatccttaacagaatcagtagatagaaaaaaaaaaaaagctttagaggatttagggaagaatctccctcccatgcaccagatctggctcaccttgtaatgtcgtacaccagcagtgctccagctgctcccctgtagtaggaacgggtgatagaacggaaggattcttgcccagcctttcccaccaacatggcaacaaaaaatcccaacaaaaccaggttatttccacagaaccgacttgatcacatgccaccctaatacaaaggacttaactaaaaaaagaatttctattacgaaaagagaattagggaaagaaaacatgcctgcccgagaagaaacccaagtgggaaatcaatatttttctatgggagtgcattgatattttgggcagtcacttactcttcctgagagactgtccatcagattagtggatgtttagcatcctagatcccagtcactaaatacctgtggcaccccagtcagcacgataaagacgatgaagacatttgcatacatttcccaatatcctcataaaagaacaactggaaataggactggaaacggagtgtatgtcatttttttcaatcccaaatatgatattgaacacaccatattaatctttctgttcccatttctttatctgtaaaaaggaaagttatcttagaatgccaaaacctggtctaatagaaatttcattccaatgaatcaatataaaaattagattaaaagcacttcaactgattatcttctaactgacctttagtgttccactgataatgcaagactacctagatgtcccttgctgggcttctgtcatgggaaataggaataacaaacagagaaagaagcccagggcccagcatagagttttcctagaaaaatccaaatgttcacactctaatctcatttccagttggacaaagatattaagttctatttaaaactgagtaatttattaatgcccccataatactgggtacttttgctttcttgatggactagttctttttttttcctttagggaaaacaaaaacattttttaaataatatgaataccctgtacattgaatctatcctattaagaaagttttcacattcttgaaataatttatccttacatccctacataacaggaggtaagactataatttataggttacaaatgggagaatcatgattaaggatgtgggaaaataaatggctttctcatagtataataccagtaacagtggtaacactaattataacactgcaatagtactataaactactttttggcatataaaatgtgctacgaactttaagagacaattacatatattatttcatttacttctcttagcaaccctggggccgatattattattccctttttttttttctttttttttttgagagggagtctcgctctgttgcccgggctggagtgcagtggcgcaatcttggctcactgcaacctccgcctcccaggttcaagcaattctccttgcttcagcctcccaattagctgggattacaggcgcccaccaccatgcctggctaatttttttgtatttttggtagagatgggttttcactatgttggctaggctggtcttgaactcctgacctcatgacccacccgcctcggcctcccaaagtgctgggattacaggcatgagccaccgtgcctggcttattatttccttttaaaaatggggaaaatgaggctcacacaagtttaataaacggccccaaatcataaagcttattaagtgctagagccataatttaaacttaggatcttagtacttcctaggacaaaaacttgtcctcttagccactatatcatataacctaaactggggtttgtaggtgagaagagaattccagtatactaactctaaggttaattttccaacaacagaagaatctctttctataagaatcatagaaacatgtgagtgagttgcatagctgttagagaatcagaatcggaaaataaaaactaattctgaagtcccctgtcataatactaataatattttaagattaaaaaaatacttacagttttatatttactccctaatgtcttacgttatttgggtcttgttttccttttagcacttactttttctcctcttctgctatggttgtaagcctccctctacttccctcacagcctaccaagaactaaaagggaaagtttgagggaggcccacatgatggttcaatcacatggcagcatttatctttagcagctgaaaatgctatcagtgggtcatgagaaaaccttttaaaatcaaatcactcaccaggcgcagtggctcatgcctgtaatcccagcactttgggaggccaaggcgggcagatcacgaggtcaggagtttgagaccagcctgaccaacatgatgaaaccccatctctgctaaaaatacaaaaaaaaaaaaaaaaaaaaaaaaaaaaaaataggtgggcgtggtggcgcacgcctgtaatcccagctactcaggaggctaaggcaggagaactgcttgagcccgggaggcagaggctgcagtaagccaagatggcgctattgcactccagcctgggcaacagagtgagactctgtctaaattaaaaaaaaaaaaaaaatcactctacttcatctcattccagttcatgagccaaagtttgtgaaccagtaagctagaaagagtgagcagttcaatttggtcttgtctatatcagtctcaggtatccttggccatccccagtaaaaaaatctgaagcagcaggctgggcaccgtgggtcatgcctataatcccagcactttgggaggccaaggtgggcagatcatttgagctcaggagtttgagaccagcctgggcaacatggtgaaaccacgcctctaaaaaaaatacaaaaaattagccaggtgtgatggcacacatctgtagtcccagctacttgaggggctgaggtgggaggactagttgagccggggaggttgagggtgcaatgagtggagatggtgccactgcactccagcttgggtgacagagcaagaccctgtcaaaaaaaaaaaaaaaagaaaagaaaagatgcagcagcaacgaactaagatgaaggtttttttttccttttttttttttgagagggagtctcgctctgttgcccaggctggagtgcagtggcatgatcttggctcactgcaacctccgcctcccaggttcaagtgattctcctgcctcagcctccccagtagctggcattacaggcgcccgccaccacacctggctaatttttttatttttagtagagatggggtttcaccatgttggccaggctagtctcaaactcctgacctcaggtgatccgcctgcctcagcctcccaaagtgctggaattacaggcatgagccacgacacccggcctagatgaaggtttgataagataattaatagctttctaatctctcccaagtggaagcatcatactatattaagatatacagtttgaagtatcaactcctagaaagtcagatacaccattttcctaagaatcaaaatgcattccttccaatgaacggtttattaaggaaaaaaaaattttaattgcattccaaagtaaaatacaaaccaatttgatattatttgatcagtattttatattacagtaaaatacctattcattagcatgattatttaggaatacgtgtatacacacacacacacgattttttaaaatatgcttctctaaatccacataaatgccagaacaaagacaacaaaaacctttggacaacctgatctctttaaaatacctatcacagtaatccctaaacattttcatgtaggatgggtttggaagtaagtgagagaatgggtcaataaagtgggaagctaagatgggtaaacaatgggcaggagatcagggctgacaacggagaaatgaccagacttacccaaaaggcgacagactagatggacacattattatacgtatgaatcttttaaaattttcaaaatatatagaaaaccacagtgttctgaaactggttcctttttatgatttagcaaatattaatctcaagacaattttaagagggaacagaaaagaactaggccagttggatgaccatgtagttcttaaggattctgtccaaagtcgtggctctcaactttccttttttgtttgtttttctatgtatgcattctcagcagaatcaagctctcaactttcttactttcatgatccaaccatgtcccatatgagtgcttaaaaaaaaaaaaaaaaggccattgccatgaccattccattaaatggcacttattgggtttttttccccagcatcaaaacattcatctgggccaggtgccaaggctcaggcctgtaatcccaacactttgggaggctgaggagggcggatcacttgagtccaggaattcgagaccagcctgggaaacatgttgaaacccccgtctctacaaaaaatacaaaaattccccagtgcaggggatcaggggatagatctgtagagatagacggatagatggatggatagacagatgaacttaagcttcaactacttttaagacatacacttgcgtgtggtgaggagcattggggagggaaggagaggaaagggaggaaaagaaaaaaggaaaaataatgtgtacactgtttgcagatataatggctttagctctcagttcagagaagaaacagaatcacatagtaagaagtaagcaaaaaaagtaagagattttagccaaatattatttactagctatttactagctccctttaactagaatggagactaaggtattattttacttagggggaaaaatgtacaaatcaaatgagataatgcacatgaaagcaatttatctggatagggcaaaactacactaagccaagctaaattttggcattactacatgtatcaaatttgaaaatatgtacaagcttttgacagagtttccatttctgggcagatattccacaaaaattctcaaacattggcataaaaactttgtaaataaggatgttcaggctgggcactgtggctcacgcctgtaatcccagcattttgagaggcctaggtgggtggatcacctgaggtcagttcaacaccggcctggccaacatggcaaaaccccatctctattaaaaatacaaaaaacgtccgggagtggtggctcacacctgtaatcccggcactttgggaggctgaggcgggcggatcacgaggtcaggagatcgagaccatgctggctaacacggtgaaaccccctctctactaaaaatacaaaaaattagccaggcgtggtgtcaggcgcctgtagtcccagctattcgggaggctgagacaggagaatggcacgaacccgggaggcggagcttgcagtgagctgagatcacgccactgcactccagcctgggcaacagagtaagactccgtctcagaaaaaaaatacaaaaaatacaaaaaacattagccacgtgtggtggtgggtgcctgtaatcccggctactcaggaggctgaggctggagaattgcttgaacccaggcggtggaggtcgcggtgagccaagattacgccattgcattccagcctgggtgacaagagtgaatctctgtctcaaaaaaaagaatgctcagtgaaattctgcaatacttaaaaattggaaaacaacccaaatttctatcagtaggatgatggttacataaatcatgctactgacattccatgactacgcagtggttaaaaggaatgagacagatctatatgtattgatatggaaaggtccccacaacatagagattgtttaatatacaatctaagtcacacaactaggtctactctgtcacgattctatacatgtaaacactaataaaaacaaaactactaccatatatttctatgtgtttacatgtatgtatctaaatgcatagaaaaagtctgaaagcatacacgtggaatcatcagtaatgatttccctgctagagtaccaaccaagatgggaagggagaaagagtttatgtatcaaaaggggacatttactttctattctataaatttatattgtttgattttatttttactagaataaactattacttggatcgtttacaacacaaagatacagcatccagaatttgtaactgtaacagaatcaaaaacttctctctttgatttcacctttcccctactttatccccaccattagttccaccctcatcgcccctttcctttgcatcagcttttcttgttatacttggatattggtcagagactaaattattttgtactctcaccgtatcccagatttgcagtttgatttgttttccatcaatgttgaccatacgagctccaaactccacacctgtcggtaaagaccgagagaaagaatgtgattctcacgaacagcagccacgtggagtgggaggttcctgcctttcctcaatgtgttataaccatcctttgtctgaactcaatgccactaattccattattgctgcctatttgctccaattaattttgtgtttcttaaggttcttcatttcccttctagaattaaaaaattgtgctcaatgacctcaggaatgtaaccaaaaagcagatatgggaaaataaaaccaattaagaagtcaaatttaaaaaggtgaatacttttttagcaatgttaggttaatgcttaaatttggttaggtaacatttagttttgtaacttttccaaaaaactaaaaattttggaaatatttcctgacactttctcagtcactctttagtctctacttaaaacaatatttatttttttgcaattccagatgtttttctttaagaaaagagcctaagaaataggttctcagaaacaatacttttttttttttttttttgagatggagtctcgctccgtcacccaggctggagtgcagtggtgcgatctcagctcactgcagcctccacctcctgagttcaagtgattctcctgcctcagcctcccaagtaagtaccttacaggcacacgccacaacgcccacctaatttttttaacaatacattttacatttccaataattgccagaggcacaattaagcattgttgccttgttaagcattgtatcattagcccctatcgcaaagtgagaattcgctcaatattccctttaaaataccttttagttgatactgccaaatccttttctaaccccatcaattatttgactctaaataaatccgttaggaacagtggtagcttcaggtttccatacaggtgggacttggaagtagcaatatggtaagaatggggatgtaggggtttatttagaaactgcatttgcatggcaagaaagctagtttcatatatgttgtttatttggactggggttacggagataacgaagagggggtagttaaaagcctcttcaggccatgccttatcacaaacgtgtgggaaaggttaatattttccaggatcgccagtgcgtttgaggaactgttaacacactctttcatttaaaaggaaagtttttagttttatttgcctattaattctaaggcagggatgactcctcaatttgcttcttcaccaatataaaaaatgtccatgtattggtgtttactttttaaaagtaaggctggtattaatttacctcaaagcacagatgagttcataaataagcagttatgctttcgtgggattttccataaacatacaaattgtatttgaaaaaaaattatatgacgagtctatacctcacactctaaaaagttacctttcaattatatactctcccttacactactccccacatatcaacgtttcattggtcacttcattaacataagtttggactagtttaaagtagtgaggggtaactttttacttcgaacactgaaggctgctaactttccactttagcaatttagctagtcaggttttatcatctgttctggaacaagtagatgcacttacctattgtgaggtcgtggacaggctggaaccgcttatctgtaaactgcaggaggagacatgacttccccacacctgaaagagaaagcacactcccggaatcacgcagccctggaacaccttccagagtatggacttcccggaccagagaaggggggctcccgagccccgcccccggccgccccgaaccgccccgcccgtctcgaatcgcccagcccacaaagtgagccccgcccccgccacccaatttgggagcttcgaatgcccgcccgagccttgaaggcgaaccacctgagggttacctgtgtctccgatgatgatatacttgaagagataagcataagtcatggtgtcgcgtcctctgggttccgggtccgcccgacttctatagccacttacctccgacctctctagccactcaatctaccgatcttcttcttctcccccttccccccgctcccccgcccctccggctcctctagcccagatcacgtctctattgcactccccggaatcatccttaggtcgggagtaccctacgccacctccagggacgcttctagcacttctacatgcccttatccctccaaactccagggggcgatagcccagcgcctgactctctgcagccccacggcgctccttccaatcagcagagagaacacacgtccttgcggaagtgacggcagttccgagtccagtgggggcggtgggagcgatgagggtctgagacggtgggagcggttgtgtgaagatggaggtaggaacctgatagctaagaaggctggcgagagaacgcggccgaccgggttgaagcagggacgggaagccgggcggagaggcgactgacgggagaggagagagagcggggtttggggagtgttgtcagaatgtcagggtcaaaagccatcgctccaagctgactccctgctccccctaacttatccccgcgactttcttttggtttccagtttcccggaggaaatgacaattacctgacgatcacagggccttcgcaccccttcctgtcaggggccgaggtgagccagagctgccgacgccgcgggggtagggcctgaggcagcggtggggtagggtagtggggaggagagcacggactccggggacgggggctgggaaccaagggccgcaattggtgtttagagaaaagtggcggttgcttctagagcctgtggggactatctggggaagtcttgggaagttgctgtcatcagaaagcaaggtattggaaagagataacctgtttaaagagaaaagggattctggattagaagacagagtggaattgtctcctttctctggggagaaatagctacagtaatcttaggggatcgcagtggaaagaaaatgtttcagcagctgaagaaattggggttgaggggaggagcttattggttttcttttgttttgagacagagtctcgctttatcgcccaggttgaagtgcagtggtgcgatctcggctcactgcaacctctgtctcctgggttcaagcgattctcctgcctcagcctcccgagtagctgggattacaggcgtgcgccaccacgctcggctaatttttgtatatttagtagagatggcagtttcaccatattggccaggctggtttcgaactcctgacctcaggtgatccacccacctcggcctcccggagtgctgggattacaggcctgagccattgcgcccggcctaaatttcctactttgataaaaaatttgtggttacctttacctacatggtgtcagcttgttttgctaatgtcaggaggaaaggaaatagctgctagagaatataaaagagttgagtaggacatgtgtttcaatttgccagtgactcagacgttgggcacattacttcatctttgtatgtcacagtttccccagctgtcaaacagctgtaattatagtttcttatgctgttttaaagtagaagtaaaggttatgatgaaaccctgaagtgttcgttaaaaaagtttggttgaaatattgtcataatatagatatgtatcacttgtttgggagaggcaaaagagaatggtggaacagacaaaaatttctgtctttgagaaactgaagtcttgaaccatctgccattttttgaggacttttatatttattttcaaaagtggtgtggaccatttgcatcagttttttttaccaagaattgtcagtggctgttgcatgggcttatcctataatcctaacgttttcatggatgaaaatggggttgacaagggccagttgctagtttaactttttttttctttctttttttttttgagacagtctccctgtagcccaggctggagtgcagtagcacgatcttggctcactgcagcctccacctcctgggctcaagtgattctcctgcctcaacctcccaagtagctgggaatacaggtgtgcgccaccacacccagctaattttttttttttttttgaatttttgtagagacggggtttcaccctgttacccaggctctttaactcctggcctcaagtgatctgcccgcctcagcctcctaaagtgctaggattacaggcatgagccaatgtgcccagtgccagtttaacttttttgttgcttttatttattattctcataagcaggataagtgtgaatctagtatgcagcaaactttgaaatgatataaaacctaaatctgggcccagcacagtagctcgtgccagtaatcccaactgtttgggaggctgaggcaggagaattgcatgagcccaagagttctagaccagcttgggcaacgtgatcaaactctgtctctataaaagataataataattaattttaaaaaaacaggtgaggcggggtgcggtggctcatgcctgtaatcccagcactttgggaggccaaggagggcggatcacgaggtcaggagttcgagaccagcctgaccaacatgtgaaaccccatctctactaaaaatacaaaaattagccgggtgtggtggtgcgcgcctgtaatcccagatactcaggaggctgaggcaggagaatcgcttgaacctgggaggcagaggttgcagtgagccgagattgcgccattgtactccagcctaggtgaacgagtgagactccatctcaaacaaacaaacaaaaacagctaaaatctgcttggtgctttgcactcttagttgccattttcttctaagtgagatcttcatttttaaatttcattatttgagtgttgcaaatctcacattggacttacctgcatgaaattcccaatttctcctcaatcaggtctccacagtttaaattttgttatttagagtgttataaattttacgttggcctcgttcatgagaaagtgcattttaaaattaaatacaagtagctttcaagtttacccactgttcttaattctctaccccatttatgaagttgaacaatcaagaggtagccacatttaaaaaagtggttcctttttgcttttgcttttgtttttaatagagacaggatctcaccatgttgtccaggctggtctcaaattcctaggctcaagcgatcctcccaccttggcctcccaaagtactagtattgtaggtgtgagccaccatgccaggacagaagtggttccttttcacatcaagaaacttcccatgaagaatcatggtgtatagtgaagaaaagtaaatttaaagtattaacaagtaatattataataaaaaagaaagaaactttccaggtttgaatctgtcctttgtttttgtttttgtgacttaagaaatcttattttattttgccaagaaactgatagctaagttttaggctcaatttcagtagcttcctttgcctaaggctcctgtcattgttaacagttctccattttctcattacaacttctacaccttccctttcccttggtagcggtggtaatggttgtttataacttttattttaatggggttatggttttactgtgagccattccaaatatatcttagaagtaggtaaaggtaatattaaaaaaaagtttttttttacaagagaggaaatttttagactttgccgaccctcccccaaaaaagtagttgcccataaaaagttctaaccattaaaaaaaatgaataattggactccactgtaattaggaacttcctttcatcaaaaaacatgattaacaaataggcattccacagactgggagaagatatttacaatacatatatctaactcatattcagaatatatcaagtacttctgcagagtaaaagaaagaatccagtttaaaaggaagcaaaggccaggcgtggtggctcatgcctgtaatcccagcactttgggaggctgaggcgagtggatcacctgaggtcgggagttcaagaccagcctgagcaacatggagaaaccccttctctactaaaaatacaaaattagccgggtgtggcagcgcatgcctgtaatcccagctactcaggaggcagaggcaggagaatcgcttgaacctgggaggtggaagttgtggtgagctgagattgtaccattgcactccagcctgggcaacaagagagaaactccgtctcaaaaaaataaaataaaaggaggcaaaagatttgaacagtcacttcacaaaagaagacgtccaaattgccagtgagagttggcaaggatgtggataactttttttttgagacagagtcttgctctgtcacccaggctggagtgcagtggtgcggtctcgactcactgcaacctccacctctcacgttcaagcaactctcgtgcatcaaccttctgagtagctgggattacaggcatgtgccaccacacctggctaatttttgtatttttggtagagaccggttttcaccatgttggccaagttggtctcaaactcctgacctcaagtgatccacctgcctcaacctcccaaagtgctgggattatagctgtgagccaccttgcccagtggatgtggataacttaattattgctagtgagagtgtaagttaattgagccactggaaaactagcagtacctactaaagataaacatgcccccctaacctatgaccaggtaaattccactccatgatatgtacacaacagaaatgattgcatatgttcaccaaaaacatgttcacaacaactttattcttactagcttaaccctgaaaacaactcatgtctatcaacagaaaaaaatggtgtatttgtgaaaaggaatactacacagatataaaaaattaaattataaatgcaattggataatctaaacaatattttgttgagtagaaaaagacagacataaaagagaagacactatattcgttcatattttttaatgagggtcaagaataggcaaaactgaactatcaaaatagtgataccagttgtgaagggaaggaagtattcactggaaaggggcacaaggaaatgttctgcatctttgatctggatagtgataacttggatgtttgcatatgtaaaaaatccattaagctatacacttaaaatttatgtaccttacataagttgtatatcaatgaaataagaaatagtaataatttcaaaagagtagcagtccagagagagcattgcctgaggcggaaagttctatgatctgaaggcaatttaatctttctgtttctctttttcaggttggctctaatatagtggtattatgcttagagcacattggggaaataattaggcataaaggtacccatccttcagtaggaaaagtaactaacattagaaccagttcattatttctggctaaataggtaaaattttcactactacatcagtttttaagagcagttatttaaatgacccatagtaccagcgtattgttgaataaataggtgttggattaaaataaatttctctaaagtgaatgatctatataataagctaaagaaataatagattgtatgttttgggatcagagaatgaaaaaagggagggaaatggtatttttgattttttggttctcttgatatttaagcatctttgcttataaactgtaattcccaaaccagcccctccttcaaaaaggcccaggaattgaacaaaggaggaaaggaaagctaagttagaaggtaactgcatatcatgttcctgttttctctttctgtgtccaaaccacttctttttaatatttgcttcagttttagttttgttttatatttaacagtctagagtgtgatctggttatgtaatccgctaaaataaagtaagtttaggtattcatttttggattttacccataattttacagatcatttgtagtgaaaaagattttagtgaatctctacttttactatagcatgtggtttaccctatcctttttttttaaccttctgtattcttgataattgtagttatcttactattcatacttaaaggaagaaataaaacagaacccagaaaaccaccatgaaagccataggtactgaataacaaagcttttacacatcccaaggggtggtgtatagaaagaatgccttgtcgatcctacataatggaatctcaacatgtctaatttttttatcatttcccagttcattttatgtagccatgtctaattttttagtgtacaaggagaacattccagatggtttatgaggggtagtcacttgtggaacactggtcccttgttttggatatgaatttttatccttttggggttctcattaacaaatagtatcatttttatatcctgacaaagttgctgttttgttgtggtaagcagaaaaggataggcatctttgctttgccaaagcaatctgtatcttgaaaattttggaaactactattttactattagtctagtacagtaaatgtttcccttgatccttcttcctgttcctataactttttttttttttttggtgtgagaatttggtaaaaatctttgtaccttctaccttaaaaatgctcacgtaaacctaaactgaaatatcagaaagagtcatggactggaagttaagaacttccacacaataacaaaaattatgggccagacacagtggctcacacttgtaatcctagaactttgggaggccaaggtgggaagatcacttgagcccaagagttcaaggctgcagtgagtggtgatggagccatgcactcagcctgggcgacagggtaagaccctgtctcagaattaaaaaaaacaacaacaaaacaacatacataaatacatgatttgtgtactactgagaaaagttcagttcttggggaaagtttcagtttttcccatcaagaactgcgtggtattttttgttatttgtgtgtgtgtgtgtgcgcgtgtgagacagagtcttgctctgtcatccaggctggagtgcagtgatgtgatcttggctcactgcagccttcaactcctgggttcaagcgattctcgtgcctcagccacctgggtagctgggattacagacgcacaccaccacacccagctaatttttgtatttttagtagagatggggttttccatgttggccaggctggtcccgaactcccgacttttcaagtgatccacccaccttggcttcccaaagtactgggattacaggtgtgagccaccactaccagctgagaactgtgtgttcttatgctccgtgtgctacttatatctcagacaacgaccagattttttaccataccaagtaaaatagtaaggagaagggaaactgtacatatatctttttgtcttttaggaaacttttacaaatgtgattcagagattgggcatttcacaggcacacttttttctccctagtttctgctagctggaaattttctttctagcaatgtctttttttttttttttttttttttttttttttttttttgagacagagtcttgctctgtcacccgggctggagtgcagtggcacaatctcggctcactgcagcctctgcctcctggattcaagtgattctcctgcctcagcctcctgatgtagatggcattacaggcacctgccaccacacctggctaatttttgtatttttagtagagatggattttcgccatgttggccaggctggtctcgaactcttgacctcaggtggtccacccacctcggcctcccaaagtgctgagattataggcatgagccacggcacccggcctttattttctttctttttctttttttttagacatggtcttggtctgtcgcccaggcaggattgcagtggtgcagtcttgactcactgtgacctctgactcctgagttcaagtgatcctcgtgcctcagcctctcgagtagctaggattataggtgtgtgccaccatgcctgactaattttttgttcttttggtagagacgggtttcactgtgttggccaggctggtctcgaactcctggcctcgtgtgatccgcccacctgggcctcccgaagtgctgggattacaggcgtgagccactgctcccagcctaatgtcttcattaaaccagaattagaggctgggcgctgtggctcatgcctgtaatcccaacagtttgggaggtcaaggcagggtgatggcttgagcccaggggttcaagaccagtctgggcaatatggccagacccaatctctacaaaaaatgcaaaaattagcctggcgtcatggccaggcgtggtggctcacgcctgtgatctcagcactttgggaggccaaggagggcggatcacctgaggtcgggagttcaagaccagcctgaccaacatggagaaaccccgtctctactaaaaatacaaaattagccgggcatggtggcacatgtctgtaatcccagctactagggaggctgaggcaggagaatcacttgaacctgggaggcggaggttgcggtgagctgagatcacgccattgcactccagcctgggcaacaagagtgaaactctgtctcaaaaataaaataataataaaaattagcctggcatggtggtgtgcacctgtagttacttgggaacctgaggtgggagaatcacttgaacccaggaggcggaggttgcagtgagcaatatcacgccactgcattttatcatgggtgacaaaggagactctatctcaaaaaaaaaaaaaactgccaggtgcggtggcccatgcctgtaatcccagcactttgggaggctgaggcgggtggatcacgaggtcaagagatcgaggccaacatggtgaaaccccgtctctattaaaaaacacaaaaattagctgggcgtggtggcacacacctgtagtcctagctactctggaggctgaggcaggagaactgcttgaacccgggaggtggaggttgtagtgagccaagatcgcgccactgcactccagcctgggccacggagcgagactctgtctcaaaaaaaagaaaaaaaaaaaaagacagaaatggtcataatagaagaacatttcaggatctagaggaaccttgaggtctgtaagcccaacactttggaggccgaggcagtaggattacttgagtccaggagttcgagactagcctgggcaacacagggagagctcgtctccacaaaaaattttaaaaattagctgggtgtggtggcacatacctgtagtcccagctactcgggaggctggggctggaggcttgcttgagcccaggagttccagatcagcttgggtgacagggcaagaccccatctcaaaaaaaaagaaaaggaacctttaggaactctatttaaagaatgcattgttcaattatgaaaaaaaaaaatgttggtacctattgaatttgatctgaatcagtttatatttactatgctatgtgttagattgatagaatttaaagtttctaaaattccaattatctgttataattggttggggtgggggtaatcattattaggatattatcattcataacaatggttaatgatggtgattaagccattatatgtatcaggcaatgtgctaagattttatgcatgaaatctcacttatcctcataataaccatataaggggattaccattataattcccattttacagatgaagaaaacttgttcaaggtcttgtacccaggtctctctgacagcagtctcttgctattatttataaatgtctattgctgtaaatgccaccatttagattttagtgtcaaaacagaaccatagcagttcacatcttaatcagacattgtctgttagctgcatgagtggtggcctcattcagaaaagaaagaatgtgttattattgacctagttggactcagaggaagagattgggtctttagccaactggagtaatccttttcctctcttagagagaagcttggtcagagcaagactagcatttttggcattgttgaggttttctgaaaatcctatactaatgggaatctttatttgttgttaacattataatttctaaagtggagaagaagtaggaaactctgcaaatattttagagggggtaaagttcccatgacagtacattttagcatctgtttgaaaggaacctaaaacaacaaagtataattggctggctgacagcgaatttctgtgacctaacagtttagatgtaataattgtgaaataactgctctattagaatctttagagagagatttcaagaatcatagtaaacaggttataaaggctatgtcctaagtaatggtactgaaagaatttttcattagaaccataggcataatttaagacaaaagagacggtaatggtagaaaagagataaaagaattgaaaattgtgactgatgttagcagccttgaatgtaccaaatgaccaagggtatcagaagagagattggtaaaaataataggttctaagaaattgattataaaataggatcctaagcagaaaaaatgcatcctgagaatctctagtaccccattatgttcttcacttagtagtatgccatttctcctcttttcactaattcttttcccccttttttcccctacagacattccatacaccaagcttgggtgatgaggaatttgaaatcccacctatctccttggattctgatccctcattggctgtctcagatgtggttggccactttgatgacctggcagacccttcctcttcacaggatggcagtttttcagcccagtatggggtccagacattggacatgcctgtgggcatgacccatggcttgatggagcagggcggggggctcctgagtgggggcttgaccatggtaaggggcaagacattgtcaggcttaccccagctaatgggcatggcattaggggagacaaagttactctattccctgctacacttgggtattacttgtttctcttcttgtggctaaaggctcaccaacaaagacttaatttcacctgaataaatgaaatttaccatgtaggtagattttacttgaaaaataatttaaaattgtacaatgtctggtttgaaaattatttattgtggtttttgggaaaaagtgttttctgcttttattatggccttcacatcctaggattcaaatttgaatgtgatagctggcacacggagggatttattcaaaaatggcctgaatcacgttgagcagccagcagaacagagcttaaaaaaaaaaaaaaagtctgagccaaatatagtattgtggattagtatgtaatataaatcagtatattgggcttccagcacatcgaaccagtaagcacatcttcatactctatatttgatgccagactttaatattggccttatttatgctgattgcctatgtattacaattttaaaagctattattttgggagagtacagataggaagtttttctttactcaatgtgttgtcactacctatatattactgaataagttgatagctctttgacttgtccaacagtgcgacttctctgattatttttagttcttcttttgagtgcaaagaagtaaattcattaatttctgtacttttttaaaaagcttatttttttattttcatttttgaagactattttatgttttgtattttaaatgatacaatttgggtaggcagggaatttataagctgtcttaaatttaggggggaaaagtggttttttttatatttagtgtttaattagtccttctgcttctctcaggacttggaccactctataggaactcagtatagtgccaacccacctgttacaattgatgtaccaatgacagacatgacatctggcttgatggggcatagccagttgaccaccattgatcagtcagaactgagttcccagctgggtttgagcctagggggtggcaccatcctgccacctgcccagtcacctgaagatcgtctttcaaccaccccttcacctactagttcacttcacgaggatggtgttgaggatttccggagggtgaggcattccctgtcaaaatcaattctgctgtgatagtctgggataaaatttttgggatacagagcctaatcagtattctttacccttgccgtgccatctcctctgctgttttctgggtatggggttccacctcccaatttccagtttataattctcctctcaatccctattcttattggttctccatatttgactaatgtcttttaatgctatttctatgatttttagcatttctgaaaattccatacatgtggctagtttccagacataatacttgtcattgtccattgtgtaattctctcttttttctctcctacagcaacttcccagccagaagacagtcgtggtggaagcagggaaaaagcagaaggccccaaagaagagaaaaaagaaagatcctaatgaacctcagaaaccagtttcagcatatgctttattctttcgtgatacacaggctgccatcaagggacagaatcctaatgccacttttggtgaggtttcaaaaattgtggcctccatgtgggatagtcttggagaggagcaaaaacaggtgagcaaatattgaggaactagtagtgaatgttccagaagtttttaaagagataaaaattgaggttttcttttttcttacatgtccttatctaatatcagctgtttgttaatgacacttaaatatcatcccttgtcttcgaagttgcagccatacactcactccagaaaacctatttaaattttttttttttgagacagagtctcgctctgtcacccaggctggagtgcagtgccgtgatctcagctcactgcaagctccgcctcctgggttcacgccattctcctgcttcagcctcccgagtagctgggactgcaggcgcttccaccacactgggctaattttgtttttgtatttttagtagagacggcgtttcaccatgtcagccaggatggtctcgatctcctgacctcgtgatccacccgcctcggcctcccaaagtgctgggattacaggcatgagccactgcgcccggcctatttaaaaattattaataggctgagtgtggtggctcatgcttttaatcccagcactttgggaggccagggcaggaggattgcttgagcccatgagttcgagaccatcctgggcaacatagggagacccccgtctcacagaaaattagctgggtgtggtggcatgtgcctttggtcccagctgtggaggctgaggcgggaggattgcttgagttcaggatataaaggctgcagtgagccatgtttgtgtcactgcactccagcctgggtgacagagcaagaccccggctcaaataaataaataataattgttataggccgggcgcggtggctcacgcctgttaatcccagcactttgggaagccgaggcaggcggattacgaagtcaggagatcaacaccatcctggctgacattgaaaccccgactctactaaaaatacaaaaaaattagccgggtgtggtggcatgcctcaaatcccagctactcaggcggctgaggcaggagaattgcttgaacccgggaggcagaggttgcggtgagccgagatcatgccattgcactccagcctgggcaacaagagtgaaactccatctcaaaaaataataataattgttacagaagtactgcatctttacaataactctcaaaaatagctaccatttcccgcttttaaggtggaaactggagcccactgcccagttaaggtcatataacatttaagtggtaaagttgagacacaatccaggttctttaactcttcccatgtactttccactaataatgtctcctataattcctcatgtagtgtccttctgttcaatttttagatatttaacttttctaagtctcattttttcccccatttataaaattaggctattacttgataagctgcatgctgtggctaactctcaaatccactaccaagtttggatttagaattacttgtttgtttgtttttgagatggaatttcgctcctgttacccaggctgcagtgcagtggtgcaatctcagcttactgcaacttccacctcctgggttcaagtgattctcctgcctcagcctcccaagtagctgggattaccggcatgtgccgccacacccagctaatgttgtatttttagtagagacagggtttcaccgtgttggtcaggctggtgccaaactcctgacctcaggtgatccgcctgccttgtcctcccaacgtgctgggattacaggtgtgagccaccgcacctggcctattttttttctttctttttcttttttggatttagagtttaaaaactttttagagctagcccagattcaaaggagggggaaataggcttcagctcttgaagggagaaaggtcatatgggaggagttgttgtggccatctttgcaaacaatttaccacattccataagggaaaatatactggttagacacagtcccaggctaagacacagtttttggattagggtttattttgtatttatttatttatttttttgagacagagtctcactgtgtcgcccaggctggagtgcagtagcacaatcttggttgactgcaagctctatctcccaggttcacgccattctcctgcctcagcctcctgagtagctggactataggcgcccatcaccacgccgggctagttttgtttttgttttttttagtagagatcgggtttcaccaggttagccaggatggtctcaatctcctgacctcgtgatctggccaccttggcctcccaaagtgctgggattacaggcgtgagccaccgcacctggcagattagggtttatttttgttacagaagtgagcatgggttgatgtttgccttaaatgtagctattctcggccaggcgtggtggctcacgcctgtaatcccagcactttgggaggcagaggcaggcggatcacaaggtcaggagatcgagaccatcctggctaacacagcgaaaccccatctctactaaaaatacaaaaaattagccgggcgtggtggcgggtgcctatagtcccagctactcaggaggctgaagcaggagaatggcatgaacctgggaggcagagcttgcaatgagccaagatcacgccactgcactcgagcctgggcgagagagcacgactctgtctcaaaaaaaatttaaaaaaaataaaataaatgtagcaaaataaaataaatgtagctattcttgccagactcctgtcgattggttgtctttcagaggtatgctcagtggagtgagtctgccatggaggttgtcttgactgttagctttcagaattgaattcactgatagaggttgtcagtgattagactaagatgaattgtcattcattgataaataatacagaactatcagtctttcctaagagtatggggagttttgtttttttttttaaagtctcttttttgcaggtatataagaggaaaactgaggctgccaagaaagagtatctgaaggcactggctgcttacaaagacaaccaggagtgtcaggtaagagggataggatagaatgaatatttaaaccagtaagaagttttttggaagtgtttgttagcagttttaagaagtaaataccaccaagtgattgattaattgatagattgatttatgtcttcttttaggccactgtggaaacagtggaattggatccagcaccaccatcacaaactccttctccacctcctatggctactgttgacccagcatctccagcaccagcttcaatagagccccctgccctgtccccatccattgttgttaactccaccctttcatcctatgtggcaaaccaggcatcttctggagctgggggtcagcccaatatcaccaagttgattattaccaaacaaatgttgccctcttctattactatgtctcaaggagggatggttactgttatcccagccacagtggtgacctcccgggggctccaactaggccaaaccagtacagctactatccagcccagtcaacaagcccagattgtcactcggtcagtgttgcaggcagcagcagctgctgctgctgctgcttctatgcaactgcctccaccccgactacagccccctccattacaacagatgccacagcccccgactcagcagcaagttaccattctgcagcagcctcctccactccaggccatgcaacagcctccacctcagaaagttcgaatcaatttacagcaacagcctcctcctctgcagatcaagagtgtgcctctacccactttgaaaatgcagactaccttagtcccaccaactgtggaaagtagtcctgagcggcctatgaacaacagccctgaggcccatacagtggaggcaccttctcctgagactatctgtgagatgatcacagatgtagttcctgaggtgagcctttgtttttaagtctttagtctagtggaaatgtataaaaatgtttttggttgacccaataacagtgggggttgctactagcatttaatgcccagcaaccaggagcacaaaacatcctgcagatgggagttccttgcagcagttgacttctcttacccaaggtactcatactgttttttttttgtttgtttgtttttgagatggagtttcactcattgcccaggctggagtgcaatggtgcgatctcggctcactgcaacctctacctcctgggttcaagagattctcctgcctcagcctcccgagtggctgggattacaggcatgtgccaccatgtccggctaattttgtatttttagtagagacggtttctccatgttggtcaggctggtctcgaactcctgatctcaggtgatctgcctgcctcggcctcccaaagtgctgggattacaggtgtgagccactgcacccgccctgttttgttttgttttgttttgtttttcttgagacggagtctcgctctgttgcctgggctggagtgcagtggtgtaatcttggctcactgcaatctccacctcctagttcaagtgattctcctgcctcagcctcccgagtagctgggattacaggcgcccaccactacacccagctaattttttgtatttttattagagacagagtttcaccatgttcattgggctggtcttgaactcctgacctcgtgattcgcccgcttcggcctcccagagtgcagggattacaggcgtgagccaccgtgtgccccatagtgtttttagtgagatacattaagacagtcttctgccccagaccactccttaactaagcagaggtcactagttcaactggacaggatatagcctaaacagttattattcagagttgttacccaaggatcctaaactttggacatgcaaagcttttcatttctcctaggtcttaagttccttagcttgatgttttaaatgtgtgtggggcagggggtataggcagaaaaatttaattggttcataccgttattttttaaaacagacataaatatggccaggtgtggtggctcacgcctgtaatcccagcactttgggaggccaaggcaggtggatcacctgaggtcaggagttcaggaccagcctggccaacatggtgaaaccctgtttctactaacaatacaaaaaattagctggggctggaagcggtggctcacgcctgtaatcccagcactttgggaggccgaggtgggcggatcacgaggtcaggagatcgagaccatcctggctaacacggtgaaaacccgtctctactaaaaaatacaaaaaaaattagccgggcatggtggcaggcgcctgtagtcccagctactctggaggctgaggcaggagaatggcgggaacccaggaggcagagcttgcagtgagctgaaatcgcaccactgcactctagcctgggagacagagagagactccgtctcaaaaaaaaaaaaaaaaaaaattagctgggcacggtgatgggcgcctgtaatcccagctacttgggaggctgaggcaggagaatcgcttgaacccgggaggcagaggttgcagtgagctgagattgtgccacagcactccagcctgggcaacagagcaagactccgtctcaaaaaaaaacaaaaaacactacctctctattcccactgcttgactagccaggcttaacagggaaaaaaaagcattagcacatggccacctttctcctgatgggaagaatcttccaccattctgcttggcaaagttctgaagctggactatagaggggagaccaagaactcaccttcttctgcagttttgccccccagtgtgaggaattctaatacctgttgcttcattggtttctacagataatttagctaactagctagctaggcagggagcaatctaatccaccttggtactcttcttcttctcacaggttgagtctccttctcagatggatgttgaattggtgagtgggtctcctgtggcactctcaccccagcctcgatgtgtgaggtctggttgtgagaaccctcccattgtgagtaaggactgggacaatgaatactgcagcaatgagtgtgtggtgaagcactgcaggtgagcttacagttctcccttttataattcagctactggtcaattctactgggaaacataggaatcttgagcataaaatcagcatctcagtgtcaccttaccttaggtagagtaggttgctgtatctggtctactagaaaagctcccctgcttaagagcttacatttgccacataagccaaagatgatgtaatcagcagttcacatttttcagttaccacatacctctcttatgtatgctctttaaaaatataataccttaagctgttagtgtttgcaaatattagcttttcaattcttggtgcaaatcagactacttagggaactagaatttggggagaaatggtaagtggaaagtaacacataataatttgcaatttgtgaaggaaatggggagatggttggaatattttacccctctccccaaattttcctgggaatttcctatagctgtaggacaaggcatttctatttcctatttcaaaaactctgcagtaaattagcattgcctctacttctgacttttaagcccactgttcttatattttcaaggtgatactatctcaccataatgctgtaggaaattatctgggaacctatttgtttaagacagataaaaaatccagctgggccatacagtgaaccccatctctactaaaaatacaaaaattagccgggcatggtggcaggcacctgtagtcctggctactcaggaggctgaagcaggagaatctcttgaacctgggaggtggaggttgcagtgagccaagaagatcacgccactgcactccagcctgggcaacagcgagactccatctcaaaaaaaaaaaaaaaaagataaaaagaatgtagcggccgggcgcggtggctcacgcttgtaatcccagcactttgggaggccaaagcgggcgattcacggggtcaggagatcaagaccatcctggctaacacagtgaaaccctgtccccactaaaaatacaaaaaattggccgggcatggtggtgggcacctgtagtcccagctactcgggaggctaaggcaggagaatggcgtgaacccatgaggtccgtctcaaaaaaaaaaatgtatctaggctgtaattctatttcagtttgtgtataattctgtttgtgtatgtctttttctctcttagggatgtattcttggcctgggtagcctctagaaattcaaacacagtggtgtttgtgaaatagtccttcctgttctccaagccagtgaagagttatctgctgggaaagtgtccaagagcctgtttttgaaacacaagctgggcttctggtagtgcctcatcacaacccatgatggctgttcatgtttcaccccttttcttccttcagcagaggccaggctatggagcagggccactgaatttgctgtaatctggagatgctttttactttcaaccataagcggtaatagcagaggaaagggtgaagggagtctgggcaagcaaagcatagagatggtggggtggtggtggggttgaagaaacttgttggtataattgtcataggacttgcctaaaatattattaaaattacgggagtgtactcagctttgagcctaggagaaaatgccactgtgtgcatccattttaaagggttccctcataaaaaaatgttattccccattatcacatcagtacactgctttgaaaacaaaacttttcaacatgggcatactgggctacatggaaaatgacatcacccaggagtgatttctctttatatatattatttctgcagttaccatccttatctgagttatcacagttcatgaatctaagaggcggaactctacatcattagtaagaggttccaccaaagtctaaagttgtattcacttgtgtttgatgaactatctttaaaagaccataggtctatcattatttcttagacataatctaaagaaaaacagactagagaagccacctggttgtaacagaataagcagaagtttacagcatgatagtccaagtggtgataactttaaataaaactcaaatttttactgtttgtagacaggaatgctgtcctagagaacctcctcctcaaccagctacgtacatagttttatcctatgcattcctgttttctgtgttttttgttttttttttttgagacagagtctcgctctgtcacccaggctggagtgcagtggtgcgacctcagctcactgaaacctctgcctcccgggttcaagcgattctcctgcatcagcctcccgagtagctaggattacaggcgcccgccactacgcccagctaatttgtggtatttttagtagagacagggtttcaccatgttggccaggctggtctcgaactcctgacctcatgatccgcccgccttgacctcccaaagtgctgggattacaggcatgagccaccgcacccagcctgcattcctgtttttttaatggttttggagggtagcagtagagatggggtctcactatgttgcccagtctagtcttgaactcctgggctacagttaccctcctacctcggcttcccaaagtgctcggattacaggtgtgagccactgtgcctagcctataatgatcattttaatgtttcccatgcactcatttagtttgaaccttcacagcaacccaatgaggtaatactcccatttcacatataatactgagagatgagttgcacaagattatacactgttaagtagcagagccagaatggacttcagaatcccaactacaatacaaatgtttatttaaataaagaagaaagctattgtacaaatatcactcttcaggtttagcttacagagccatggctatggattcttagctctgtaaggaagtgcttctataaattcttaggtttagagatgataccatctgggtacctttgcttgaaccgtgcaaccacatctgggtctagtaggtggatcccatccagttggtttccaagggtgatcctgaaacagtgtaaaaggaggggcaaaccagaaatcctggaattagagggtttaatattgttaaaaaatgcataccaaatgaagactgcctatcatcatatcaaatatgccaattctaaaaagagcttaacattagaatagtatatggtagaattactagttcagaattggcatagattctggtgttaaaatagactggatctgtattatctgagggttagtaactaatgcttagccaggcctgcttcacagagttgctaccagggagtattctttggataagcaaaatgctagcagcatgtgttttaagctctgttaaggggtgaaagatgtaattattgacagattaaatagataacttcgtaaccaccagggggcagattcaatacatcacagaatggctgaggaagatccttgggttgtgaagagagtagaaaccctagggagcagtgcttttgggtcctagaacctgttgagtttctaatgaatatttgtagaatctcataaaacagtttaaatacaagcttaagtggcttatgaatcctgtgaagctcatttatggactagtgtaaaacaatgtgaagctctactaagttctgtccttaatcataaataatagccccttgaggactagcctgttctctggtcaccttaccagttgggttgcacattgtgtggtcgtccaaataactcaatcttgcgagtgccaggagatagtctttcaatcatgccatagatttcatctggtttatgactggtggaacgaacctaggaaataaaaactagctgctttttaagttacacaagattgcaattctagccctttctattatgtttatgatctaaatgagaaaaatctgggatgagaatacacccaacatgaataactgataccaacaaaaatgtggaagctttggaggcctgggaagcacatacctcagctacgatcacatcacaatccagaccctggttgaagccttggggatttcctttgacaccaacctgctcaccacagataacagattaccttatgaaaccacacctttgaactttttctcagtaagaaatcaaatgattcttctttgtgctccacctattgaattgggccccactgctgctcaccaagcagtgttccttcccatggttcaaccagtgacctgtacggcctgtccgaatgatgcgttgcagttgatttgtcttcacccaaataatttcatctacccgttcatacctgtggggcataaaaaagaactagaattttagccaaacttttacagtttaggggtagtaccatttatagaagcaaggaatcacagaatagtctgggagaagagaacatgtatctcactgtaacagtattaccctcaaaagaaagcaacacaaccactacttacccccagagatttagacattctctccccaactccatggccctagaaagaaatgagttaaacaactatttgtatgcccatattttttttcccttcaaaatatgtgatgtgttaaaaacactataaacactttttcagtagacgctcagtgaacatttacatgcacaccaccaaaagcatggtggatctaagaacgaaaagataaaactatgctcaacaaccttacctttctcaaagaacaaatgtagagttaaatatatattcggggtaaaatttgcattgtaaacaggcattaggactcagtagaaaaaaagactggctgggcatggtagctcacgcctgtaatcccagcactttaggagctcgaggtgagtggatcacaaggtcaggagatagagaccatcctggctaacatggtgaaatccagtctctactaaaaatacaaaaagaaaaaattagctgggctggtggcacgtgcctgtaatcccagctactcaggaggctgaggcaggagaattgcttgaacctgggaggtggaggttgcagtgagctgagatcacactactgcactccagcctaagcaacacagtgagactctctcaaaaaaagaaaaaaagactaaatcagtcatacatttaatagtggggctaggaaaacccaggattttatctcccattcagtattcactcttgtactgtatctgtccatacctacataactgaattgcattacctgcctgtgacccagaggaagagaaagccatcatcctgtagtacgggtatgttgagcctgcgcatctcatcatctgtcagggtcccatagggcagttccatgtgaatatcccagggtgggtcagccatcacaactgcaaacttgcccaagatactgacgtccaggtagcggatatcacaacagatccactgcataaagtggtatttggtcatcttccctactttaactctgagattcatggcccgagtccctcttttccatttgatttttcctattcccttaaaagcttatctatccccctccattcccaataagcaagacaagattgctgaattatgctctgctttcttaacgtgtatggctgccctatcaaacataagtccgtaagttgagacgagttttctgagcagacaggtacctgaggtgggaagagtcggtctgcactggaatcacctccgacactctgtgtaagagcaagctcctggcttggcgtgtggtctttgctgccaggggcctcagaatccatgcaagcatcaatttcatagtgaacatacttgcaggtatccatgtggaaacatgtattaaggaaagagcagtcacctaaagactcatcagtgtgtttattgataattcgtctgggaaaataaaaagggagaatcaagatggtgctccagatgtagatccaacagttcaaattccaaatgatttcaaaatgtctattttattaccctcccctaattctatcattagagcttccttcaagagttttaagggaggcaggtagcatggaaatccataattcatactacagaacaattgtaattcctctctgagtaaagacttggtttcctgttttaccactggaaggcaagcagtgcaggagacttgggtagaacagaataaaacactgacctaagagtttaggttccttttctcctaagattatcctcctttcagagtactttaactttcactgtggctcagagacagacatactttgctattctaagagggagggagcttttaaaaaaaaaaactcagttatttgggagtacagcctgtattcttcccacacaatgcacttctgaaagtacaccttcagggtctggaggacttacacaaaccataaactaaataagattacagacagaaccccaatgactggaaggaatatgctgaaaaggaatggctgcttctgacaaacccatcccacctcattcccttccaagagacctgaagtgcagcttgcgacagggtcgatcagcatcactggctttcatgcactcctccttggttccatagtcacagaattcttgcacttgggcccgacctcgagagcgaaatttttcaacaatggattgttccttggctgttgtagtatttaatagctctaggatctcctgactgacctgtgacagaagtagccttggacttaaaatgtcttatagatcaaactggctcttagaccaactccgcaaattctttttgacattaatgtcttctaagagataaatcaacttttttttttttttttttttaagagatgggatcttgctgtcacccaggccagagtgtagttgtgtaatcataactcactgtttctcccactgaactcccaggctcaagtgatcctcccagctcagccttcaattgtagctgggaatataggtgcgtgacaccatgccagctaatgttttaattactttactttctatagggatagggtctatgttgcccaggccagtcttgaactcctcgcctcaggtgatcctcacgccttggcctcccaaagtgttgagattacaggaatgagccattgtgcctagacctaaattagctaacttaatattggaaaattggagccttcagataagagatttgttaggggttcagtccttcctcacaaatatgcatttgggatgaaattaaaatggaagaggcctggttcctaccgctaagcattatgttaacatcccctccccaggaaggcattccttctacaaaaaacatatttactgggtgctgaactaaaaagtatagtgctaaacactttactttttagctcagagtctattcaattctataaggcaggatacgctggtattatcttcatgttacagatgagaagactaaggctcaagagaagttaattaacttgttcaaactcacgcactagaagtaccaaacagataagaactcatgtcaggccaatacttatactcagaaccaattcacattatttagtcaatttccataattggtctagtattcctctccattcatctccctatatttctatatatttggattcctcttctcttgatccaattctttcagattcagtgacagattatctaaataagaatttgtcgacattggcattgttgacactttgggacagacaactgtttgttgtgggggtttgtcccactatgcactgtaggatgtttgacaacatccctggcctctacccccactagatgccaatagcactcccccatgtgtgtgacaataaaaatgtctccggacattaccagatcccctgggagttgggcagtagggaatcatccccagttgagaaccactgctgtaaacagttccttgccctaggggtaaatccctgtcaaacaaagctataattaagagcatattgtgagagtattttcacatgacccctaccttcttgctctgttgttccttagtggactgttggttcagaaggctctctatctccagatcaacatctgaggcagcatgtttccttgatttcttggctggctcctttgctggttccgatgctgaagagttcagaccagagactaacgaactggcaaaggcagctactgtagtcgagtcctgttctgcacgccgcttctgccctgtgacagtccctgctacctccccagggcccttcttttctgccacagcacccatcatggcagagagcttggaatggtcagcataggttacaagagtaggatgtgcatcatcttgtaggagacctcgctttacctcaatcaactcctgagctgcaaacttctgcaggaggctttctaccccatcttgagtggcaggagcatctggctagagaacgaggggaggtatgggcaataagacactgaccgtgaactgaaaataagtggtaaatcctaactctgtcaggtcattaccgtggagatggcaagacagatggacacagcatcagtgggcaatgttaaggccagatcagagaggtggtgtagcaacttcttctctaactcaggatctgtagctaattcaggaactgctgaagctgtgctgggcttagggccaccagaggtgggtgcagtaggcactgggctgtcactacggaaggttggagacaatgctgcctctggattccgtagatctaagaatgaagagaagtgaaaatgaaaaaaggcaaccactgttggtctatatatttctgagaagtcaaattctctagcattcccatacacagatctttcattttgtgcaggaaattctgtgaccaactttagcactagattacctatcctcaatcatactaaaacattcactgctttgtcaagataatactggattttctatctaccttttctctattgagtgagtaatcttttcctaattccctatccttgctgtgatacaaagaaagtaaattagcatgatagatttaaatatccctaccacctttctatcaacctacattttaataaaggacaggaatatactcaacaacctaggctgggatccaatattctttttgaggcatgtagtgtgaattttaatgaattcaggccactgatcaacaaagtgtacaaaatgacaatgttgggggccaacagtgttacctataacactcacaaacacaaaaatcttaatactttgctgaagccttggttaccaaatgatatttcctgactatattattatcatctattacttcacaagctgggttgccatcataaccttaataacgatttgagaaactaaaattaggacaaaatgttatctttgagaaagcctaatatctgtggttaattaaaatatagatgaaatattaaactcctaagaactgaactgaaattgctaaataagtaggccattagtttacatttagaaatattttgtttacttaaatatttccattctggtaaggcactggggctcacgcctgtaatcccagcactctgggaggccaaggtgggtggatcacttgaggtgaggagttcgagaccagcctggccaacatggtgaaaccccatctctactaaaatacaaaaaaaaaaaaaatttagctgggggtggtgatgcaaggttataatcccagctactggggaggctgaaggaggagaattgcttgaacccacgaggcagaggctgcagtgagccaacatcatgccactgcactccagactgggcgacagagcaagactctgtctcaaaaaatatataaataaataattcattaatttgaaaattttccactctaatggaaactgaatttattaaaatctgactcagggcttggtgtggtgccttatctctgtaatcccagcactgtgagaggccaaggtgggaggatcacttgagcccaggagttccagaccagccaggggaacatggtgaacccagtgtctctaaagaaaatttttttaaaaattagccacacaaggtggcctgtgcctgtagtcccagctgctggggaggctgaggtgggaggattccactctcacccatttcttctttcattttcagtttctccagttagtaactgaagatgttctttgagtaattaagtgagtgagaaaatttttaagtgagaaatctataaaaagaaccatgttaacataaatatttcagtccttacaagttggtattgacttttctcattggtaatctgactgatttaatactgctcattccaatatctggtgatgtaattctggttatgaatccttgtattaataacacctcctgggaggttttttttccccaacattacattcagaatattagagctgaaaataccttttttaaggttatcaggaggagggagcttatgtttaatgtggtggataaaacttaactgctggttaatacaattgttattcaggtgaaattccctaaacttttcacgtgcaaagttttgtatgtatacagacatttggggaaaagttttatcatccctaaaaccggttactgtccagaaaatgataagaatccctgggttccaaatccttcataaggtatttattcatttatttattcaacacatttactcaatgcctccgctctgctgcaactacactgacattctgcttctaatctaacgaaaataatgtgttcggtttagcaaaataatacataacacttgattcaccctttaattaagagaaccactgaaattaatatggtctgattacaaatttgctgaatccttaaacgtgtcaacatctatatgcacatcttcaatctcaagaaatatactggagcacttcacatatttactatgtgctaaacctggccaaatatagtttgtttccattaaaataaagtttttttttttgagacggagtcttgctctgttgccaaggccaaaataaagatttttttaagtaatatttttctttttaaaaaaatatactttaccaacatgagatatataacacccattaggatggcgcttcctcaaaaatcaaaaatagaattaccatatgatctagcaattccacttttgggtatatgcccaaaagcattaaagcggggtctcggtcgggcgtggttggctcacacctgtaatcctagcactttgggaggcagaggcgggcagatcacgaggtcaggagatcgagaccatcctggctaacacggtgaaaccccgtctctactaaaaatacaaaaaaattagccggacgtggtggcaggcacctgtagtcccagctactcaggaggctaaggcaggagaatggggtgaacccaggaggtggagcttgcagtgagccgagatcgcgctactgcactccagcctgggtgacagagcgagactccgtctcaagaaaaaacaaaacaaaaaagaattaaagcagggtctcaaagagatattcatacacccaggttcatagcagcattatttacaatagccaaaaggtagaagtaacccaaacgcccacccatggatgaatgaacaaaatgtgttatatacatacagtggaatattatttatccttcaaaaggaaggaggccaggcatggaggcttatgcctgtaatcccagcactttgggaggctgaggatggaggatcacttgagctcaggagtccaagaccaacctaagcaacatggcaaaaccctgttgggcgttttgcccaaaaaatactaaaaattagccaggcaaggttgtatgtgcctgtagtacatacaacaagcacctgccaccacacctggctaatttttatatttttagtagagacagagtttcaccatgttggccaggctggtcttgaactcctgacctcaggtgatccacccgccttagccttccaaaggctgtggacacctgtagtcacaactactcgggaggctgaggcaggagaattgcttgaacccaggaggcagaggttgcagtgaggtgagatggcaccactgcactccagcctgggcaacaagagcgaaactctgtctcaaaaaataaataaataaataaataaataataaaaatgccaatctaacaaaggtctcccaatattttgcccatattattttccactattaacgatgtggtgggtacattttagttcattttatatccttgtcttttgacactcagttcagtagtcggtaattatcagatttcagtaatgctgtaaaaaacaaggtgtggccgggcgcggtggctcacacctgtaatcccagcaatttgagaggccgagatgggcggatcacgaggtcaggagatcgagaccatcctggctaacactgtgaaaccccgtctctactaaaaacgatacaaaaaaatcagccaggcatggtggtgggcacctttagtcccagctacttgggaggctgaggcaggagaatggcgtgaacctggcagtcggagcttgcagtgagccgagatcgcgccactgcattccagcctgggcaacagatgtggtaggcaaatttttatttccggtgagaaacgaatggaataatctgaacttttatcaagtcttgagttatatcttacatgacaacatgattcataaacttacaatacagtgtttcacaagggtttcctaagaatcctaaagctcaacaaaatacattctttgaaataatcaaaataacacagaaagaacagtgacattctggtttaatttgtatgtttcatctttacctattaccacagtaccaaatgatgggtcagatcaagctctcggtcagaagacaagatacatttaattacaaccccaaaaatacttttataagagtcttaactagactgggattacatctgtaatcccagcactttgggaggccagggtgggaggatagcttgagcccaagagtccaagaccagcctgggcaacatggcaaggccctgtttctacaaagaaataaaaattaaaaagtaggcaggcatggtagggtacacctgtggtgctagccactcaggaggaggctgaggcaggaggatcacttgagccctgaggtcgagactgcagtaagctgtgttcacgccactgaattccagcctgggtaacagaacgagattcttgtcttacacacacacacacacagaaaagggtcttagctatattactagctaaatatacaaatcaagagatattcatatctaaaaaagaaaaaataaataaaaataaaaaaggatatgtacatgcagggagaatacagtcttattgtcaaaaatattaaacatgtttagcaaggacctggatcaaagtatcaaggctctagtagttaggtctgcatacagcagaaagtttggttaataccaaaatgtagttaatgtcatagaaaaatgaaatgaaacttaaaatgaccaagagcaattagaatcattcattgaaagagtatgaatttagaaatggaaaagtataaagaagtatgatgccgggcacagtggctcacacctgtaatcccagcactttgggaaactgaggcgggcagatcagcagaggttgggagtttgagaccagcctgaccaacatggagaaaccccgtctctactaaaaatacaaaattagccaggagtggtggcacatgcctgtaatcccagctactcaggaagctgaggcaggagaatcacttgaacctgggaggcggaggttgcggtgagccaagatcgcgccattgcactctagcctgggcaacaagagcgaaactccatctcaaaaataaataaataagtatgatgaggaacaattaaaaccaagaaacaacaaacaccaccacagatagaggatggcctgtcacaaaaacgacagaaaggtgaacacaaagtagtcaatgatgtagtacaccaatatagcggctttttaaaagttaattttgtaggccaggcatggtggctcacgcctgtaatcccagcactttgggaggccaacgtgagtggattgcttgagctcaggagttagagatcagcctgggcaacatggtgaaaccccttctctaccaaaaatacaaaaaatagctgggcatggtagcacacgcctgtggccccagctacttgagaggctgaagtgggaggatcgctggagcccgggaagtcaaggcagcagtgagccatgatcatgccacagcactccagcctgggtgacagagggagaccctgtctctaactaactaactaaataattttgcagatcactttgttgaaacaaacaactacctgatcctcaggtccccttttgcaactgccattgctgaatgggaaaagactccacaggaaaattaaataggctggatatggtggctctcacctgtaattcaaacactttgggaggcttaggcaagaggacagcttgagcccaggtgttcaagacaaatttgggcaacataatgagaccatatctctattaaaaagttaaaaattagccaggcatggtggcatgcacctgtagtcctagctactcaggaggatgagccgggaggactgctacactccagcctgggcaacggtgagagacgctatctcaaaaacaaaagcaaaaaaagtcgttggcatcatttatgcacatttttaaaaagtttcaaaacaggaaaccaaagaataggggaaaaaacataacaaaacaaaaaattgtatctataaataaatcaatgaagtttctagagcaagggaaaaaaaattctccctcttaggtaattcaggaactactctgagacttgactactaattattgcctgaccatatgacttgcacttcttactccactatcctcccctcttacctctttaattatctaggtcctatatagccataaaggccaaattcaagtgccaattccactatgatggttttgatggcttcactacctacaccagctcttgttacttctcttcattgtacagactgtagattcattcatttggtttcgtacatatatcttatcatattcctcactttttgtaagcgtctccccttgaatcctatgctttttaaacttcttgaggacaggggcaatttcttccttatttttgtctaattagacccatgaacactgtagatactcaagaaaggtaattaattaggtgggaggatcctgccagtgcatcttctatttctaggggccagaatacgagcacatgaacctaacatgatctagacaagatttagagatgcagttgaagatactgacaaatattggaacaatctaccacaaaggtgatactgagtcactatttttgcagagctttgttactagtttgccttaaataattcagagtttgtcctgagggtagggagtggataacagtgaatttaatcttttaaatttccttcaagttttatgatcgtgacacgggggcaacaggagaagagaaaaagtttggaaaccaaacacaaatgttttcagattcctgctaggtatgtaaatggctaagtcaatgccggtaggggtactcattcagaaacacccagtgccactctgtacgggccactaaattgggcactgcggatataaaggttcattcctcgcttactgtacccacagctgccaagaaatgaccactacaaaagagtcgttataactgagggaacaaagcgccaaagcagcaacaaaaaggggttcttgctgcttcgcgggatagggggctgagcagcctcacaaaggcgacgtcctcgcagtctgaagaggagtgggcaaggcggacgagggtggggctcaagcgtccgtccggtaaaagtgagctggaagaaccgaggcccagcgtgaggaggaaccgcgaactacttgcagaagggcgaacgtctgctgctgaaggtggagagggagtaccaatgtacgaggctttatagaaatggccgtttggtaaagggcagtgactctggagctttttctctagggatcccgcccgtcctccccggttgagcctcggccccaacagcccagtgcctcacccaagtgccccgagtcctgcttccgcctccgctgcagcctctcccgcagagagtccagctgcttcttgtgggcctggatagagctccacgtgtccgacatcctagtctcccagccctgacacctctcgaataaggcgcggcggactagcacctcccagcactcgctccaggatatagccaattctcacgcggacaccccgaaggctaaccggaaaatgacccctggagctgagcaagacagaaaagtcatttccggtgtcgcgctttcttggaagctataaagagccacgttaggtgttggcagagcggccggtatagtcctcatacccgctctctcatgcttccggacacagtgaggctgtggttgccatgttggtgactggcagagcggccatgttgcttatagacgcgcatgcggccatgttgaatattcggagaggagtcctgagagttgacttgtgttaaagtagcactcgtagagagcaacaccatatagtacagttttgggggtttttttcttttttttttttttgagacggagtttcactctgtcgccctggctggagtgcaatggcgcgatctcggctcacagcaacctccacctcccgggttcaagtgattatcctgccgcagcctcccgagtagctggtattacaggcgcccgccaccacgcccggcagattttttgtatttttagtagagacggggtttcactgtgttggccaggccagtctcgaactcctcacctcgtgatccgccctccttggcctcccaaagtgctaggattacaggcgtgagccaccacacccggccatagtacagatttttaagatgaaggatcactagttccttttgacagtttggtactaacataccttttccactgaaggtggtgttggtttgtttccatgcgttcatttacaaaaaaataaaaaaataaaaaacacaacggtggtccccaatctgaggtgaggagggggcggtggtgggtgcgggcatgcttctttgtgttgacgaggcgtggggaagtggggagggctgatgaaggaaaaatccgagaggtcttcaaatacgtgatctctctcttaggctaaatttacaaagtacgtgtaatctattaaaatcgggttccgacactaagagggctttgaggtcctggttgcgttgtgttttttgttatgagagctacctgcatgagtgtgttcagtttgtgaaatgtaattgagctgaacattttggtgtgcacttttctgtatgtgtagtaaacttaaatacaaggttggtggtggtggtttttcctacaatcctttctttctttctttttttgacacattttcttttttttttttttttgagatggagtctcactcactctgtcacccaggctggagtgcaatggcgtggtctcagctcactgcaacctccgcctcctgggttcaagcgattctcctgcctcagcctcccgaatagctgggattacaggcgcgtgccaccacacctggctaattttttttatttttagtagagacagggtttcactatgttggccaggctggtctcgaactcctgacctcgtgatctgcccctacgatctgcccccctgcctcagcctcccaaagtgctgggattacaggcgtgagccaccgagcctggcctgacacagagtttcattcttactgcccaggctggtgtgcagtggtgtgatctcagctcactgcaacctccacctcccggattctagctgcctcagcctacctagtagcaggtattacagggacctgccaccatgcccagttaattttgtatttttaatagagatggggtttcaccatgttggccaggctggtcttgaactcctgaccttagctcatcagcctgccttggctttccaacgtgctggggttacaggcatgagccaccggcttggccttttgtttgtttgtttgttttgttttttttaatggagctccctgaatggaaacatttcgggaatcactgacttatccaatgtctacatgatgccatacgctgttgtccaaaaaatacaaaaaatagtttgattggcatggctcctgttttcaaagagtttataatctggtcaaggagctgtgagccagtttattaatactgaaccatcttcacagcatgaggtagcatgggcatagactttttaaaaaacaaaaacaaaacaaaacaaaaaaacaggaaaaaaaaaacgtgatttcaaagaagaggaggactccaagtttaatgacccaggaaggcattggaaagaagctggaatcaaggttcaggcttaaagtgaccactaaggtttcagtaggtgaaggtataggagggaaatccaggtctggaatatgataaaggcaaaggtctagactagaggtaggaaagcgtgatgtgtgttatgccaatctggattagttcgccagaacataaagatttatatttgggaatattgggagaaattttaggtttccaaatttgaggccagattgtagaaggtacatggtacctgagtaaagacttggcaatttattcagaatacaataggaaacacttagggtttgtaaataggaatgtttcaaaattgatttgctgttctagataaattgaggtgaggaggaaggagattttggagaggacaaagatggttattagtccattgtaactaagtgtctgatgagaagaactgtaactaaaagctggttatgaacagtaatgaaaaggaaggtgtgaatatgaagggagctattgaaagatgtatgtgtattgtaatatgacttttatccattcagtaagtattgagtgtttactatgtgttagatactatggagatttagtagtgatgaaaatactcatttccatctcattttctgaacttaatttacttttagggaatttacactatctattgggatgtgtaactttgtttttttgtttttgttttattgagacaagcctcactctttcactgctggagggcagtggtgcaaagaagtagcacaagtactcctgaaagtcaatcaaatcaagggcagctcccagaagtttttgctttcacattaactctgggtaaattattacagtggcatattgggcaaattttagaagtacaggaaggcctcttagcatgatcttcttgtagagagattctttttagactcctcttgaccagtttgctgctcaaaagaaagacattgctttcttgtccgcgcgtagccctcagcagtacacagaggagaaggaggaggaggaggaggagggaaaaatgcagaattcttctagtcaaaatggagtgtaagcctaattttgagcagatgggtgctgcatgcattacacttctcaacttttcctcatatctgccatggtagattgcttccagtgttggccacaacaatgcctctcacctacatgcccttaggcagtgtgactttgccccctttcaatcaataagtaaagcttattccccctcctcttgaatctgagctaggcttctgactagctttcaccaaaagaatgtggcagaagagatattccctgagttctagaccttaagaggtctagaccttaaaaggaattacagctttcgggatttggttttgttttgtttctaatttttgagagagagtccctgggtctgttccatctaaacactgttgaagcaagagacagatctgagggacctccaaatgtgctgccgcggcttctgtttctgccctcttggaaccctgggccttcatggaagtccagtcaccctgatagaccacttaaaaagagagaccctgggggatgaaggatggtaaggagagagggttcagcattccagccagccatctgagtagccagaagttgaggccatcttggcttctccagtccagatgaaagctgcatgagtgagcccagtcctcaccacatggaacatagacaagccatcctaccaggcactccatggaatcataagcaaatacgtaagtattaagacactaggctgggtgcggtggctcacacatgtaatcccagcactttgggaggccaaggtgggcggatcatgaagtcaggagttcgaggccagcctggccaacatagtgaaaccccatctgtactaaaaatacaaaaattagccaggtgcggtggcatgtgcctgtagtttcagctacttgagaggttgaggcaggagaatcgcttgaacccaggaggcagaggttgtggtgagctgagacagtgccattgcactccagcccgggtgacagagcaagactctgtctcaaaaaaaaaaaaagaagacattaattggctgtgtgctgtggtatgtgcctgtaatcccagctgctttggaggctgaggtgggaggatcccttgaactcaggagttcaagaccatcctaggcaacataccgagaccccatctcaaacatagcactaactgtatacttcacttttttttttttttttttttttttgagatggagccttgctctgttacccaggctggagtacagtggcacgatctcagctcaccacaactccccctcccgggtacaagcaattctcctgcctcagcctcccgagaagctgggactacaggcatgtaccaccatgtccggctaattgtatttttagtagagacaggatttcactgtgttggccaggctggtctcaaactcctgacctcgtgatccacccgccttggcctcccaaagtgctgggattacaggcgtgagccatcgtgcccaacccttcgctttttacttgattctttggctgaatgttttttccctcaagtcttgttcatatctgactaaaaacagaatgcccactagggttagtcaacctactgttattaaatgttagaaaaggaaatataaagggaagtcaaagttgggtctaattgagaataagactagtgaaatctgttttaaggatcagaagacaagtgtttgttgattgactaagaagttccagggatgataaccaaagttacaggtgcaggagtttctgagagatgagaatgtgccaataaattctgcgccttattcaggggtgacacaggttgaattccctgagaagcagatgctgggacagaactggtataaggaaagacagtggaggaaatggggagtggaattgattagggagagctgtcagaccacaatgcagacctgataaagtctctgccagtccagtgggaagttccagagcaaatattgttcattagagtcctatgttccaatggctaagcccttgtaccttgctcagttttgggccaaggattggagaagagcagtacagctggaggttgtcagctaaccaggctccttgcacttggtagccagttctttcttgaaggaacatctcaaaagcagcccatctctgtgtctgccaaacagagtgtgatggatcttatacaggtttttgttttttttttttttgagatggagtcttgctctgtctcccaggctggagtgcagtggcgcgatctcggctcactgcaacctccacctcccgtgttcaggtcattctcttgcctcagccttctgagtagctggattacaggtgcctgccaccacacttggctaatatttatttatttttgagacgaagttttgctcttgttgcccaggctgtagtgcaatggcatgatctcagctcaccgcaaccttctcctcctgggttcaagtgattctcctgcctcagccccccaagtagctgggattacaggccactgccaccacgcccagctaattttgtatttttagtagagatggggtttcaccacgttgcccaagctggtctcgaactcctgacctcaggtgatccacctgcctcggcctcccaaagtgctgggattacaggtgtgagccacggcacccggccttatataggttcttaaatggcaactgcattggttcctaagttgtataggttgagttaatatacttgagagtggttattgtgaaagctgaattcaagagaattggatgctccctttcccttctccatttttgaattacaagtttgaattccctctctgattccacaggacattgtccattatctgtcatagttcctgttacccccaaataaaagtatttgtttaaagctaggcaatatggtatgtgcctgtagtcccaggaggctgagatgggaagatcagttaagccaaggagttggagtccagcatgtacaatactgagaccctgtctcttaaaaaaaaaaaaaaaaaagtatctgtttacattttcccactgagactgagctcccctaagggcagaagtttctcttacagtcaaacatcacataatgatgatttggtcaactatggaccatgtgcacaacaatggttccataagatcataatggagctgaaaaattcctatcatctagtgacgttgtagttgccataatgttgtagcacagttacttcattttaaataaatttagtgtagtctaagcatacagtgtttataaagtttacagtagtttacagtaatgtcccagaccttcacattcacttaccatgcactcactaacccacccacagcaacttccagtcctgcaaactccattcatggaaagtgccctatataggtgtatctttttttattgtgttttgtattatttgtattattgtatttttactgtaccttttgtatgtctagatacacaaataccattgtgctacaatagcctacagtattttgtacagtaatatgctgtacaggtttgttgcctaggaacaataggctataacatataatctaggtttgtagtaggctataccatcttggtttgtgtaaatacattctatgaggtttgcacaacaacaaaattgcctaatgatacatttcttggaatgtgtcctggtcattaagcgaggcataacagtatttacctttgcatctaaccaacacttggtctcttttttaattttttttttttttgagacagagtctccctctgtcacccaggctggagtgcagtggcacgatcttggttcattgcaacctttgcctcccaggttcaagcaattcaagtgattcaggcaattctcctacctcagcctcccgagtagctgggattacaggccactaccacctggctgatttttgtatttttcgtagagatggggtttcaccatgttggccaggctggtctcgaactcctgacctcaggtgatccgcccgcctcggcctcccaaagtgctaggattataggtgtgagccaccgtgcccagcctaaaaatcattttgactgggaattgagaactcttggtctctgaaacaaagtaaaacctcaaaagtcaactgaatgagcaaagaagctgtctcttgcttcttataatagcaatgactttattcatccaatttgaactagatcctctgtttcacggaaaataagtgttttgcaagctgcatttatttacatattcattcctgcaggttagacttaattcaacttccaaaaagactgtccagcaaaaagttactgaaagtgggaagtggtggggctgagcgtagagatagggtcagttataagaaggaagaaattaaaggctctaagaagagaaacaataaattagggatgaagggagaaaagaaatagaaataaaagctatcaaataaggggaggtcaatgaaaggagaaaaagcaggacaggcgagagaaaagaatgaaaaggaggcagaaagaaaagaaagtagagctgtgaaaaagcggggtggggattcaggcttagtgctggcctgcccagggaagtatccatcaataaaagcctcactgacagctgttaccataatgggaactggcacctaaagagagggcaagtctggtttaattagttaaatggcattatctgtgtccagtgggggtgggagaggttaaggggatggaatgattggtgacccacctccttccacaggctgagagaaaaagcagatctacaaagacttgccagaaagtaaagattcccatgtgttcctatttatcagttacattttaaaggggacttgcactgctctggtgggggcaactagaattaaacattggttctctatcttaaattaagtataggtttatactgggcgtggtggctcatgactgtaatcccagcactttgagaagccgaggcagcagatcacttgagcccaggagttggagaccagcctggccaacatggtgaaaccttgtgtctacggaaaatacaaaaaattagccgggtgtggtggggcacacctatagtctcagctccctgggaggctgagatgggagaatcatctgagcctgtgaagttgaggctgcagtgagctgtgattgcaccactgtaccccagccttggtgacagagttaagactctgttcccccacaccccccaacaaggaataggtttactcacctctttcccttcttacaggcagcctcacatccagagtcttaaatgatgtagcaggaagcaagtgccatctctgatcagtgaaagtagtgcaacgactgggattctgcctacctgggttctatttttgtttgagacagggtctcactctgtcacccaggctggagtgcagtggtgctatcatagctcattgcagccttcatctcccacttcagcctcttgagtagctgggactacaggcacttgccaccatgctcagctaattattatatttttttgagacagagttttgctcttgttgcctaggctggagtgcagtggcatgatcttggctctcggcaacctctgcctcctgggttcaagcaattctcctgcctcagcctcctgaatagctgggattacaggtgtgcaccaccatgcccagctaattttttgtatttttagtggagacggggtttcatcatgttggccaggctggtctcgaactcctgacctcaggtgatccactcgcttcagcctctcaaagtgcagggattacaggcgtgagacaccgtgccccgccagctaattatttttttgcagagacagggtctcactttgttttccaggcatgtcttgaactcctgggctccagcgatcccacccgcattggccttccaaagcgctggtattataggcgtgaatcactgtggctggccctacctgggttcttaatccaactttgccactgagtgactttgggcaaatcattttaccagttccatccctttagcactaagagtcaatgatattataatcttacaaatcagtctccttggactcaggtaatcctcccacctcagactcctgattagctgggaccataggtgtgcaccaccacatccagctaatttttgtatttttggaagaggcagtgttttgccatgttgcccaggctggtctcaaactcctgggctcaagcaataggcctgtcttgacctcccaaactgttgaagttacagacgtgagccattgtgacagggaaaaaaaaatatatgttttatttgaccccacccctatgtgcttcctctgaattcctaatgataagaatcctcctttgtcttgttggtagaaattattagggttgaattacatttttttctttctgattatgacatcagatctcaaggatcataaagtttaattcaccttggttctacagattcgctgatgtcagaaggctgatctgtggtttgagaaagactgaaaagaaacagtttccaacctccaaacaaaacccacagaaaagcctggtggtggaaggttctaggtagagaaaatctagacaatgactggacacagtgggcaaatgcctaccttttggaaatacaaactccacagggaacaatttccacagagaagttacattaactgaaggttgtcttaggacaaggctgaataaagtaaatatttcaacaccatatgttcagctttggcaggagatgtaggtgggaagggaatctcaattttggggaatgcccatatcacaccccagctggctatgtaatcatgaaataaggagaaacacataaatatttggttaaaacacctttaatgatagagggaaagacactaatatctcccgtctgttcttgacattttactaggttaggaagctctggagcctacagcttgaggagaagccatcgttcaagtcagtcaatagcaaaaccctcactctctcctcctcagaactcctgttccaaatgatcctatgttaagagtaaatactacaactcattacaagacggagaggcagggaggacgccacctggagctgggactcttaagaaccagacaatgacaaagacacaagccccagcctacggataggcaaaatgggtaggggtcttgaaagaggaagataaggaaaatacaaggggccagggaataaaggagggagttatctaaaactagaagcatactagtgctaggaaatcccccatgatccctggtacacctctgcacactatgtcactattagcccaaaagaatattaacgagaatgtccacattcacaagaatttgaggccttttcccttacatcatgtccctttcttagtcacataggtaccagcaagccctatgttctagcaacattccttaactctctcatcattagttcatcaaccatgctgaccaaaaatgctccttaaagatacgaacttcacatttcccaaatatctcctgggagacctcttggcaagaaatcagcttgtttcccaactttgagaggtcatcatgaatgagaagctggagaggtcttggcacactgaccagccaaaacctttaccttaatgtgaccatcaggggatttactgggaaaattttcctatgcccttccttcatttctccctacttcctagggttgggtcaccaattactggagcatcttcagtaccggcaccttctggagcagggggaggaagaaggaatgtacagtttgctacttcttgtctatgatgggcttctcaggcactgccttgggtgcaggaggctgaaataggaggggggctgtcttctccttggcttccctggatcccattgttggaggcaccttcccagccacagttcctaggccaaacagcactggtggggccaggcttggagtggtagtggaggtggagctggaattccagggcttcatgggcaggccatttgacaggaatgccacatactggttctagaaagataggggacccatacccaccagctgagcagaaaggtcaccccagaggagtggcactgggccctccagagacagctgccagccctttttggctaggctgcaatgccaaatgtaggtgctcaggtgcacctaccaaagggaaagggagaggagagaggagggggaagaagggtcacaccagggaagctggagagggttccccttgagaaagctgcagagaatctatgttcctcaggtacaaagaatgaggagggaagaaaaattccttagggggccatccccttgtaagcacagtaatttccaagctcagggactacagaaaagccactagggacataacatgttaagaacttagagaaaaagacaaaatcagggctcataactctgggaggtccttttgtgaagctgtttctgctctgtgggacaaagagcagcaggtacagaaaaacaggctcatgggatcgtggggtcatcttttcggggaaagggggagagccctgtggaggtgatggaaggcgaacagccagggactagagaaagagcagcaatattctgagggccatggggggcaaagggctgtacctggtggtgtgccaggagcatatgcttcttgagggtagcccgctcaagaaagccctgcctgcagaaaacacaagtgaagagcggcccctccttggggtgggtcttctgatgctcctccagagctgcctgggagggaaaggcctggccacacacttcgcaggcctttctgctgctgctctctcctggctcctttctcattgcctcctgcaggctcagctcctctaccaaggtcacgctggtggcttccccttctggggtgagtgctgatgccggacttgagcttctctccggtttgcccccctcttccttgcctcctaaaacaccactgcttccctgctccattggctgaggctgatccaggctgtcaggtggtggtggtggtggcaaagaagactgttgagtagttttctcattactgtccatctccttcccagctgtggctgctgccgccactgtccccacctcctcctctgccccagatgcctcttctgaatcacctctcactgatattgccttctcacctccactctctgagcctctccctgccagggaatcttcatcagtcacatcttcctcttcttcctcatcctcctcttcctcctcctcagacaactcctcttccggtgatggctgctgggactgctgctgggggaaactccctgccccggagactgtagattgctcggagccattctcctgagcagctcctccaccttcagggagtgcagtaccaccgttggggatctggccccccaggtgcatccggacatgctgctgcagagtgacagcattggtgaacttcttctggcagatggggcaggaattctgtgcccgggcagctggactggccttgtggcccacgaaatgtgcacgcagattacccctggtggagaaggctctgccacacactttgcatttgaagggcctctcacctccatgttggccataatgaaggcgtagggcccgaggacagctaagcactcggagacagatgacacactggttaggtccagaagaggctgaggatgaaggtgcaggggcagaggtggtgggggctcctgaggcagctgaggtcaccgccacagctccttgccggtcaatcttttctaccagttgctgcagctttgatgtctcagagggtgaggcccccaagggctctagcacataggggaaggggaagctgccagtggacttgaagtggttggtaagcagtgcccagcttggtagtgaagtcaccaacttacttagttgcatgcgagttgccgtgctactttctgccactccactgatggctgagccctcactccctgggggggtgttttcatcagctttattcttgggttccactgctttcatgagcacaaacttattgaaagcagggagtcctggagccgtggctgtgcctgcactggtggagagcagagtcaggctctctgtggcactgagtgctgttgtggaggccaccagaggcttgcgctcaacccctccacctggagtggctgcctcctcctcggccttctctggtggcacggacataccataaggcaagccactgctggtaatgacatagtctaggtgctctggtactgggtgtgggttcatctgcacatgtgggtacttctcacgatgccggtggaaatgcactttgaggttgccacgggtggtaaaacggtttccacagacattgcacttatagggcctctcacccgtgtgggaacgaaggtggatctgcagggcactgtcactgccaaatactttggcacagaagcggcatttgtgccttccaccaggcttctccaagggacccatcacttctccgtagctcagctcaccacttccattctttggcttcaggagccctggggaggcagtggcctcaaggcctcgggctgccccaagacactgtgctgccagtagtcccgtggtgcttgggaatgccagatgaggcgaggcaatcagctgatctgtgctgcctggcaaggctggggaaggggcaggggtgggtttgtggcttcgcccaacccctccagcagagaaaggatgctgtgaccccagtgggtggtaaaggtggaagaaggcctgcttgggcgtttctgcccctgaagaggaagaggaggaggaggaggaagatgccagtgtcttgctggtttggacaggcttgatggggctgaagaggggtagtaggggcttggtggaagaggcagtccctgtcccaggtagctctgagggactggcaggggcacccaccgtctggcctaaggagccaagcaacagcacctgcctgcagatttgctcagtcatctgcatctgatggatctgccgctgctgcagcacccgtagctcttccaagatcagggggatattcaagtggccactgcctacccctgggggcggagggggtggtggaggaggagggggtgcaggggtcgattctggaggtaatggggttgctcccagcttgggactggccaagatcaggcccccgcctcccccagccgctgtacctgtggcagcgaccaggaaatgccctggagactcctctcctctcctctctgggccccaggtgggatccgtgggcacggaggacccagaatctggggggttgctatgctctgtgtccatgacctgaggattattgtgaccctcaggccggggttcagaggaggccgaagagttgttggggttctcctggcccccaattatcaccattacaggagggtcagtagaacatgcgttctggtgggcgaggaattcagttgggtcagtgaattgtgcgcagcacttggcacagacttgggggtgatcctcctcgctagcatcacctggggagaagacaaggagagagagcgtgggtggcgcagttgggttgggtataccgaggctctaattaacaaggaggccagtaaccgctagttgggggtggggagatgagctcaccatcagggccatgcagaagtctagagctcaggcctgatccgtgtggacaggagacaacccggcatggggcaggggggtggggagggaggaggggaggggggcaagagcatgctactcccctcctcagccaccctcccttccccaggccacaagcgagttcacggaataggtgtggggacaggggcctacgcagagaatcatgcattttctcccacccaccgaaagtcttcgccgcccctgcgcatccccctccgcccccacccctgcccagcccgaccgaccctaccgcacctccgagctctgccggctccccgcagggcaccccgagacgagagctcctctcggattcgtgcgccatggttgtgggggaagtggagggccaggtggggtgggagacaatggatattgggattgagggaggcgatggccgctgggtctgcggcagcctctgcacccagcggcccagactgcggagatggagatcggcagcggcgggggcagggagcagcggcggagggggaggggagcgaggaggcggggagaagctggagtgagaaagcggggagaggggagatctgggaggagctgatgaggaggggagtttatggggaggagctgctggggagggaggcgggagctagaggaggcgggagaagggagcgctagcgggggcgtgggggcgggagctcagagctcgggagagtttccggaggcgcagtgacaggtgctgtgaagcactgcgggggtccacctttcccggtccctggccagctccccccatctgcagatgcctttgcccaggcctaccctcctccccccgccctcccctcctaagctctaggggcacagtgggaaacgtagccctgctcagtggagcaaggcgataggcttctcttatttttctttggataaaggatccgctgagcttggaaaaagtggattccagagagggtcgtctgatctcctcagaggtctgagggccagaagaagagggggagatcagaacatccactcctcaccagcacacacaccccaaaatattcgaagttttgtctcgtctttctcacttccattcccaccctacccccatccctctccacaaaagaagtttctcagggtgggcggctgcaaggtagaatttcccaggaagtcatttcaggactctctgcggaacactaagccccttcactccccgcccctcctccccctgaataatagctgaatgcaggttactccgcagatcgcccagcctacacaacacctaattcatagagtccatgcttatttaataagccatctcctatttagtaccctcttcctcctctattctcctcttgcaacattcctcacaccgtcactattaaagacagtgggtttggggagacgctagcctgcagaggcctacggaggcccacccagctctaacctgggggggaggggagccctcttgaaacaatgcggtaggaactaccaggcagccctcagtgtctaaagccctttcagccccagcctgatttgaatgcttagaaatagctaacacctgctcaccatcacagaggcagcctcctattcagacaggataagtaagaataaaatgcctcctggaccaggtattctggcattctcttttttaccttgaaatgagtcttaaagtgcttcccacttcctaaaatactttctcttacatgcaggaagtgaccacaagtccttggttttgtggtttccctgggcatcagtaaacctaaattgttttaatcccagttctattcttgcctcactgataaaactgagacatggtggtcagtcacaccatgttataccaccgtttccctcttcataaagtggtaatattgtagctgcagtattttactcagaaaaatattgtggggacaaaaaattgaaaaattggacaatattaatgtgtaaaccaggtatggtggtgcacacttgtagccccagctacttgggaggctgaggcaggagaattgctttagtccaggagtttgaggctgcagtgagctgtgatcacacctgtgaataaccactgccctccagcttcggcaacatagtgaggccccattactttaaaaaaaaaaaaaagccgggcgcggtggctcactgtaatcccagcactttgggaggtgggcagatcacgaggtcagaagttccagaccagcatggccaacatgttgaaaccccgtctctactaaaaatacaaaaattagctgggcatgatggtacacctttaatcccagctactggggcagctgagccaggagaatggcttgaacccaggaggtggaggttgcagggggctgagatcgtggcattgcactccagcctgggcaacaagagtgaaactgcgtctcaaaaaaaaaaaaaagtctaaaaaaattaatatgtacatgtgagatttttaaagtttggggagtcctgaatttaatcaatgagataatttacattgtcagtagcaaaataatcgaagtaaccttaaatacacatatactaaaattagatctgttttccatgttgtttgttaatcttattaatttctgaggtaagatattggctaatatcagcagcatatttcaaaggtaggaagtcttttattgcagtgggtgggggagctgaaacaacctatttaaaatattagtaacatccactttacttctcaacataaattttgcctgtgtttttaaacttaaaacagtttactgaattatgttttgaaacttcagataataaggctcttagcattgtgagtcataattctgaaatggacgggttctgtgcttccaggcctggacttacaaatgagggaggggggttctatttcagtttatggcaagtcacagttttgtgcaatgtggtttatttttacagataaggaaactgaagcttggagaggttaagtgacttttccaagttcacacagtaattcagtgaagcaagcattcagaattttgactcctgtccaatgctttctcaagcacatcaactttgtatggcttccctaatgctagagaaagggccctgtgtggcttctacctgccatttgctccctggccttagtcagggagagggaatcagatggaggctttctactgagcatttgttaattagcattgaacatttgatatccagttgctgttttgtcaagtcttctgacaagaaaagaaatccttttcttttcatcttctcctgggaaacactgtcccctttcttgctctttaatgaaatgtgctttctgatgcgtaatttgatctaagctcttctttaaggtaaatttagtccctggtgaaaggtgactggatcaacagccacctgtaagaggaaccctccatttctcagtactttgcactcactgcacatcctgaaaaggggggcaggattcttacacaaacatgaatgaagtcacaaatgcaggaataaactaaactggtaatggtgtccctagatagcagataaggtgaggtaagctatctccggtcaaatgcaaagtccggggtgggactaagacctggacaagcttgtttaaacttatagagagctgaaatgacaaagaaaagggaaaccaggtggcttcccttctaaatctagtgtcccatcagattgcttctttaggcttcagagagaactgttcgggagaacaaagagaaaaataggtgagttgtatgtagcagggtgatacatttgaacagcggttttcaaattttgctgcccattaggattaccagaagagagttttaaaatttttatgtttaggtgcagtggtctgttccttgtagtcccagctactctggaggctgaggcgggaggatcacttgagctcaagggtttgagactccatctcaaaatctcaaaaaaaagaagaaaaaaaaaagaaaagaaagtttaagcacagtgggtacctcatgcctataatcctagcacttttggaggccaaggcaggaggattgcttgaggccaggaatttgagaccagcctgcataacatagtgagacccccatctctgcaaaagcaaccaaccaaccaaacttaaaaaaaatccctgtgtccaggccacatcccaggctaattaattcataatccctgaggataggatccaggcattagtttgataaagctcctcaggtgattccaatgagaatacaaagatggtgacacaatgatgagacccacatggaggactgccctttccatcataccttccaccctgctcctcacagatcttacctgagctaaacttggccacaattgggacacagacaaaatgaactctcaatgctaaatcttcccatcaggtcccctccctacagtgcccacaaccacacattaacttccttgtatcctttcccagtgaaaaatctgcttccatgaatagaatttgatataatttacaccttactgtaagtttaagtgattgcatttctttcccaggtatgggtatcttgaagcatatttttttcttttttaattgatatttgagccatatttctttttttttctttctttttttttttttttttttttttgagacggagttttgctctcattgcccaggctggagtgcaatggcatgatctcggctcaccgcaacctccacctcccaggttcaagcgattctcctgcctcagccttcccaagtagctgggattacaggcatgtgccaccaagcccggctaattttgtatttttagtagagatggggtttctccatgtgggtcaggctggtctcaaactcccgacctcaggtgatctgccaacctcggcctcccaaagtgttgggattacaggcgtgagccatcgcgcccggccaccatatttctaattgtaaggtgaaaggctttgttctacagagttcaagcatcatccacccattaaggctggagtgaagtggcacaatcatagctcactgcagactctacctcccaggcttaggtgatcctcccacctcagcttcctgaatagctgggactacaggcatgcacaatcatgcccagctaattaaaatatttttttctgtagagatgaggtttcactatgttgcccaggctgtctggaatacctgggctcaagggatcctcctgccttgtccccacaaagtgctgagagtacagatgtaagccactgcctctggcccacttacttattattgacactgaacaatgctaattggtagcttccataattatgaattgattctgtaactattgctactgactacttcttagggaaatatctcatcttctcctccttactcctctttcctaaatgtagacacataataatcctttgcaacccagacctactaatgtaactatggcctatgtaacacagtagactaacaggcacaatgattggtacacctggtgctaagtgagaaaaagatatttgtttccagaacaggaatatcttagatcaaacataagaatgttcttttaatgaaaatttctttgacttcaaaggactcaacacttaacatggaattcataccattttggagctgggacttcagagatctgacactctcattgtcattgtgcacagtgattcagacctgagttaaagtcccagctctagaacattctaatatttgtgatcttgggaaaatttcttaatctctcccagagtttgttttcttatttttttttgggacagagtttcactcttgttgcccaggctggagtgcaatggcacgatcttagctcaccgcaacctccgcctcccaggttcaagcgattctcctgcctcaccctccctagtagctgggattacaggcatgtgccaccacgcccggctaattttgtatttttttagtagagacggggtttcttcatattgctcaggctggtctcaaactcccagcctcaggtgatctgcccacctcggcctcccaaagtgctggattacaggcatgagccaccgcgcctggccagccttttttttttttttgagacggagtctcgctctgtcgcccaggctggagtgcaatggtcgcccaggctggagtgcaatggtgtgatctcggctcactgcaatctccgcctcctgggttcaaacgattttcctgcctcagcctcccaagtagctgggattacaggtgtgcgccatcacacccagctaatttttgtatttttagtagagatgaggtttcaccttgttggccaggctggtcttgaactcctgacctcaagtgatttgcccacctcagcctcccaaagtgctgagattacaggcatgagctgctgtgcccggctgatttctcttctttaaaatgagggtactgccatacaaaggaaggaaattctgatacatgctacaacatgaatgaactttgtaaacattatgctttcagacaaatttgactttaattgagaaaaaaagagaaaacatactaagtgcaataaagcagacacaaaaggacaaatattgtatgattccattagtatgaggtacccaaacattatatgagtccattaatatgaaatttggcaaggtcacacatacagaaagcagagtagaggctaacagggctaagggaatgggagaatggggatttattgtttaacggttacagtttctgtttgatgatgaaaaagatattgaaacagcagtaatggttacataacatagtgaatgtacttaatgccactgaattgtacacttaaaaatggttaaaatggtaaattttattacacatattttacaataaaaaaattttagccaggtgtggtggcatgcacctgtaatcccagctgttcaggaggctgaggcaggagaatctcttgaaccctggaggtggaggtttcagtgagccgagacgtgccactgcactccagcctgggcaacagagtaggacttggtctcaaaaaaagaaaaaaattttttttgtaataataagggagttggggctgggcgtggtggctcacgcctgtaatcccagcactttgggaggccaaagtgggcggatcatgaagtcaggagatcgagaccatcctggctaacacagtgaaaccctgtctctactgaaaatataaaaaattagccaggtgtggtggcgggcgcctgtagtcccagctacttgggaggctgaggcaggagaatggtgtgaacccgggaggcggagctcgcagtgagccaagatcgcgccactgcaccccagcctgggcgacagagcgagactccgtctcaaaataataaaaataaataaataaataaataaaataataataataacggagttgggaggaaaaagaggaaatgcaaaaagggcctagcacagtacctgaatgctccacaaatattagccatgggtgttagttattatttgaatgtcaaaagctgaatgaagccctggggtaagaaaggtcacatgtgcccaaggtcacatagcttcaaggtccacactagattgaaaaccaagttttctgttttcttatctagtactctgtaacaccaggactgagatactctctattccaaaatgtgttttttctgatctgggaatacctaggttgagtggcccagggatcaataacctgagagatgaggctctttacttccaaatgtaaacagagcccccaaaactctacctttgccttctttcctctcttgctgttcttgctatctgccaacttccatctaaagtactcccctctctccctctagatctgtttggctgctgtcctggtttcttcttctcactaaatatctgggtttctgattgtttcctttatttcccagatgtactggtttgcatttttcccccagtcacatcctttgtgttctctaatccagatttctagactctgtaggggagagagaaggtttttttttttcctctctagagtttttaagtgaatagagtatttcctgcccatcacttatatgcaataactgttctgttaggttttgatgctctggttagggaagctgagcaaaaacggctggaaaacagatttttcagactgtttcttggtgatgtcttaggtcactgcagaattttggcttttaaaatatgtaacaaaggctcagcatttgcatgttgtatatggcacatattgcttacaagaaggcaaaagactcctggaaacattactggcaccctagactactgactaaatgtcttctgatactcatgatgatatccataatttcacaggtacaccaaaggatacatgtgcccctaaataagagcccttcctccctaactgtggagcatgctctggggtagaaggaagtcagatgcctgaagatcacataagtgaatagaaaccctgtctataaaaaattagggaaaaggagagctctcattctgttttgcagaatggatgctgccccattcatgattaagaaaatttattaatttaaaagaaaaccagaaaatgtgaaatttatatattataagcttataagatccaggaggaattttagatacgatcaaatagagccacctcattttgcagatgaggcccaatgacatccagatcataagtagcctaggatctttcactccaggggaattctgatgagaaaatccttaggctttcttacggtagatcttaacagagggtgctactgcttccttgctccttacatttgttcctgcctttcatagctcaaaggcaaattttcatcaaaaatttgttgatgccattgggtttaaacctttactgtttctatggggatggctttgtaacagcattaccatgcccccaggtggaagctatatcttaaagggcttgaaaatccattcaagacagccgctaaagatagcttttgactccctcacagaagatttttcctcagctatgatatggggaatgggtgagcagatgggagaagtaggaagaagaggagagaatgcttcttgggggtttggaggggtgttcagcatagttccacaatcaaaccagcaggagagcagaactgtgaggcaactctggggaggagttgaggctctaggggaagtctcctgtagagcacaagcaggaaacatccggcctatagcagcattaagaagggctaatgtgtctcaggagggaaggatgccatcaccatagaacctctaaatatgggcacagtaggatcccagaaaagcagtgtttcggggaggatgcgttctgcccaaaacatgtctgttaaggttattttgtagcacatggagcgctgatttgacctcaagtttttgttttttaacaggtggaaaggcaagtttaatctacaattttagtcgccaccaatacactctcttagagcttttcatgacacgtctcataaagaaatgctgatggccgggagcggtggctcacgcctgtaatcccagcactttgggaggccaaggcgggcagattacgagatcaggagatccagagcatcctggctaacacggtgaaaccccgtctctactaaaaatacaaaaaattagcccggcgtggtggcaggcgcctatagttccagctactcgggaggctgaggcaggagaatggcgtgaacctgggaggtggagcgggcagtgagccaagattgcaccactgcactccaacctgggcgacagagcgagactctctctcaaaaaaaaaaaaagaaaaaaagaaaaagaaaagaaaagaaaaaaaaagaaatgctgacgtttgccaagaggttcctgagttttggtcatactacagcacttgcaggcagtgtcactgcattcacatataatgataataacgatattcacacatattaagcacttatttatgctaggtatttttccaagggatttacacatattaactcatttagattttcacaacaacctaatgaggtagctagtatacacatctttatttcacagatgaggaaactgaagcatagagaggcaaaataaaccagccaaggtcacatagctaaccaagtggtggagctgggatttgtctaaaagtctggtttcagaacccttgtgcttaatcctatactatactgttgggtgtatcaactgtatgctaaacagttgcctgtctggagccaggacttccagactttcagtctgcacatatggagccataccactgacaagtatgtccaaaacttctttgatcctaagaattacctggacaattgcaaaatatatagattcccacaccctggctcagatgtactcacaatcaggcaagtttttaaaacccaggtttagtgggtttagtgagcactaccagccagccctgagcattaggaaattgaagtttttgtcctgattttgcttctgtctctcagactctgagcaatttcactcttcaattccctgcttgctctactgtctgcctgtcacttaacggaatgttacaagaatacatacaatttttccccctcataagggacacctgttgcttcaaaaacacggtatcctcataaaatgatatgcatgtagtaacaggtgtattttcttgcacttcttttgttttgttttgttttttgctttgctttccttgaagcacaaacctaagcccctcatccagacctagccttcagctgtcctccaggtgacacgcatacacaccccaaaccaggctgcattctgaccgaccttagctctctccctctgggagctctgatcggctctcagttcagcccaacaatgagaaacttttttctcgtctccctcaggggagccttcacgtttatccaattcattctcttgcaacccaactctccagaaagaaaaggggggaaaatcccaccccgaagagacggtcttcaggtctgaggacgttacttagcaacggcacaaagaccagtgagcaaagggagacctgaggagaaaactcttgggtggggagacagagccagtttgaaaactccatttcatccagagaaaaacaaggaaaacacaaacagaatcaatcccaagtaacaagcggggcttctccccagcgcaggtcatctcttactccctgcatctcaactccttcaaacccccagtgaccaagtccgcccccgcctggtttcgcccatggcccgagtgccctccccttgccctggcctgacccacacaggcttggacttaggggcccccacccctccccaggcacccaccgttctcagacgcgctgggaccttcgcagtccgagattaactgttggggtttccgctgctttcgccgagacattcccgggtagagagttgggagagggaggggcaacgctcacttggtcttaaccggggtgacctggtctcgtctcccccttgggtccgaagccaattgatgcctctcccccagcgcaaatcactgtgaagcagagatgttcttctttcccagagacacagactctctctctctctctgattctctgttcttgactctctctctttctctctcaatctttgcaagtctttaaaggggagacgccccctttttttcttcagcttcttccctacgcttctgcagctcccattgtaaaagcaaaaatcctaatctttccgcacactcttttcttttgtactgcagaggaaaggatttaaccctctcctccctgcaagggccctgggcctctccctgtgctgtctgttcagaaactgtccctggcttgtttttctaactcttcttccaagatcttcactgtgctttttggttctgtcatatttctatgcccctctgataatgtagctgcttttagggtataaactgaaataagaaccttctgatatgccctgattatgagtaatatatgtatagctctttataatttatagaatattttcatttataacgtgttttgaatgttataactctgagatgaacacagtaggctttactactcctatttatagctgagtccctttatagatgaatcaaaaggcccagtgaggttaagtaacttctccaaagttgcacagctgtgatgtatcagacacaggcctggaatccaggtgcatctgacagtagcctaacattgtttcctctatatcagtaaagacacaatatgccaccaaactgctatcatgaaaaacaaaagtgattgatctcaaggaatctcatttaaaatagcaatggctgggcacggtggctcacacctgtaatcccagcactttgggaggctaaggtgggcagatcatgaggtcaagagctggagaccatcctggccaacatggtgaaaccccatctctactaaaaccacaaaaattaggctgagcacggtggctcatgcttgtaatcccagcactttgggaggccaaggcgggcggatcacctgaggtcaggagttcgagaccagcctgaccaacatgttgaaaccccgtctctactaaaaatacaaaaattagctgggcgtagtggtgggcacctgtaatcccaactactccaaaggctgaggcaggagaatcacttgaacctgggaggcagcggtggcagtgagccgagatcgcgccattgcagtccagcctgtgtgacagagcaagactctgtctcaaaaataaaataaaataaaataaataaaaaggaatccctccatctccacaatacactgtttggcaacaaccaggtttctcctgcttagcctgtacactgagggtgattcatttatttttaacttctggctgtgatgttcctacctatatttgagtactactgagctactgggcatagaatattctggatatgccctgtcttctggcaataatgcctgggcccctttcttttagcatgatttctgttttattcttctggctgagatagcatctgaaacaccatcagttggaaaagtgggaagtattttccccttttaggattagtaatgtaaatctctgatggctttatcttcagagaaaagcaaaagaaagctcactcacaggtttgggtgcaaatttgaaggtttttgcatttcttcccttacacaatttcaagctagtttggcaataccaagaaaggaaaagggagacagcagatggcaggggtgctgctagtgataattgaagcaggtatccacattacatctgaagagttttggaaaatgctctcatctttgctttggagttcactgaatctccatttttttttccagtcctttggtgtcagggccctgggtggctttctcaagtctacccttggaactcttgttgctgacattatgtaattcatcctattaactcccctgtggtagacaggtgccattatttattactagaccattgtaggagaaataggggtactgagcctaggaaagcttctgattcctccgtggaatagactgagtcctgtcatcctctcaccccactgtttccatcatttatttccttccaggaagggaaaggagagaaggaaaatagctttctgcttttctcaggagtctgaaatctccaagggagcagatttcagggtccacatttgtcttttttcctgaatcttggctgtcttcatcttttcctatttttccccctccttcttgtgggtcttattgtgaaaggaaggactctttcccctcctcttctttcttcctccctacccagtttaccattttttttccttttacctctccactgtggcctcttgacctccccacagagttacaaaagtaaaatccttgaagagatgctgctgtgggaatgttaatgagccttccccacaaaggggcaaagactttacttcactgagttggaaaaaagcccctttgaaaaggggtttctgtgtgtggtgaagtggagaggggaggggaaggagagggatagaggcaaaagaagggagggagagaaaaagagcaagagaatgaaaggagacagagaaatagaagagagacactcaaacttcatactagaagagaatattaaaaataacaacaccacttttcttttttcaatttgtcatctaatttttgggaaatgttccttggtcttttgaccttgtaaactcagggcttacattcccaagaagctgaagagggactcgagagcatgggagataataaacgataggaagaagggacttatcttggcaccccacccccagtctcttcccatatacgagagccagagctagagaggctctagggtggttgggaggggtgtgtaatattctggattgggggaactggtggtgaagatgggctcttttttctggatttgtggttgattcttatgatattttctaattttatcaacatttcttattttggcttccctattggatgttggtctaataatttatctatcttcaggaatcgtttacagcattgttgaggtgttttcgtcaaggagccaattttcaagccaggccacttgtgcataatctctctttccttcatttgtgtgcacaggttgcctctggattagttaaaatgaatgttaaggtatttgggtgtcaaaattaaatccttaaaaaaatatatatatgtttttgctttttatttttttaccctcatcttcttctatgtgatggtatcttgttgctttttttttttttttttttttttttttttttttttgagacagagtttcgctcttgttgcccaggctagagtgcaatggagagatctcggctcactgcaacctttgcgtcctgggttcaagcaattctcctgcctcagcttccagagtagctgggattacaggcatgtgccaccatgcctggctgattttgtatttttagtagagatggggtttctccatgttggtcaggctggtctcgaactcctgacctcaggtgatccacccgccttggcctcccagagtgctaggattacaggcgtgagccactgcgcccggctcctgttgctttttaaagaaagctgggccgggtgcagtggctcacacctgtaatcctagcactgtgggaggccaaggtgggcggatcacgaggtcaggagatcgagaccatcccagccaacaaggtgaaacccgtctctactaaaaatacaaaaaattggccaggggcagtggttcacacctgtagtgccagcactttgggaggctgaggcgggcggatcacgaggtcaggagttcgagaccagcctggccaatacagtgaaaccccatctttactaaaaatacaaaaattagctgggtgtggtggcgcgtgactgtggtcccagccacttgggaggctgaggcagaagaatcgcttgaacccaggaggcagaggctgcagtgagccaagatcacaccactgcactccagcctgggcgacagagcaagactctgtctcaaaaaaaaaaaaaaaaaaaaaaaaaaaaaaaaaagaagaaaaagaaagctggccaggtgcagtggcttatgtctataatcccagcactttgggaggctgaggcggctggatcacttgagtttaggagttcgagaccagcctgggcaacatggcaaaactctgtcactacaaaaacatactaaaaattagccaggtgtggtggcgcatgccagtggtcccagctactcaggaggttgaggtgggaggatcacttgagcccaggaagtcaaggcttctatgagccatgcatgatcagtgatcaaactggtacactccagcctgggtggagtgagaacctgtctcagaaaatgaaatagccgggcgcggtggctcatgcctgtaatcccagcactttgggaggccgaggtgggtggatcatgaggtcaggagatcgagaccatcctgactaatatggtgaaaccccgtctgtactaaaaatacaaaaaaattatctgggcatggtagcgggtgcctgtagtcccagctacttgggaggctggggcaggagaatggcatgaacctgggaggctgagcttgctgtgagccgagatcgcaccactgcactccagcctcggggagagcgagactctgtctcaaaaaataaataaataaataaataaataaataaataaataaataaataaataaaataaaatagtaaaataaaataaaaaatgttagtcattgtatttgactctcagagtttcctacatgctgttttgtggtatcagcccaacaccccagttaaaaccaggaactgcgaggagcaaggagaaggtgattggagtgacatctcaggaagagaaagatgaggagccagtcacgaatgcttattgccagagctctctactctcttttggtctagtgactcccaaacaccacaatcacatggggaatttatggagaattcacattcctgggctcccccacagatttacttaatcagaatctctgggggtggagcctaagatatttaaacaagctcttgaatgattcctttgcagggttaaatttgaaacaattatgtttgactggttttggatacccatgaaccaagcgctgcctgtggacgaaatacataacatgcttcacaaatgtgtgtactgcctttagccaaatgttttgatgttgttaagatgaatacacttggcctggcgcagtggctcacgcttgtaatcctagcactctgggaggccaaggcatgtggatcacaaggtcaggagttcaagatcagcctggccaagatagtgaaaccccgtctctactaaaaatacaaaaattagctgggcgtggtggcgggcatctgtaatcccagctacttgggaggctgaggcaggagaattgcttgaacctgggaggcagaggtcgcagtgagctgagatctcaacattgcacttcagcctgggcaacaagagcaaaactctgcctcaaaaaaataaaaagaagaagaagaagaaattttaaaaaatgcttctgaccgggtgcagtggctcacacctgtaatcctagcactttgggaggtgtaggcgggcagaccacctgaggtcaggagttcgagaccagcctggccaacatggtgaaactccatctctactaaaaatgcaaagattagctgggcgtgtggcgcatgcccgtaatcccagctacttgggaggctgaggcaggagtatcacttgaacccaggaggcagagactgcagtgagccgagattgcgccactgcactccagcctgggtgacagagtgagactctgtctcaaaaaaaaaaaaaaaaaaaaaaaaagcttctaagcttctagggggtttttccctaaaaataaaatggtagtcatgagggagtctggaaaactttttgccatttcattcaatgccttttctctcaggaaaacactctgctcttattcttctttttctagtttgttttcagaaatggaggtattgtggaggcattttctctaccttctgaagcgttagaatcctatgatctcatgacttgatttaattgcaagagaaatgaactaggaatctagaaacacatgtactgtttcggttgataataatcatagctgtggtgcattctgtgcaccctgccctttggacacataatctcattaaatctttaaaataattttgcaaagggagcattatatagtccccatctcatgcatggagaacaccccaatttacaaataaggaaactgaggcttagagaggccatatagcttaatagctcaaggtcttgtagctgataaagagcagggttgaaatttgtgcaagcaatgcctgattggacagcctatgtttttttcacacaatttaatactttattgccatctggtgatttctgcttctgttatgggccttgccttctggctgcagacctggaggataacttaaaattacaaattgcaaagaaaatttgaagatctacaaagtcaacatttattaaaattatggatcttataataacatatactgtcacatgttctttgtcttgctagcattaaggaagtgagagaatacagagttagggtaaagcgccctttgcaaaactttcctaaataagaaagccttggcaaacaacctctggtcttattagatgatttccgcctaacctctttcaggtggtagttgccatggtgttttaggggaagaggaagggagtgaagatcaaggagggtcattcagactgagtgttgtctggtgtttcttttcagagttcattcagcagaagatggaaggaatttaaacgttcagaggaggaacgatagactttattctttttgcttttcttcatttttccacttctcattcctcatgttaaatataagggaattgggagaatgtaaagaggacaaggtagtcggacaggaaagggaggttgtgggggaagggccaagagcctagcagccagcggagagaaggatagggtggtggcagggagttggcggggagagagagagtgctttcgagggataaattataaggatatttgttaaagttctggggatcctaaggttggccattagaaaaaaaaatcctcagagggtggggataaagtagaaaccatagcatgaggagagaggacaataagaaaggcaaaaaaccacaaaaagataaacagagcaatcaaaaaggaaaacaaatcaatgatgggaaagaaagagttaaatggcagaggcaagtctttggaggaactggaacatacgggttgaagtatgacagagaatatgaataattgataacttataatagaaatgtggtcagagcatccaggagaaacatttaagaagagaaacaggccagccgggcgtggtggcccaggcctgtaaccccagcactttgagagcccgaggtgggaggatcccttcaggtcaggagttcgagaccagcctggccaacatggtgaaaccgcatctctactataaatacaaaaaaaaaaaattagctgggcatggtgcacgcgcctgtaataccggctactctggaggctgaggcaggagaatctggaacccgggaggcagaggttgcagtgagctgagatcatgccattgcactctagcccgggcaacagagagagactcggtctcaaaaaaaaaaaaaaaaaaaaaaaaaagaagaggaacagggcgggcgcggtggctgacgcctgtaatcccagcactttgggaggaggagcaaggtagatcacctgagttggggagtttgagaccagcctgagaaacatgaagaaactctgtctctactaaaaatttacaattagccaggtgtggtggcgcatgcctgtaatcccatagctactcaggaggctgaggcaggagaattgcttgaacctgggagggggaggttgcagtgagccaagattgcgccatcacactccagcctgggcaacaagagcgaaactccgtctcaaaaaaaaaaaaaccacaaaaaaacaaacaaaaaaaataccttttagtgagttaataatctattcaccattttagagatcattccaggaaagagatactgagaaacttcttgatgatgtctaattaattcctaattatattttaagtgaaaattatttcaatatgtccttggttgagtttattcaacaaatattttttgggcacctcctgtgtgctaggtacgtagtatacgatgggaaataaaacagattctgccctgttgattattataccaccattttgtaattatttggacttcattctttcttttttttttttgagacggagtctcactctgtcacccaggctggagtgcagtggcatgatctcagctcactgcaagctccgcctctcagattcacgccattctcctgcctcagcctcccgagtagctgggactacaggcgcccaccaccacacctggctaatttttgtatttttagtagagacggggtttcaccttgttagccaggatggtctccatctcctgacctcgtgatcctcccgcctcagcctcccaaagtgctgggattacaggcatgagccactgtgcccggcctattctttctttatttttgggacagggtctcactctgttgcctgggctggagtgcagtggtgcagtcttggctccctgcaacctctgcctctcagattcaagggattcttgtgcctcagcctcccaagtagctgggattacagaaacacaccaccatgacccactaattttttgtagagacagaatctcactatcttgctagggctgatctcaaactcctggggtcaagcgatcctctcacctgggtgttccaaagtgctgggattacaggcatgagccaccatgcttggccctggacttcattcttttggtgatatctctttgtgatttttattggcacggtctggtaaagttaagtgtattagtctgttctcatgctgctaataacaacatacctgggactgggtttttttttttttttttttttttttttttttgagacggagtctcgctgtgtcgcccaggctggagtgcagtggtgcgatcttggctcactgcaagctctgcctcttgtgagacccattcactatcaagagaacagcaggggaaagacccagccccatagttcagtcttctttcatcaggtctctctcataacacatggtaattatgggagctacaagatgaggtttggatggggacacagagccaaaccatatcattccacccatggtccctctcaaatctcttatcttcacatttcaaaaccagtcatgccttcccaactgtcccccaaagtctcaactcatttcagcattatttctaaagtctgtagtccaaagtctcatctgagacaaggcaagtcccttctgtctatgagcctgtaaaatcaaagcaagttaattacttcctagatacaatggaggtacaggcattgggtaaatacacctattccaaatgggagaaattggtcaaaacaaaggggctacaggccccaggtgagtccaaaatccagggggacagtcaaatcttaaagctccaaaatgatctcctttgactccatgtctcacatccaggtcatgctgatgcaagaggtgggttcccatggtcttgggcagctctgcacctgtagccttgcatggtacagcctccctcttggctgccttcacaggctggtgttgagtgtctgcggcttttctttttttttgaaacagagtcttgctctgtctcccaggctggagtgcagtggcgccatctaagctcactgcaagctccgcctcccaggttcatggcattctcctgtctcagcctcccgagtagctgggactacaggcacccaccaccacgcccggctaattttttgtatttttagtacagatggggtttcaccgtgttagccaggatggtctcggtctcctgacctcatgatccgcctgcctcggcctcccaaagtgctgggattacaggcgtgagccatcacgcccggcctgtgtctgtgacttttctaggtgcatggtgcaagctgttggtggatctaccattatggtgtctggaggacggtggccctcttttcacagctccactaggcagtgccccagtgaggattttgtgtgggggcttccaccccacatttcccttccacactgccctaacagaggtttcccatgaggaacctgcccctacagcaaacttctgcctgggcatccaggcatttccatatatcttctgaaatccaggcagaggctcccaaacctcaattgttgacttctgtccactcgcaggctcagaaccatgtggaagctgccaaggcttggtgcttgcaccctctgaagccacagcctgagctctccgttggcttctttcagccatggctccatggctggactgtctgggatgcagggcaccaagttcctgggctacacaaggtatggggaccctgggcctagcccaggaaaccacttttttctcctaggccttggggcctgtgatgggaggggctgccacacaggtctctgacatgccctggagacattttcctcattgtcttggtgattaacatttggctcctcattacttatgcaaatttctataggtggcttgaatttctcctcagaaaatgggattttctttactatttattgcattgtcaggctgcaaattatacaaatttttatgctctgtttccgttttgaaacagaatgcctttttttcttttttgagatggagttttgctcttgttgcccaggctagagtgcaatggcctgatctctgctcactgcaacctctgcctcccgggttcaagcggttctcctgcctcagcctcccaagtagctggtattacaggcatacaccatcatgcctggttaattaattaattaattaattatttgagatggagtctcgctctatcgcccaggttggagtgcagtggcgcgatctcggctcactgcaagctcctcctcccaggttaacgccattctcctgcctcagactccggatcagctgggactacaggcacctgccaccaagcccagctaattttttgtatttttagtagagatggggtttcaccatgttagccaggatggtctccatctcccgacctcatggtccgcccacctcggcctcccaaagtgctgggattacaggcgtgagccgccgcgcccggccacagaatgcctttaacggcactcaagtcacctcttgaatgctttgctgcttagaaatttcttccaccagataccataaattatctctcaaagtcaaatttccacaaacctctagggcaggggcaaaatgccaccagtgtctttggtaaaacataacaagagtcacctttactcccattcctaacaagtttttcatctccatctgagaccacctcagcctggatttcatagtccatatcattatcagcattttggtcaaagccattcaacaagtctctaggaagttccaaactttccacattttcctatcttcttctgagccctccaaactgtttcaacttctgcctgttacccagttccaaagttgcttccacatttttgggtatcttttcagcagcaccccactcccagcaccaatgtactgtattagtcttttctcaatgcaccaggtctctctcacaacctatgggagttatgggagctacaagatgagatttggatgacacagagctaaaccatatcagtaagcattattttatgtatttatttatttaattttgagatggagtctcactccggctatcacccaggctggagtgcagtggcgtgatctcggctcactgcaacctccgcctcctgggttcaagcaattctcctgcctcagcctcccgagtagctgggattacacgcacctggcatcacgcctggctagtttttgtatttttagtatagacagggttccactgttttgaccaggctgctcttgaactcctgaccttgtgatccacctgctcagcctcccgaagtgttgggatgacaggtgtgagccaccacgcccagcagtaatcattattttaatacccctttatatgaaactgaggcacctaggttttttttttttgtttttttttttgacagagtctcactctgttgcccaggctgaagtacagtggcatgatctgggctcactgcaacctctgcctcccacattcaagcaattctcctgcctcagcctccggagtagctgggattaaggtgcctgccaccacgcccagctaatttcttgtatttttagtagagacggggtttcaccatgttggccaggctggtcttgaactcctgacctcatgatttgcctgccttggcctcccaaagtgctgggattatagggcgttacacccacaacctggttttttttttttttttttttttttttttttttaagatggagacttgctcttgttgcccaggctggagtgcaatgctgtgattttggctcactgcaacctctgcctcctgggtataaatgattctcctgcctcagcctcctgagtagctgggattctaggtgcccctcaccacgcctagctaattttttttttttttttttttttttagacagagtcttgctctgtcacccaggctggagtgcagtggcatgatctcggctcactgcaagctttgcctcccgggttcacaccattctcctgcctcagcctcccaagaagctgggactacaggagcctgccaccatgcctggctattttttttgtatttttagtagagacggggtttcaccgtgttagccaggtctcaatctcctgacctcgtgatccgcctgcctcagcctcccatagtgctgggattacaggcgtgagcagccatgcccggcctcacgcctagctaatttttgtatttttagtagagacggggtttcaccatgttggccaggctggtctcgaactcctgacctcaggtgatccacctgcctaggtctcccagagtgctgggattacaggtgtgagccactgtgcccagccctaggtttggtttttttgtttgtttgtcttcttttgagactcagtcttcctctgtcacccagggtgcggtgcggtgcagtggcaagatctcggctcacctcaatgtccaccttctgggttcaagcaaatctccttccttagccttccgagtagctggggattacaggcatgcaccaccacacccagctaattttgtgtttttattcttttatttttatttttatattctccatgttggtcaggttggtcttgaactcccccaccctcctcaacctcccaaagtgattacaagtgtgagccacagcacctggccatgtgatgctttttttttttttttttttttttgagatggagtctctctctgttgcccagggtagagtgcagtggtgcgatctcggctcactgcaacctccacctcccgggttcaagagattctcctgcctcagcctcctgagtagctgagattacaggtgcacgccaccacatctggctaatttttgtatttttagtagagacggtgtttcaccatgttggtcaggctgatctcgaactcccgacctcgtgatccacctgcctcagcctcccaaagtgctgggatttcaggcgtgagccactgtgcccggcccatgtgatgctttttaagggatcccaataggcaagccaggaaggcagccaatgatatgtagcaattgctggaggcagtgacagttgatggcagaaggttcttttggaagcagatgggaaagagtacctgatagtgactatgaacagggtggctgggccatggggaagttagactcaaagtttagtatcactggatttggtagaaaaaagtggggattgtaggggaaggacttaatgactacattatgtgtctatgagatttaggactacattttccttatttgattcaatgacctctgctcccatcttttggtcaagggataaatattaccaggatgtgtgtgtgtgtgtttccaaaaaattggatggaagtcttgaagaaaagagaggggaaggagagagacctgagagaaataagcctgttactcaagataaattattctttccattacctacctccgtctctcccttccaaacatctactatccttccatacacaccatttgtaatctgattacaggtgcctgccaccccacctgactaatttttgtatttttagtagagacagggtttcaccatgttggccaggcttatctcgaactcctgcgttcaaatgatttctccacattggcctcccaaagtgctggggttacaggtgtgagacactgcacctggcctcatcagattcttgaaacaaacctaggggtcgggtgcagtgtctcacgcctgtaatcccagcactctgagaggccgaggtgggtggatcatgaggtcaggagttggagaccagcctgaccaacatggtgaaaccccgtctctactaaaaatacaaaaattagccaggtgtggtggcgcgagcctgtaatcccagctactcaggaggctgaggcaataagaatgaaactccatcacaaaaaaaacctaaataataataataatcgatgctgttattatccaaatgaacaaaaccactaaactagaatcgcttgaacccaagaggcagaggttgtggtgagccgagatcatgccattccactccagtctgggcaacaagagtgaactctgtctcaaaaagaaaacaaaaaacaaacaaaacaaaaaccggtaggctgggcacagttgctcacacttataatcctagcactttgggaggctgaggtgggaggattgcgtgaggcctggaattcaagacgaggctgggcaaaatagcaagaccccgtctctacaaaaaatacctactgggcatccactctatgccagctgggcatgatgcatgtgaatataacttcatatcctttccactctccaaggatttatattgaaagtccacttgacaaatagaactcatatgacatacattttcatttttagtggaaaaaccatcgaacttgggttctagtcaaattctttctattcccagttaaatccccttggggccaggcatggtggctcatgcctgtaatcctagcactttgagaggccaaggcaggaggactgcttgaactcatagtatgagaccagcctgagcaacatagtgagacctcatctctactcaaaaaaaaaaaaaaaaaaaaaaaaaaggccaggcacagtggctcatgcctgtaattccagcactatgggaggacaaagcgggcagatcacttgaggccaagaccaccctgggtaacatggtgaaaccctatctctagtaaaaatacaaaaattagcccggcatcagggtacacgcctgtaatcccagcagctcgggaggctgaggcaggagaatcgcttgaacccgggaagtggaggttgcagtgagccaagatcgtgccactgcactccagcctgggcaatagaatgagactcctcaaaaataaataaataaataaataaatagataaaaattatccaggcatggtggcagcctgtagtttcaggtacttggaaggctgagataggaggatcacttgagcctggcagattgagtctacagtgagcagtgatcacaccactgcacaatccccttaggaattttcccaagtgtttacctctcagacctcaatctgcattgatggaattagacccaatgattttcttacccagctttaacagtttgtgcttgcatatgtgaacatctgtatcaatcaacaagatgcatctattgcaacaatttctacatagggtcctacaataataaatctatgatggtaattttctttctttctttctttctttctttctttctttctttctttctttctttctttcctttctttctttctctctttctttctttctttctttctttctttctttctttctttctttctttctctctctctctttctttctttttctgtcttcttttttttttttttttgacagtctcactctgttgcccaggctggaatgcagtggtacaatctctgcctcctgggctcaagtgatcctcccaccttagcctctcaacttcagcctcctgagtagctgggaccacaggtgcatgccactatgcccagctaatttttgtattttttgtagggacagggttttgccatattggccaggctggtcttgcactcctggacttaagtggtctgcccacctcagcctcccaaagtgtgattacaggtgtgagccacctcacatggcccctgatggtcatttctaaaccattacttaagacgaggtctagagtcaaagtcgaaaaatttctgaggaaggaatgcccaagagactgcttttgctctggtattagaacaagttcttgtcatttatttggcgaatattggaggaagtagttggcctgcatttatttatgcggtaggtagaataaaactatgcacttctcaatataggatcacactcatgcttatatagagagggacaggaggacagagagactcaacctgggctaactgcatggaatgccagagtgagattccgttgcattctttacattgctgttggggaatcctaattatagtttaatttgcatattcaaatttaacttgtattaaattaaattaaaatatgaaagtccatcaacaaacctcaggtctgctaacctctgtgacctccagaagtaagtccaatcaaaaaccaaagcagcttagacattcatgattctgtatctccagatggcagaatcacctcaggatttagcccaggccatagaaatcctttccttcttttgggacataagctccaaggtagatcttctaatttgttacattttcaacaaacatttggcaaatgcatttgagatttcacttaccaggcctgcatttagggggaaagtagagtgaacgagtagacatttctcaacatagaatcacattcatgctcatattaagagagagatgagagaactgggatgctggggttacaaaggcaaataagacacaggccctgcttctccctgggaggaggggcaatttcgaaaagataaagacgatacaacatgagaaactgtcgtaaaggtatacataaagttccctgggaagaagggagacttgaataatactacctgagtgaactgaagagattttcagagaggaggtcacatgtaagatggatgttatgcacaatatggtttagatgaataaagaaatggtgagtccagtcacggtggctcacgcctgtaatcccagcactttgggaggccgaggcgggaggatcacttgagcctatgggtttgagaccagcctgggcaacatagcaaggccctgtctctacaaaaaatacaaaaattagccaggtgtggtggcagcacatgcctgtagttccagctgttcaggaggctgaggtgggagaattccttgatcccaagaggttgaggctgcagtgagctatgatcaggccactgcatttcagcctgggagatagagcaagactctgtctcaaaaaaaaaaaaaaaaaaaaaaaaagaagaagaaaagaaaaaagagtagaaatgtatagggaaagaaaatttgaaaagaagtttggggtgagtgtaaaagaccatttatgctatattaacaaattgaatattatgagaagacactggaagttttaaaacaaagaatatagctgtattttattattattttaataattttatttatttatttattttttgagaccatgtctcactccatcacccaggctggagtgcagtggcacaatcttggctcactgcaacctctgcctcctgggttcacgtgattctcctgcctcagcctcctgagtagctgggattacaggtgcctgccaccatgcctggctaattttttgtatttgtagtagagacggagtttcaccacattggccaggctggtcctgaattcccggcttcaagtgatccaccagccttggcctcccaaagtactgggattataggcatgagccactgcgcctggcatagagctatattttagaaggtcaaccattgaaagtgtggaaaatgatttaaaattggaaagagactgaatggacagaagagataccagaaatccaggcaagagatgaagagtgaggctggccacggtggatcatgcctgtaatcccagcactttatttatttatttatttatttatttatttatttatttatttatatatattttttgagatggagtttcactcttgttgcccaggctggactgcaatggcacgatctcggctcaccgcaacctccacctcccaggttcaagcgattctcctgcctcagcctccctagtagctgggattacaggaatgcgccaccatgcccagataattttttgtatttttagtagagacagggtttctccatgttggtcaggctggtctcgaactcccgacctcaggtgatccgcccacctcggcctcccaaagtgctgggattacaggtgtgagccaccgcgcctggccatttttatattttttataaaatagagacagggtctcactatgttgcccaggctggccttgaacgcctgggctcgagtgatccttccacctcagtctcccaaagcattaggattacagggattacaggtgctccccatcatgcccagctaatccaggctggtcttgaactcctgacctcaggtaatccacctgccttggcctcccaaagtgctgggattacacgcatgagccactgcacccggccaccaagttcacaacatttgatagttaatattattacactgttctgcatagagaacaagaggtgagtgctataagcaatgcagatcaactgcatacaagttcagaggaaggaaaggccatttccaattggagggcaggagggtgagcagattaaattagaataatgaagaagtcacttaaattggggatttcaaaagaacataagggccgcgcacgggtgcctgtaataccagcactttgggaggctgagcggggtggatcacgaggtcaggagattgagaccatcctggccaacatggtgaaaccccgtctctactaaaaatataaaaattagctgggcgtggtggcacacacctgtaatcccagctactcaggaggctgagaaaggagaattgcttgaacctgagaggtggaggttgcggtgagccaagatcgtgccactgcactccagccatgtgagagagtgagactttgtctcaaaaaaaaaaaaaaaaaaagaaaaaagaaaaaaaaaagtaagatgaacatttagacgataaaacttagagaaggcttagtgatccggaagaaagaaagaagcttgtcacctatcatttgtagaagtgacaagcaataaaaatgtaagcaaataaataactacagaatgaatgataattaaacagggtagtgggtcagaaagtgaagagaaagagtggggctggtggttaaggaattagagggaagacttgattccatctcaaggtagaaagctgttcatatgcagatcaactgctatctgtgaatggatacccgaatattgtcacaaacaaactgaaatgcaaatactcttagaaactggggtattagtaatgcaagtatgaaaaacatctgatttaagcagaacaacaacaacaaaacaccctcatcattctttgaatgacttaatctgtgaatgaaaacattcacatcctcatgattttgatgacagaatagatgatttttctttgtgctgagtttgttatctcaagctggaactaagtaaggctagtcaaggccatctgattcttattgctcattcattcattcattcattcattcattcaaccaatattttactgagagcttgctgtatgcggaattatgctttgcctggggaatgcagtggaggttttttccttggagttctcttactccaaagggctttaaccttggacaggttctgacacttgtctgctgacgtttttgttttgttttgttttgttttgttgagacagggtcttgctctgttgcccaggctggcaaaaagataacggctcactgtggccttgaactcctgggctaaggcgatcctcccactgcagccttcagagtagctgggactataggtgtgagccaccatgcccagctaattaaaacaatttttttttttttgtggagatgggatctccctctattgcccaggttggtctcaaactcctaggctcaagtgatcctcctgcctcatcctcccaaaatgtcgggattacaggtgtgagccatggtgcctagcctgttgatttttttttggataagagatagagaggacctggtaatatacaaggcccagagtgtgtcctaagatgatctatggggagagaacagagtatccctgactgaagagttttggaaactattttaatgttccccaattttatttgaactaaaaaacattgtctgcctttcacattccttcgtgcactccacctcaccactgctcccccggcacctgttggcctcttttgctatccaaatttaccaaataaatcttccccgcctttctacccatctgctgttcttcacagcttgtctctgggctcagccccaagcctggaggggcagtaaatggattcagagttgctgctcaaacatggattcccatggaaaccaaacgactaagaaaacaaatagggaggaagaggcagccactgcctgacctcttaccctccccctccaaattcttttcgcttttcagcatgaaagcaagcgcttatttgtataactagtagaaggacataacctgacccctccccccacccccaaattctttaagaatctctcgttcgacaatgagtaaatgaaagacagtgggacatcgccacctggtggtagaaatgccaaaatacttaagaagagagaactcaattaacaagtgaaagcctgcgatacaggccagtaagtatacaaagaagtaacattcagatacaaaaataagatacaaagaagtaacattcagaagccactcctaggaaactgtttaattgtgatgcagttagtacttgttccttctcacatatacagatttaaatatcatctttatgttggtgaatttttatttttattttttaaaaattttatttatttatgtatttatttttgcgacggagtctcaccctgtcgcccaggctggaacgcagtggcgcaatctcggctcactacaacctccgcttcctgggttcaagcgattctcatgtctcagcctcccgcgtagttggggattacaggcacctgcattatgcccggctaatttttgtagagacagggtttcaccatgttggccaggctggtcttgaattactgacctcaggtgcctcagcctcccaaagtgctgggattacaggcgcgagccaccacgcccggccgaatttttttttttttttttttgcatccaattcaaatatgggaacatgaggtttagtcttatctctcccaactccataccagattttttttttgtttgtctgtttgagacggaatctcactctgtcgcccaggctggagtgcagtgatgcaatctcagctcactgcaacccccacctcccgggttcaagcgattctcttgcctaagcctcccgagtaactgggactaatacacgcacacgccaccatgcccagctaacttttggatttttagtagagatggggtttcaccatgttgagcaggctggtctcgaactcctgacctcagatgatccacccgcctcggcctcccaaagtgctgggattacaggtgtgagtcactgtgcccagccatattagatattttttatctgaacgtcatgctgttgctacagattcagtggagttggacagtacttttctcttcccgtcctttcccttccatagggtagcatttgctggcttacaaaggaaaagcagaagctttgctccactatcttgtcttgtcttgtcttgtctcttttctttttcttttttttttcgtcttctgttcagatagtctcactctgtcacccaggctagagtgcagccgtgttatcatggatgggttactgcagcctctaattacctggcttgagcaatcctcccacctcagcctgctgagtagctgggactacaagtgcacgccaccatacccggctaattttactttttttttctttgagacagagtctcactctgtcactgaggctggagtgcagtggcatgatctcggctcattgcaaccgctgcctcctgggttcaagagattctcctgtctcagcctccagagtagctgagattacaggtgcgcaccatggcacctggctaatttttgtatttttagtagagatggggtttcaccatgttggtcaggctggtcttgaactcctgacgtcatgtgatccacccgcctcggcctcccaaggtgttgggattacaggtgtgggccactgtgcccggcctttctttttttaaagacaggttgcaaggtggtggctcatgcctgtaatcccagcactttcggaggccgaggcgggggtattgcttgagctcaggagttcgagaccagcctggccaatgtggcaaaaccccatcctatgaaaaaatacaaaaattagccgggcatggtggcaggcgcctgtaatcccagctattctggtggctgagtcaggagaatagcttgaacccaggaggcagaggttgcagtgagaggagatcaagccactgccctccagcctgggtgacaaagtgagactgtctcaaaaaacaaaaacaaaattataaaaaagagaagaagctcaacaactgatatgtttttcccggcatgaatatttttatattgaggaaaaataaatcacttaaaatttttttaaaagaaagagggtatactaaaaatacaaaaattagctgggtgtgatggctctctcctgtagtctcggctactcaggaggctgaggtgggaggactgcttgagcctgggaggtggaggctgcagcccacaacattccagcctgggtgagaaggaagaccctgtctaaagaaaacaaaaacaaacaaacaaacaaaaatgagtggaattggccgggcacggtggctcatgtctgtaatcccagcactttgggaggctgaggcaggcggatcatgaggtcaggagatcgagaccatcctggctaacacagtgaaaccctgtctctactaaaaatacaaaaaaattagccgggtgtggtggtgggtgcttgtagtcccagctactcgggaggctgaggcaggagaatggtgtgaacccgggaggcggagcttgcagtgagccgagattgtgccactgcactccagcctgggcgacagggcgagactccgtctcaaaacaaaaacaaaaacaaacaaacataaaaagagtggaattgttccctttaaccctcaattcatatgttgaagccctaacctccaatgtgattgtatttgaagatagacctttaaggaggtaattaaagttaaatgatgtcatgagggtagggccttaatccaatttgattggtgtttcttttatttgtttgtttgagacagagtcttgctctgttgcccaggctggagtgcagtggcacaatctctgctcactgggtttgtgtgattctcctgcctcagcctactgagtagctggaactacaggcatacaccgccacacccagctaatttttgtatttttagtagagacggggtctctccatgttggtcaagctggtctcgaactcctgacctcaggtggtccgcctgcctcagccttccaaagtgctgggattacaggcgtgagccactgtgcccagcctgattagcgtttgtatttatttttattttttgttattttttaaaataatttttttttaaatttttgagactgagtctggccgttgtcgcccaggctggagtgcaatggcgtgatctcagctcactgcaacctcagcctcctgggctcaagcaattgtcctgtctcagcctcccgaatagctgggattacaggcatgggccaccacgcccggctaatttttgtattttttagtagagacggggtttcaccatgttggccaggctggcctccaactcctgacctcgtgatctgcccgcctcggcctcccgaagtgctgagattacaggtgtgagtgaccgcacccgatgtggttagcatttttataagaagagaagaaacaccaggaatatgtggtcacaaaggaaaggccacgtgagggcacaaggagaagctaccatctgcaaactgtgacaagaggcctcaggttggtttccaatcctgctagcacattgctcttagccttccagcctgcagaactctgagaaaataagtttctgttgtttaagtcaccctgtctgtgatattttgttatagcagactaatacctggccttccataccataagctcctttccctatataatttgcaataaacagaggcctggagaatggagacaaagctattctggagacccaggggtctaggctaccttgcctttgcctcatttcacacttcaggctatatgagctctatccccaggaaaattcagctcttgctatttggattcattaagtggagaatagaatgagatctgttttgggtatcaggccagaaattatcagcatcttggaacgtcagaaaataatggatcagtacccaagttacttagtctcaccccatacagtcttccaccacctacagctgggtactataacaacacatcctaagagaaaagaggctcagagacttctttagcctaagaacctctaggacctaactccccagaagccttagcgtcaggtcaagtaaaggagcacacacaggatagagagtggaaatgtttctgtttttttttgtttttttgagagggagtctcgctctgtcacccaggctggagtgcaatggcatgatcttggctcactgcaacctctgcctcctgggttcaagcgattctcctgtctcagcccccgagtagccgggactataggcacacaccacaacgcctggttaattttttgtatttttagtaaagatgaggtttcaccatattggccaggctggtcttgaactcctgacctcaggtgatctgcccgcctcggcctcccaaactgttgggattacaggcgtgaaccaccgtgcagccgggaagtgtttctttcactggaggggcagaggtagttgtgatgaccctactgtggccctggggagaagagtgagaggataacagtgaacaaggggctaagtgaagttcttagaagtagggtggaatgagtgtgagagaaagggggaagctagtgaggcttttctcttatgctgatgtaaagtaggtttccaatagaagaaatttataagtaatacagaggataggatgattaatctaaattggaccagagcagagttttgttggccccagaggttttaagattttgtttaggtaagatttgtgtttagtcccagcaatttgggatgctgaggtgggagaatcacctgagcccatgaagtcgaggctgtagtgagctgtgattgtgccgccgcactcctgcttgggcgacagagcgagaccctgtctcaaaaacaaacaaacaacaaaaaagaaaagataaataaacctagattcttattgcacaccatatgcgaaagtaaatttcagatggaataaagatataaatgagcataacaaaactataaaaacgttagaatcaggccaggcatggtggctcatgcctgtaatcccagcactttgggaagccgaggtgggaggatcacctaaggtcaggagttcaagactagcctgaccaacatgacaaaaccccatctctactaaaaatacaaaattagccgggtgtggtgacgggtgcctgtaatcccagctactcgggaggctgaggcaggagaatcgcttgaacccgggagacggaggtggcagtgagccgagatggcgcattgcacaccagcctgggcaacaagagcgaaactccgtctcaaaacaaaacaaaacaaacaaacgaacaaaaacggttagaagaatatttaggactctataaaatcttgggatggggatgtgcttcatttttttttttttttttttttgagacagagtcttgctctgttgcccaggctggagtgcagtggcgccatcttggtctcgatctcttgacttcgtgatgtgcctgcctcggcctcccaaagtgctgggattataggagtgagcccctgcgcctggcctggggatgcgcttcttaaacaaaatagcccagaatctataaagaaaatattattacacaaaaataaaatctttgggatgaaaaaaggcagcataaacacaaataatacagttggtagaaaatatttgcacccataccaccaattgatgaattttctaatatacaaagacctagtattggaagaaaaagttgacaactcagtagaaaaataggcaattgatataaacagacaaaaggcagacgagcaattctgaatggtaaataagtctttttttttttttttttgagacagagtctcactctgtgagcccaggctggagtgcagtggcatgatctcggctcactgcaagctccgcctcccgggtccacaccattctcctgcctcagcctcccgagtagctgggactacaggtgcccgccaccatgcccggctaattttttgtatttttagtagaaacggggtttcaccatgttagccaggatggtctcgatctcctgaccttgtgatccgcctgcctcagcctcccaaagtgctgggattataggcgtgagccaccacgcccagccttctgaatggtaaataagtctaataaaagctacccaggcagcctccccacccctcccgcaatgctcgaccccaggattgccccggcttgcctgcccgccatggccgtcaaggaagcagccttcgatgatggagtggaagacgagtgatcaacgatgagtacaaaatacggaaaaaaaacaccccttttctttaccatttggtgatgacccatgctctggagtggccagcctaactgtccagtggcttccagatgaaatcagaccagaagggaaagatttcagcattcatcgacttgtcctggggacacacacattggatgaacaaaaccatcttgttatagccagtgtgcaacccctaatgataatgcttagtttgacgcgtcacactacgacagtgagaaaggagaatttggaggttttggttcagttagtggaaacattgaaatagaaatcaagatcaaccatgaaggagaagtaaatagggcccgttacatgccgcagaactcttgtatcatcaaaacaaagactccttccagtgatgttcttgtctttgactatacaaaatatccttctaaaccagatccttctggagagtgcaacccagacttgcgtctctgtggacatcagaaggaaggctatgggctttcatggaacccaaatctcagtgggcatttacttagtgcttcagatgaccacactgtctgcctgtgggacatcagtgccattccaaaggagggaaaagtggatgcaaggaccatctttacggggcatacagcagtagtagaagatgttttctggaatctgcttcatgagtctctgtttaggttagttgctgatgatcagaaacttatgatttgggatactcgttcaaaaaatacttccaaaccaagccactcagttgatgcttacactgctgaagtgaactgcctctctttcaatccttatggtgagttcattcttgctacaggatcagctgacaagactgttgccttgtgggatctgagaaatctgaaacttaaggtacattcctttgagtcacataaggatgaaatattccaggttcagtggtcacctcacaatgagactattttggcttccagtggtactgatcatggactgaatgtctgggatttaagtaaaatcacagaggaacaatccccagaagatgcagaagacaggccaccagagttgtttattcatggtggtcacactgccaagatacctgatttctccttgaatcccagtgaaccttggatgatttgttctgtatcagaaaacaacatcatggaagtgtggcaaatggcagagaacatttctaacggtgaagaccctgaagggagtgtggatccagaaggacaagagtcccagacgtatctttacttcttgtgattttagactccccttttttcttctcaatgctgagagtgatttaacactggttttgagacacaaactttgttcagctatccctctatataataggtaccaccaataataccattagccctaacagtgggtgttttctaaatattaatggtggggcttgattcagcaaagccacagacttattacactgaagttttcttcaggaattttctagtaacaaaaccaggtctaaagtagctacagaaacgggaatattatgtgtgattatttttcttcttatgctatatccgcaagtttttcagactcatttaagtaaaggctagagtgagtaaggaacagagccaaatgaggtaggtgtctgagccatgaagtataaatactgaaagatgtcacttttattcaggaaataggggagattcaagtcatatagattcctactcgaaaatcttgatacctgactttccagcatgcacatgaagaccagtagaccaggaaacaggtagacgagtttcctcttggttccttcagttaagtcagaactacacgttcctctttccccatatatttttgcttgttcgtgtatttcttaagctgttttcatgctgtttctttcctttctgtggaatggttttttttttttttttttaacttaggactaccaagttgtaaagatgtatgtttttacctgacagtaataccacaggtagactgtcaagttgagaagagtgaatcaataacttgtatttgttttaaaaattaaattaatccttgataaaagttgcttttttttttttgagatggagtctcgctctgttgcccaggctggagtgcagtggcgcgatctcggctcactgcaacctccgcctgccaggttgatgccattctcctgcctcagcctcccgagtagctgggattacaggcgcccgccactacgcccggctagttttttgtatttttagtagagatggggtttcaccatgctagccgggatggtctcgatctcctgacctcgtgatccacccgtctcaccctcccaaagtgctgggattacaggtgtaagccaccgcgcccagcctttttttttttttttttaggagttagtccttgaccactagtttgatgtttgatgcatctccattttgggtgacctgttttaccagcaggcctgttactctccatgacgaactgtgtaagtgcttaaaatggaataaattgcttttctaccttaaaaaaaaagctacccagtctctttattcatcaggagaaattaaaacaaaaatgaactgcccattagattggcaaaaattagttgataagattcagtgtgggtgagagtgtgggaataggcattcatacagacacacacaaacacacatatatatgcctcttgggtgtatgaattaggggtgggtgtatgaattaggagcatgaattgctacaattttgggggaagaaacatagtaatatctacaaatattaaaattatgtatcctttggccaggggctgtgactcatgcctgtaatcccagcactctgggaggccgcggggcggagggggtggggtgtagattgcttgaggtcaggagtttgagaccagcctggccaacatggtgaaaccctgtctctactttactaaaaatacaaaaattagccaggtgtggtggtgtgcacctgtagtcccagctacttgggaagctgaggcaggagaatcacttgaacccggaggcagaggttgcagtgagctgatatctcgccattgcactccagcctgggtgacagagtgagactccgtctcaaaaaataaataaaaagtcaaaggcatatacattgttctgcaccttactttttcagttaagtatatgtcttaatttttttatttttatttatttatttatttatttatttaattatttttgacacagggtcttgctccgtcacccaggctggagttcagtggtacaatttcagttcactgcagcctctgcctcctgggctgcaatcctcccacctcagcctccagagtagctgggactacaggtgtgcgccaccacacctggctaatttctttgtatgttttgtagagatggggttttgccatgttgcccaggctgggttccaactcctgagctcaagtaatctgcccgccttggcctcccaaagtgtgagaccctgtacatggactgctgatttataaatctgtgagctaataaattggatattgtttcttttttctttttttgagacggagtttggctcttgttgcctaggctggagtgcaatggtgcgatctcagctcactgcaacctccgcctcccgggttcaagcgattctcctgcttcagcctcccaggcgtgcgccatcatgtctgggtaattttgtatttttggtaaagatgcagtttctccatgttggttaggctggtctcgaactcccgacctcaggtgatccacccgccttggcctcccaaagtgctgggattacaggcgtgagccactgcgcccggctggatgttgtttaaggcgctaaatttctgctgctaacacattgcctattatgttagattaaatccaaacttcctacatagtttctgaggctttacaatatctacccttcacgtgtagtatggtcatgtaacctctcccccatatactacctttcaccaacactagctttcctttcaaacatgccaagcttttttttttcttttccatcctagagccttgtattagcttttccctctatttttcctgagattcttgtggctatggctttgaaaaagtattttttatttttatttttatttttttgagacggagtctcggtctgtcgcctaggctggagtgcagtgatatctcggctcactgcaacctctgcctcccgggttcacgcgattctccttcctcagcctcctgagtagctgaaattacaagcacgtgccactacgcctggctaaatttttttttttttgagatggagtttcgagcccaggctggagtacaatggcgtaatctcagctcaccgcaacctctgcctcccgggttcaagtgattctcctgcctcagcctcctgagtagctgggattacaggcatgcgccaccatgcccggctaattttgtatttttagtagacacacggtttctctatgttggtcaggctgatctcaaactcctgaccccaggtgttccgccctcctcggcctcccaaagtgctgggattataggcgtgagccaccatgcccggtcaacgcctggctaatttttgtatttttagtaaagacgaggttttgccatgttggccaggctggtctcaaactcctgacctcaggtgatctgccctcctcagcctcccaaagtactgggattacaggcatgagccaccatgcctggccccagaaatagtaatttttaaaaaattgctttttaagaaaattttatttcaatagtttttggagtacaggtggtttttggttacatggataagttctttagtggtgatttctgagattttggtgcacccataacccaagcagtgtacactgtacccaatatgtagtcttttatctttcacccctgtgttagtcaggggtctctttgttttttttttttttatttttttatttttttgagacggagtctcactctgtcgcccaggctggagtgcagtggtgcgatctcggctcactgcaacctccgcctcccaggttcacgccattctcctgcctcagcctctctgagtagctgggactacaggcgcccgccaccacacccggctaatttttttgtatttttagtagagacggggtttcaccgtggtctcgatctcctgacctcgtgatccgcttgcctcagcatcccaaagtgctgggattacaagcgtgagccaccgcgcccagcgttagggttttctagacggacagaactaatgggaaaaaaatatatatatatttatatatatataaaggggagtttattaagtattcactcacatggtcacaaggtcccacaataggccatctgcaggctgaggagcaaggagagccagtccaagttccaaaactgaagaacttggagttttatgtttgagggtaggatggttccagcacaggagaaacatgtaggctgggaggctaggccagtctttcttttcacatttttctgcctgcttatattctagcctcgccggcagctgattaggttgcgcctgcccagattaagggtggatctgcctttcccagccttcaaatgttaatctcttttggcaacaccctcacaggcacacccaggatcaatactttgtatccttcaatccaatcaagttgacactcaatattgacactcaatattaaatatcaaatataatattgggaaatatcatattgaactctacgttttggtgtgggagaatttattactgagacattggaaaatacactattgcattctttcttctggattgtttaatgtggtttagtttgtgagaatttggtctcattctctactcttgcagtggctgagagttatcttgagaggatactaaggaactgttagaaagttagtattttaccttaaactgtgtttgatcatacagtatggctatataaaagagaaaaaacaagaagaaaagaaaaaagttaccgaagcctaaacattataataaattctaattgtggcagcttccctagtgggagaaagacactttcaaacctcactcggagttcttgggcttctgagcattcttttcagggccagcttcacctcttggttccgcagagtgtagataagggggttgaggaaaggagtgatggccgtggggactagggcagctgccccatccagggggctgttggtttcaggcctcaggtagatgaaggcacagggcacatagtacacggtgaccacggttacatgggctccacaagttgaaaaagcccggcgccgcccatcagctgtgtggattctcaggatggcctgaatgatctgtatgtaggagaggaggatcagggagaagcaactggcaaccaccaccccaatgtctacaaacgtcaccagctcgttgactgttgtgtcagcacaggccagtctcaacactgcagggatgtcacagaagaagtaatccacctgattgggcccacagtagggcaggcggaaggttaggatggcctggagagccccatggatggatcctgccatccaggctccagccacaagcaaggcgctcagcttagcagtcatgagcacagggtagcgcaggggctgacatattgccaggtacctgtcataggccattagggtgtagaggaagcactgggtgctgcccaggaagtgatagaaatagagttgagcaacacagccaccaaatgggatgggtttgacacctaaagtgaagttcatcatgaggcgagggacaatgatggaggagatgctcatatcaatgactgagagaacaccaagaaagatgtacatggggcgggcatggagccttgggtctgcccagacagtgattaaaataagcaggtttcccagctgagtcaggatgtagattagaaaaaagaacacaaaaaagagtgtccttagcctgagtggatacggaattcctgtcaggataaacgcagtcaacagtgtgctgttgattctttccatatcccagagaatcttacctagagaatggacaaaacaagaattaacatagaggtgagaggaaagtgagggggaactagaaagagattgtaaaaactaggggcagtggcagagaagtttctttcttacgtggaaagatgacaagtagggagaaacaatgttctctggcaggtgttttgtaaacaagatcttattggaacacagccttgctcatttacttacatattgtccgtaactgttttggagctactatgacagagatgagtggttgcatttagcttgcaaaacataaactatttactccctggacatttatagaaaaagtttgcaccgagggttttgtacttagagcactttttccaataacctttggaaaataatcattgactgttgtgttagtacaggccaggatttcctggaaacatgatatatgtgagaaagggtatttgtttcattaggtgctctgcccgctcagaatcttccagaggccactggctcactcttatctctgccaggacataaacttacatagagtggggaatatgcagaaaggaaatgcagaaaataagtggctgatttttatgtgtgacagtgcttgatgctgtacagatctactttccaagttctttaccattaaaaggaagagaatgaccatgaagctgtaagtacataaataaagtgaggactatcgccactatgcactgtggttggtacttggtgctatataattcagttgctttgcatgtgatcatttagccttaagacacagtaaagagaggagagaaagaagaaatgagggctggctctagtgagaagtcagagatttaaggaaaattaaaggatgattggagagaatgagaggattgctagaccagaacaaaccactctcagtgtggaagaattattttaagttcttagtccaactccttgattcgcatttcttttttttttttgagacagagttctctctgtcacacagcctggagtgcaatagcatgatctcagctcactgaaacctctgcctctcaggtttaagcaattctcatgcctcagtgtccgggtagctgggattacaggcatatgctaccatgcctggctaatttttgtatttttagtagagacggggtttcaccatgttggccaggctgatcttgaactcctggcctcaagtgatctgcctgccttggtctcccaaagtgttgggattacaggcatgagtcaccacacccagcttacttggcattttttaacctaaagaaaagggttggcgggtaggctcggtggcttatgcctgtaatcctagcactttgagaggccgaggagggtggatcacctgaggtcaggagttcaagactagcctgaacaacatggtgaaaccctgcctctgctaaaaatacaaaaattagccaggcacggtggtgggcacctataatcccagctactcgggaggctgaggcaggagaatcacttgaacccagggggtggaggtgagctgagattgcaccacttcactccagcctgggcaaaagagtgaaactccatctcaaaaaaaaaaaaaaaaaaaaaaaaaaaaaaaaaaaaaaaaggccaggtgtggtggctcacgcctgtaatcccagcactttgggaagccgaggcagatggatcacaaggtcaggaattcgagaccagtctggccaatatggtgaaaccccatctctactaaaaatacaaaaattagccaggtgtggtcgtgggtgcctgtactcccagctacttgggaggctgaggcaggagaattgcttgaacctgagaggcagaggctgcaatgagcagagattgcacggctgtactccagcctgggtgacagagcgagactccatctcaaacaaacaaacaaaaaaaaaaaaaaaaaaaagaaggaaaagggttggaataatgagcttttaaaattccttctagtcctataattttcagatatctaaattcatggcttggaaacttttttgaaaattaactgaccttaaatggatgggttgatttctgggctctgtattctgtcattggttgatgtgtttgtttttatgccagtgccatgctgttttgataactataactttataatatattttaagataagataatatgatgcctgtggctttttctgtgtgtgtgcaagactgctttggctatttggtatctttttgttccacaatggggaaaggacagtctcttcaataaatggtgttgggaaaactggatatccatatgcaaaagaatgaaattggacctttatctcacaccattagcaaaaatcagctcaaaatgaattaaagacttaaacataagacctgaaattgtaaaactactggaagaaaacgggaaaagttctaccacatttgtctgcaaaatgtcatatatattcaacagaatactattcagccctagaaaagaaggaaatcctgtcatttgtgacaatatgaatgaacctggaagacattatattaagcaaaataagccaggcatggaaagacaatattgcatgatctcacttatatgtggaatctaaaaaaaattggacttacaaaagaaaaaaagagaatggtggttactagatgccggggatgggaatgcggatggggaatgcagagatgttgatcaaaaggtacaaagtttcagctgggtgcagtggctcacgcctgtaatcccagcactttgggaggccaaggcaggcagatcacttgaggtcaggagtttgagaccagcctggccaacatggtgaaaccctgtccttgctaaaataaaaaaattagcccagtgtggtggcatgcacctgtaatcccagctactcaggaggtcgaggcggcagaattgcttgaacccaggaggtggaggttgtagtgagctgagattgtgccactgcactccagcctgggtgacagagcaagactctgtctcaaaaaaaaaaaagtacgaagtttcagttagacaggaaaagtgagttttcaggacctattgaacagcatggtgaccatagttaataataatatatatttcagattgctaaaagagcttattttaagtgttcttactacaaaaaaagacaagtatgtgaggcaatggatatgttagtttgatacaatcattctacaatgtatatgcatctatcaaaacatcacatttttaatttaactattatttattgattaaaaataaaagtttaaataaaacaggcttgatgaaaatttttactgaaaaatactcatgacttgaggtaggatgtcaaaaaaattgaaattgattgatttggctgggcgcggtggctgacgcctgtaatcccagcactttgggaggccgaggcaggcggatcacgaggtcaggagatggagaccatcctggctaacacggtgaaaccccgtctctactaaaaatacaaaaaattagtcgggcgtgatggtgggcacctgtagtcccagctactggggaggctgaggcaggagaatggcatgtaccggggaggcggagcttccagtgagcggagattgagccactgtactccagcctgggccacagagcaagactccatctcaaaaaaaaaaaaaaaaaaagaaattgattgatttttttttctctggactgatttccatccactcagaaggaggagagtaagattaacagggaaatgtcaggagctttctgattaatgattctctctaccttcactcctgtgcagggcagcattctgccttgcttgggtcaggggactgtggagagcagggaactggcaactctggtgaagaagtaagtcatcgtagacagatggtcctgctgctggctgagagcaacaaatgtaaacattataatggatctcaatcgttaggttgccatcataatggatctggtcattagttcacttcttggttctgagcgagtctcaaagctcctctgggactgggtgtggtggcttatgcctgtaatcccagcactttggaaggctgaggcagaaggattgcttaagcccaggagtttgagacaaacctgggcaacatagcaagaccctatttctataaaaaaaataaaaaaaatttactgggcgtattggcacgcacctgtgttcccagctacttgggaggctgagatgggaggatttcttgagcccagaaggtcaaggtgaaccactgccctccagcctgggtgatagagtgagagaccctgtcttaaaacaaaaacacaaacaacatacaaaaaagccaactcctctgggtttcaatttcttcactggggctatgaggatgcggaatgagactgtggatccaattttgacaaatagtgaaaaacaagggatagttatattcaagtcttttttgttttattttgttttttgagacagagtcttgctctgtcgcccaggctggagtgcagtggtgcgatctcggctcactgcaacatccgcctcccgggttctcgccattctcccgcctcagcctcctaagtagctgggactacaggcgcccgccaccacacccagctaattttttgtatttttagtagagacagggtttcaccgtgttagccaggatggtctcgatctcctgacctcatgatctgcccgcctcggcctcccaaagtgctgggattacaggcgtgagccactgtgcctggcctcaagtctttttttttttgagatggagtcttgctctgtcacccaggctggagggcaggggcacgatctcagctcactgcaacctctgcctcctgggttcaagcaattctcctgccttagcctcctgagtagctgggattacaggcatgcgccaccatgcccggctaatttttgtatttgtagtagagatggggtttcaccatgttggccaagctggtctcgaacccctgacctcatgatctgctcgcctcggcctcccaaagtactgggattacaggcgtgggccactgccctcggctccatagtctttacattaaacacttagctttaaaactgctgtacccaagctctttcagagcttagctctcatcatttaaccatctctgttatgaaacttaaaaaaaaggcagtaaatcccgccaccccatgccattttatcctctttcaagtcaataaaatgcagtttataaattcttcagttttaaacattatagccacaggatcacagcgatggctgaacttcaaaaagctgaccgcaatcctcttccagatgccagagctacagatgctggcctcctccccgcgttccttgacttcagaaagtacagaggctcaagttcccacacaggttccttgggaaattcatggcagtgcacaatggtagccctgggctgaaggagctcaggtggctgctctggtctgtgtgtcgtgtcatgggatgctatagttttctggggtcactgaggtctgttgttaaagtgtccagatttagaagcctgatttggttaggtctctctgggggaatcaggctgagggaaatcagttcacactattcaagtacctgagagaatgacttaaaaactaaacaaataatttattactttacagtgggagatcttgctcccatgtctgaaatgatgtgtctactgcccagggcacccacgtattaatacttcatggtccctggaaatgaaattaggaatcaaatgtgtaattctgagttttgaatcacagcaaggggaatttcatgaagcacacttaagttaggtcacagtgaactacacctggtaaatcacacagcatctgtatctaagggaatacttcaattttcccttcagatacagttatctttttcccttgggcagtaacgaagatacatcaacaaagttttattctaattattttctccctgaatttctatctttttagattgcctttgttatttccattggctctttttcaacatttttctaactttttagagttccctaattatttttccctgatttatttttcatactgttttcttgtttgctttggagaatattctaagatttactccctaaaaagtgttatttcttttgcaaaattttccattgatagggaatgacagtccacccatagcatgatgattcttgttttattcaaccagagaatagaattttctaactttgtccttagatttcagaaccatcttaaagggaggaatgagaggaaagagtgcagttttatttgtaataccgagtatctttattgggtgtgatttcatcccagttacctctttttgttttcttctttttgtttctctaactttttgctcctcagtaagttataaatattaatagaaaaacttccctttacctctgatctgttaagacctttctccctgtgtcactgccattatcataaacctccaagcataaagcttagtatttgccaggtaaccacccttctgcatactctctggctcattaatatcccacatgtggttctgagacactttatttaaatgctttcaaaaataaaagagagagagagagagacatacggagggacagaaagagacatggagggagagaaagagacatggcacaaggagaaggaaacatggcaccgatgaaacctccggggaccagagtgataaaaagtcatagaataatggtggcattttgcacctgtgtagtgttttttaatccttagaggttaaatggcagaggagtctcacagctgtataatgctggagtaaaggctccaaccagattgtgttgttcctagtccagcactctttccacattttactgaaaattccttcccacaaggaaccaaatcaaaataatgtagtaaatcatgtgaactgaatcacaattttaagagttttatggttcattctgtcaaggattctaaactggtgttactaccctatttcaaaattgagacatagtggagttaagagcaagttctaaaatcaaactagagtgaagtttagttacaatgaattcatgaagttgcccgacttctttcattgacaatctatcacactgagtgtttcttaaaaaagcccgagggaggccgggcgcggtggctcacgcctgtaatcccagcattttgggaggccgaggcgggcagatcacctgaggtcgggtgatcagcctgaccaacgtgaagaaaccccgtctctactaaaaatacaaaattagctgggtgtggtggcgcatgcctgtaatcccagctactcaggaggctgaggcaggagaatcgcttgaacctgggaggctgagattacagtgaactgagagcacaccattgcgttccagtctgggcaacaagagcaaaactccaactcaaaaaaaaagaaaaaagcctgaaggcttagtagtgtttttatttcacagatacttagtctttgaatatattgattaaatgtgtttttgaattctcatctgatatcaaatattaaagaccatctagaggccggtcgcggtggctcatgcctgtaatcctaacactttgggaggccaaggctggtggatcacctgatgtcaggagtttgagaccagtgtggccaacatggtgaaacctcgtctctactaaaaatacaaaaattagctgggcatagtggtatgagcctgtaatcccagctacacaggaggctgaggcaggagagtagcttgaacccggaaggcagaggttgcagtgacttgagatcgtgcgattgcactccagcctgggcaacaagaatgaaactccatctcaaaataaataaataaataataaataaacaaaataaaataaagaccatctagtacatgaatgtttgaaaaatatatgagaaatattaggggaccacaaactaaataaaagtgtataattttgagcaaccaaggagattagacatcttttctaatgaggcgaagggcacaggcttaacctcatttcagcaaatgaattttacttaattctggtcccaaactgtatccctaacccatctttcaaatggccatgaagaaaactttaaaaattttattattttctgaaaatcgactcaaagcacacttttttatttataaaaagcatttcaaatatttggaaaactaatataattaatttctttttaaaataaatttcacaataagacatataaaatggaaaataatttaaagatgaataacaatggaacaaatatatacatatataatatgagaaaagtttgagttattaaattgagagacatgagacaatttctattaaaatgtaaaacccttattagcaatgagttagaattgtctgtttaaaatatttgccaacaaagaaatcaggttatagctttactcatgtccatttttcaaattttgggcagagaacttgtcttataggtggaagggacctggtgaggacaaaaagaacagagcaagggtggcaccaccacagaactcgaagatgctcttcctagtctggttggtattaaaaccagtgaatggacttttaatggagaatagctttggagaaaaatttagccaattaaaggcctgggggaaatagtgttatccaatattagccactattttttaattttttaattttttaattttaatttttatttttgagatggagtctctctctgttgcccaggctggaatgcagttgtgccatcttggctcactgcaacctccatctctcaggttcaagtgattctcctgcctcagcctcccaagtagctgggattacaggcgtgtaccaccacccccagctaatttttgtatttttagtagagatggggttttaccatgttggttaggctggtcttgaactcctgacctcaggtgatccgcccgtcttggcatcccaaagtgctgggattacaggtgtgagccaacatgcttggcctattagccactatttataaaaaggctaaatggtagttacatagtcatatgagcagaacagcaaagaaaatttttgtgacagcagaaaaagaactatactgagtaactaaacaagtaagaatattgagagatgaagtgactcagagtagagaaaccccttacacaatgtttggacttaacatttatctctgaaaaatgggattagaacagtggcaggtgctattttgagaagaggaactcacctgaaggtgtcagcatccatcaaaaactcttcttgcagacggagagaaaggatacaaatctattcctaaggaatcttgaatatctcataggtcagcagcaattattgtgaagagctcgtggcagaagacccaactaattacttttggctggatcaaagtaaagggtcaaactatggaaacttaatttattatttgcctgcttatttgtagagatatctgcttccagcttccttatgaactggaggaggagctgtggctcttactgaagataactgttaaggttggtctctcctgtgttctactacttcttctatttccctcagagtcagtttttatgtgtgagacctttagcttggggaatattgtaatagcactcctgtgataggcaagaccaatatccatagtttgtttcctaggagactctctgggtttctagctttttccaattttgtaacagcaggtgcgacaaagtctgtggggcttaacaggtctcgttgaaatcttcagatctgtggttttctttctgttccaaagcaaatttggaaaaaaagagaagaaaaagctaacatggttgttacttggcaagagatgtgttcttattggtgcattcacattttaagaaattcacactttgaattactaaggtgctaacatagatcttcacagactagaagaaacagaatttcagggttggagggacattagaggtcatctgatccaactatcatctgtaatgttttaagtcaagctccctgaacagtcgtttttcttttttaattttacaattttatttatttatttattttttgagacagggtcttgctctgtcgctcaggctggagtgcagcgacgtgatcacggctcactgcagcctcatcctcctaggctcaagcgattcttccacctcagcctcccaagtggctgggactacaggcacataccaccacacctgactaatttttaaatttttcgtagagacgaggtctcactagattgctcaggctggtcttgaactcctgggctcaagagatcctcctccctctacctcccaaaatgctgggactacaggtgcaagccactgcccccggcctgttatttttcttagtatttcttggtcttgtttccttgaatactttgaatttggtctaacttattttcttctagacttaaatttggtgttgtcgcaacatttttcccaactgtcttcaaatgtccagagatggtctgtgttgtaaaagaacatcttgaatatggtttagttttattattttttccaccaaacttttgtggaggtctctgtagcttccaagccacaattgtgttaaagtgtctaaagcagaggaaagcacactttctctctaaagaggcagataataaatgtttttggccttgaggaccatacagtctctgttgcagctactcaactctgccattgtatgggaaagcacccataaaatactcatacaaatgggcatgggtttttttttttttttgaaacggagtctcactctgttgcccaggctggagtgcagtggtgtgatcacggctcactacaacctttgcctccggagttcaagtgattctcctgcctcagcctcacgagtagttgggatcacaggcacctaccaccatgcccagctaatttttgtacttttagtagaaacagggttttaccatgttggccaggctggactagaactcctgaccccaggcaatctgcccgcctcagcctcccaaagtgctgggattacaggagtgagccacctagcccaaccccggcatggttttatttatttacttaattatatactttacttatagatactataatttgaatgtcataattttcatgtatcatgaaatattattttcattttgcttttttcaacaacttaagaaatgtaagttctagcagggtgcagtggctcatgcctgtaatcccagcactttgggaggcgaaggtggagcccaggagttcaagaacagcatagtgaatatagtgagaccctttctctaccaaaaaaaaaaaaaaaaaaaaattagccagatgtggtagcacatgcctatggtcccggctacttgggcagctgatgtaggaggaccactttagcctgagaggatgaggctgcagtgagtcgtgattgtaccactgtactccagcctgggtgacagagtgagatcgtttgttaaaaaaaaaaaaaaaagtaagttcttaacaggttgtacagaacacacggggcaggccaaatttggcccacaggtgaacagagctgatgtggggaaacacgaagcatgtttgtggctaatcagtgaggagaaatggctgaaagtctgtgtgtgtggcttttgtgcagagccacaacccatactgatccctataacttcaggaattgcagcctaggtttgagatttgaccttccaacaaactgtggactcataattctgattgtgatctgtttcccgggtatagactggtttgcgaataaccaggaattaagttggaaagtaggattgctctgggactgacttgaagagggctgccatgtatcctacaggataaattgcatagaactgtgatggttggcaatcaatcgaactcattataccacgtgtgggtggaagactgctgcaggtgggcaggtgaagccacgcaaatattggtatttctccttgaggtcctgatcttttcttgtattttgctgcttctactactccaggaagcatactttcagcatgaaatgcaatactgtattgagtcatgtacgcagacatcatgtttaaaccaggcagtaatttggaactcaagttttctttcttttttttttttctccttgtgttttcttctgcatgatcctgggagatcgtctccaaatgaaaacattaataaagatgattgtgattactgattgtttagatttgtttttaggtgggaaggaacatagctatattaagattagcttaagtaataaagtctaccatatgtttacatgtggaaagtaaaaaaatacaaactactgaaagccaaattgcctagacaaacaggatctgcagtagagctgggcctcatgaagatggactggtcaggaacagggaatgaatcagaatatagggcagctctggtgactgggatattttgttgtccctatcagaagaagacatcatttggtccaaattgtgtgttgccttgttatggtaactcaataggtctccatctctgcttcttccagtactcctgtgactgacagaccaattttttttttttttttttgagatggagttttgctcttgttgcccaggctggagtgcagtggtgcgatcttagctcactgcaacctccacctcctgggttcaagcgattttcctgcctcagcctcctgagtagctggaattacagacacgtgccaccatgcccagctacttttttgtatttttagtagagatagggtttcatcacgttggccaggctggtttcgatctcccaacctcaggtgatccacccacctcagcctcccaatgtggagggattacaggcgtgagccactgtgcccagccgctttttgtttttttatgtatctctttggtttggttggtcaccttccgtagaatggctcacactgcctcttgtaggggattgtggccattttcatcaaataatttttctgattccacagtcatccatacttggcaatctaagcttatgatccttgttctcaaatttccgacacatcttttttaagactctttatttatgctactactaataatacagtatggatgatgatgtttattattatttgttggatacctcccatgtttaagagctttacaagtgttaatttattcaattcttgttgaggtagatatgaatatccttattttatagaagaggcaactaagttcagagagtttaatttgaatttggcacaaggccatatttccagtagatggaaaagtcaggattcaaatccagtgtattttttttaatacctatgctctttctactccactatatcatgatgtctctctaaaggacataccaggatttaatcagagaatactttgtttaaaggcgtgtatatttaccagataaaacactgggtccctccagtgaagcctttctctagcacccattagcaatatgatgctcaaatatcttttttttcccctgtcccatgtcttgccttgtcttttatttttatttgtttatttatttttgagacagtctcacctgttgcccaggctggagtgcagtggcgcgatctcagcgcactgcaacctccgccttccaggttcaagtgattctcctgcctcagcctctcaagtagctgggattacaggtgcgcaccatcacacctggctaattttgtatttttagtagagatggagtttcactacgctggccaggccggtctcgaactcctgacctcaggtagtctgtgcgcctcggcctcccaaagtgctgggaggtgtaagccaccgcgcccagcctgccttgtctttaatgcaagaaacagaatgcgagtaatcagaaagccctagaaggcatcagttaatacaagatattaatttcttaattccaaaagcacttgcaaagaaaaacttttaagggggaggggagcagggggattgaagcacatcataactggaatcccatgagtgtgccaagtctcatgaggctattttttgaatttatcctttacttgttcatttttttctctcaaataataagtattatttttctttgatatttcccctcaaaggataaaacatatgaaatataaaatataaacgaactcttgtattgtacagttagaagttatagaactatccggctgggtgcggtggctcatgcctgtaatcccagcactttgggaggccaaggcaggtggatcacgaggtcaggagttcaagaccagcctgtccaagatggtgaaaccccgtctctactgaaaatacaaaaaaaaattagctgggcgcggtggcaggtgcctgtaatcccagctactcaggaggctgaggcaggagaattgctggaatctgggtggcagaggttgcatcgcgccactgcaccccagcctgggcaatagagtaagactctgtctcaaaaacaaaacaaaaccaaaaccaaaacaaaacaaaaaaatgaaacaaaaacaaaaacaaaaagaagttatagatctacacactgataaactgcataaaatcttggataactcgtgaatatacaaaatatcagggcacagaaagaagtaaacccactttatttttgtcacacataagattcaaatattcaatctgaagaaaagcaatcatttttgctgtgttctaggttgcatgttgatacatttattaaaatattcctgcataatcacatttggtattactatttcaagtcagatataaaacttcaaaatctgccagccagacaaaatgggtaatcagaaagattatctctgccccacctccctaacctcgataagtataaactcaattttatgacatgactccaaaccctagattgtgatgacaaatgctaggtccgatttctttataatccttttcggggtggcatacttgatagaactcaagcatagaagtctgcattggtcctccaaaccaaattgcatattgctctacgtggtgtgtaatgacttgtacatcaatagcttctggcttcaatctactgctacttaattcctcacttaaggtcagcctgacatctacagttcttttcatatctcattgcaagtgatgtccaaagtccctgaacacagttgaacctccatagacaacaatattcttgttgagaggatgtctcacatcaataggacaattctgaattacttcatctgcaacatctgagatgggatgtataaagtctggattagcaaacctggatgagaaaagatttcaggtcccaagaatctctcatgtccaatatcggtggaaaattatttatttgagatggcattgattcttatacactgtttaaatccactgcgacccatctgcaccttactttttaaattcttttactaaatctgagctaacataactatagtgatcctctactgccttagcagtttccagggattgctctggagggattcctacttcttggtctctcagtagttgctgagtaagatatgttatagctcatcctgcaattggaatgtgtttaatacagctgccaatcacatacccttcaggcgcggaaatgccatgagtgacaccgtttcaacttgtctataacctaccagtcaacatgtattctcctatttgtcttgtggtccaggatgtagctacagcaagaacaacctgcacagcaatgtacaaacctgaacattgaaggacccaaacactatttcaggaatatattccctgctttctggagtattcagcggaggtccagtcaaaagaaaataatggtcttcaggttctgcccttaaatatttaaagatcacttgctctataaagccttccattgagttccaatctttaactagaccatgatggatgggctctttgttgtatatgtagattttccaatgcttcatcgccagtaaagacgtctaggtcatcagcatgtttcatcaccctccttttgaacttgaccacccacttttgttgagttttttttttcatggatgaataatttattggtagaataatacagagtttaccttcaattctatatctgttttgttgagttgttaatggcagtacaggaagggatggtaaacggagattctttattttggacatatcctggttttgtatacctggtaccacagtctgctatgtaggctgtcagctgtcaggtcatctttcctccttttatcctgctgctgctgctgcagcggctgccacttgctccatgctggtaggggccagaaattggcagtgggagatggggcatctgaccatccacagctgagctgccttctctgtggggggtgggtgggatggggatctgtgaaggcaaagcaatagcaagaaagcatcaggctcagtcagcactattcaccacccagcactatccacaacccaggcaggcaggccatacctcccctgtcccactgtggcctcctcatcctctcccttccctcctcgtcactcctgctcccaccctacaacttggtgtccttgtgctgcttttccccaggtagccaagatgcccaggcaccctaaatacctttgaaatggttagagtgtgcatcagttattttcacctagtgtggctcagtttaatcagttccttagtaatgctacttgagatcctgccagtaagatggaagccattttagtatggatgaaaggaaaaagggaaggaaaagaaaagaactggggaagggaggaggtttcacttgaagtaggtttcagaaaggaaattgtatatattatgggaccaggtttgtatgtggcaaccagagtgtgtgtgaggaggtactttatgaagtgggatatgaataggtgcaggtttatatatcattttaaaagttgttcacaccttggtctagtttcatgttgaagctagctgagtccctgctggcagctctgttccacaaaagtcatgctgtattctacaaaaatatgtttattgatgaaatttgtaatgatacatatactcctaaaagagtagttaggttttatggattaaacttacatatgaacccaagatctcacagccttaacagcatctcatttccactgacaagaacaataaggttttccagcttaggtgctatataaaacacatgtcccttaactctggtttctatctaacattattttatttatgtcacaattggcaatttaaacaaaagtagctgctccaaccttaataaattattgtaggtctatgagttgggatttctggcttccaaagggtgacatagaagcaagctggggccgggcgcgatggcttacacctgtaatcccagcactttgggaggccgaggcgggtggatcacaaggtcaggagttcgagaccagcctggccaacatggtgaaaccctgcctctactaaaatacaaaaattagctgggtgtggtggtgcatgcctgtaatcccagctactcaggaggctgaggcaagagaatcgtgtgaacctggaaggtggaggttgcagtgagccagtgagccgagattgtgccattgcactccggcctaggggacagggcaagactgtgtctcaaaaacaaaacaaaacaaaacaaaacaaaacaaaacaaaacaaaacaagcaagctggcttcattcctccccataaaaaaccaaaactcaaacatgagatgagactgttcccagggtcacagagaaatgaaaaaattttgagctgatggtaagataattggacttacatatctgcagtgccccaccccataatctgcccagcaccaagtacacaaaaattttcccttggctcacaatatttacattgaaaaaggtgagattgaggtggacaacctgcttccccaccatcttgggttccctggcaggagacctgttccataagaaacatcacgagtgcctgaaaggagaaatattcctgaggacagccagcgacaaaggcaggaggtgggactaccatccccagccctggaaactgtgctctgtaactgggccaaatcagagtggctgttcaacagcaccatgttgaggtttgttccacaccccctgggtatgtgcccttaaccagccttcccacattactgagatatctcatttaagacttcttcaattcagaataaggggcattctgattgttcactaaggcaaacctggacttaagatgccatttagtactgaaaaggacacagtggcctagtgggaaaaaaaagcaagaaaatcaacaggtaaattataaacaatctctaaacaaacatatctaatgaaaccaaaacaagccagacagagaagactagaataaataactaatccttcagtgaaaagacatagatgtacatccacaagaaacaacagcaatcatggaacatgacctccttaaactcataaaacaaggaaccagtgactaaccctaataagatggcaatatgtgaactctctggctaagaattc

SEQ ID NO: 84 - DNA, 118996 bp, Homo sapiens
aagctttttaaccttttacgttgtctgtaaaccttatgccaaattaagaaaactagaaagttttttttccctgcttctagtagggtaaacttttagtatcttttctaatgcagagaaattaatgaagctctacatctagttcaaaattccagtgtttttgttgggtaggggtggggaggtgggacagttagtagtatctcataaaatatgagatgggaatttcatttgatccaatgatcccattctataaatttttttgctgggatataaacacagaaaggtaaaaggttttatctccaattcatattcagcatcattaatattaacaaaactgtagaaataatctaaacggacatgatttgggaactagcaaatcatggcatatatatatatatatatatatatatatatatatatatatatatatacacaagggaaatgtgaatctgttaaaattattgtaattcattctcacttatgaatattgatataataagtgattaaaagttccttaatagcagactaagtccaacagcacattaaaaaaatacattgtaatcaagtgagatttattccaggaatgcaaagatggttcaattttagaaaatccataaatatctataaaataatcatgtgattatagccttagtctggcagaaaggcagttgataacattcaacaaacattcataatacaatggattcagtaggaactgatggatgcttctttaacatagcacaacctgtgtagttcttaatttacttgaaaccacagccctttttctgctaaactcaggaagaaggcaaggatgcccattacctacattctatttaatattgtgctgaatttactgaccagtatagacagagaagacaaagtaattagtggtaagggattagaaaagaagaaattgaaaaccatctctatcaatgatatggatatagtattcctggaagacacaaaagacctgaacataaaactaattcagacaataaaagtaaggtggctatatgtaaaattaacatgaaaaatcaatagtcttcatatatacaaacaataaccttgctagaatgatagtgtaagagaaagtgtcatttaaaacagcaacagtgacaacaaaagatcaactacttagaaacaaatttaaaggaaatgtgcaaaccttgtataggaaaaaatttaaacaccccttttttggagtgataggatgattcaacatcataaagatatcagttctcctagatttaactgaattccaataaatgcaaaaaagcaggatttattttagctaagttgatgctaaatttcatatggaaaaattaaaaagcccaaacataggaaaacgttggaaaagaaggacacaagaggaggactagtaaatttgaccaaatgttgaaacacactagtaagtctctgtaattaaaaagtgtgacattgatgtgtaaataggcaattcagtggaataaaatagagtcttgaaatagatccacatacatctggaaattaggtatgtgataagggtggcatctcaaatcactggggaaaagatggacttattaatcagtgttgttggaacaactgagaaaagatgaaactgaatccacatctcacaccgtacataaaaataaactgcaaaccaaactaaagatctaacaaacaaaataaaaccacacagttatgatagaaaacatgatgcattcctttataatctgagagtaggaagctttttttaaatatgacaaaacccagaaacaataaaaggaatttgcttttaaaaatgaaaaagcctttgcattgtagaaaacatttaaataaaaccaacaaatggcaggggaaatttatatcaagtacaaaacgctaattaattaatgatctatagaaaatagagaagagaaaaaaattctgatgtgcagagaaatgaacagtcagttcatggaaaaataaaatcagatgatgcttaatatatgaacactccaccaactattatgaaaggaggtgaattaaaattacactgctctttgaaaggttagtgactgagggggcacaatggaggcttctgaggtgccttatctttgatctgtgctggagatactcagattgttcacctaaaaagtttctcaagttccacaccttaaatctatgcaatctattgtacaaggggacttttgcaagttcataggaaaatagaattaaaagatatgaataaaaaatataaacatttcttgacagaagccccatcaacttcaatacagctttgtaaatgataataacagtcatttagtccatccttaacaaagtgaggtcctgggaatttaaccatgtcaatgcagtcttttttacatattaactgaagaaaaatgggtgccctttaaatttttttttttttttttttttttgagatggagcctttctctgccgcccaggctagaatgcagtggtgcagtctcagctcactgcaaactctgcttcccgggttcatgccattctcttgcctcagcctcccaagtagctgggactacaggtgtcagccaccatgcctggctaattttttgtatttttagtggagatggggtttcaccatgttagccaggatggtctccatctccttaccttgtgatccgcctgccatgacctcccaaagtgctgggattacaggcttgagccaccacacccagtgcctttaaatatttttaaagattaggaaacaaaaagaagtcagagggagccaaatcaggactgtcaagtggatgattaatgatttcccatcaaaaatctcatggaattgtccttgtttgatgagaggaatgagcagaaacattgatatggtggagaagctctggtgaagcttctgtggacatttttctgctaaagctttggctaactttctcaaacactctcataataagaagatgttatcattctttggcttttcagaaggcgaacatgcaaaatgccttgagcatccagagaaacttaccatgacttctgttcttatccagcctgcttttgctttaactggaccacttctaccacttggtagccattgctttgattgtgctttgtcttcaggattgtagcggtaaagccatgtttcagctcatgttacaattcgtaaaagaaatgcttcaggatcttgaccacttgtgtaaaatttccattgaagggtctgctcttctctgcagctgattgggccgccacaattgtttcagtacccttgggagtgaaaagtctgctcaactgaaatttttcattcagaattgtataagctgaactaattgagctatctgtggtgctggctattgtttctcctgttaattgtctgtacaattgtcctatacaattgtctcctgtacaattagggcatgaccaattttttttttttttgagatggagtctcactctgttgcccaggctggagtgcagtgacgggatcttagctcactgcaagctctgcctcctgagttcacaccattctcctgcctcagactcaagagtagctggaaatacaggcgcccaccaccacacccggctaatttttttgtatttttagtagagacggggtttcaccatgttagccaggatggtctcgatctcctgacctcatgatctgcctgcctcggcctcccaaagtgctggtattacagacatgagccaccatgcctggcccaagatttttttttctcacaaattgatgtggatgaactgccactgtgggcttaaatcttaaatcttaatcttaatattgactcctacctttttaaaatgagttatttatttgtaactgctgacttctttcaagcaatgtcacatagactttttgtaaaacatcagtgatttcaccattctgccacttgagccttataataaatttaatatttgttcttgctttaattttagcagaatgcatgttgctctgataggagctctacccaaactgatgtcttattcttcttggtgcctcaaactagatcctgtttaggcatgttataacaagttttgtgagtttgttttggtgaaaaaagttggaatccatgcatagttttttcataatacacattttccgtgaactttttaaagacccctcttatggatgttatacttactaaaaatattcttaacaaaaacctagtagtcagataccatttcttattcctcagattagcacaaatttaagtttgacaacatgctctgttggcaggactataaagaaaaaaggcactataatatattgctgataggcatgcaaaatagtacaaccctgtggagagaaatctggtaatatttaacaaaaccacaaatgcttttaccttttgacctggtaattccacatctaataatttaccctaaacatacaactccaaaacagcacaacacaaggtcattatttttgttaatatcaaaggaatagaaacaactcaatgtttattggtagaagactggctaaagaaataatgatatttgcacacagtaaatttacatggccatgaaaaaatagggatagtctgtaggcattagtggagaatggagaaagcaagatgcagaaaggtctatatggcatgctactctttctgtaaagaagaagagaaaataataattcacatatgtagttgcttattttttgacaggcatgcaggaaaaataaaatggaagcagttgaaaagtgttatctataaggagcatgaggaatagggaagaggagatagggatggaaggggaacttgcctcaacgtaccattttctgtcattttgagttttgaaatatgaaaatttttacatatttaaataataaaatcagagaggaaaagtgtaaagtccctgaattgggaacaaactaaaacaaaggaacctaatgatctatcaatctggaaacataaccacacagagaataggcttattctaagtaaatttttgacacaatactgactctcgatactagggaattatattctaaggataagaggaactacaatgaaatcttaaacttcacttggcaattttgttatttataatagttttgaagttattatttcaaaatcatagaataaagcaaataaatgtttttgttaatgtttttaggaagcatgatttttattttaagaggaaagatatataaaagatatacaaaaaataggggggaaaacctgtaatgttaatttaaatggaaaatatctatatgaattcgagttttttttttctaattggaagctctgaccacttgaaaagcattcaaagcaatgtcatctcaatggcaatgagcccatctagtgccctgatgtcagtttctaagttgtttccccactaagggtaactagagttttttagagaaatgcctgatttcagatctgggacagggaaagtccaaggttagcctgtgccaccttgtgtcgtagaacatcgggaagcactcagagactaataggattatgtcagaagatacatgtaccaacttgaaggagctccctctggccaaacttgggtaaattttagcatcaaaaggaataatgactttaattgtttgtcatacattgaataaataataaatccatgagtccagagtggtactcaatagactaagatagatggatgtcatttactataccattggtactatgatcctaactcccagtgaaataattgattcaggaaacggatttgcctaaaaccattaggtgacagttattgggtaacaggacatttccaacatcacaaagtatcactcatcaattacttgccaattgcaaaaggaaacacttttataacagatatctggagtcaccatataacttggtgatcaaagttagcagcattaatagtgggaaggtacatcacctgtcttcagatatgataaagtccaaagtatacaacctcaccaatgacatgttatttacaaacatcttggaactcaaatcgaaaagagcctttagacttcatatccatttcataagaatgacaaacgctcaaatagcaatttaaatgccaccatgaggaaactgccaaagaaatccacattgtggaatatctgcaaacctgaactcttcaaagagtcaatgtcatgttggaaaataaaaaggtaggagtactgctccagatttttgatagagacataaccaaatataatgcttgaactttaattgaactctgatttgaaaaaccagctttaagatgtatttggggggccacttgaatatggagcagatatcagggaatgaatttttatttctaagatacagtcctattgtgaccatgtggcagaagctcttgttttaaggaagtatttagaaaactagaaaaaatacagtaaaatgtagagaattgttgagcctaggaggcagacataaaagtggtcattatactagttctccaactgttctgcatatttaaaatattttataataaaaattagaaaaattagatttatctttttacttaaaagattatcaagggcaaattgttgaatttaaaatgcatagttagaaaacaaataaatgataggcactcatttgcgtaaaatgagtatagtacatattgaaaaatcaatccaatgtttgtacacctatgtttatagcagcatttttcacaatagccaaaagttaggaaacacctaggaatccatcagtggatgaatggataaataaaatatggtgtatacatacagtgggatgttattcagccttaaaaaggaaggaaatgccaacacatgctacagcgcagataaactttgaagatattatattgactgaaaagaataaatattgtgtgattccacttacatgagctatgtagagtagccaaactcatagaatggtggttgccaggagttggggagagggaggaatgggttattattgtttaatggatatagagtttcaattttgcaagagttctggagactgatgtaccacaatgtgaatatatttaacattactgaactgtacacttaaaaatggctaagatggtacatttttgtcacatgtatcttgccacaattaaaacataaaaatttagatataaaaattaatacgtacataaagacatatttagaagaatatatgtccagacacatgtacagagttgttatttctgtaaattagagtttcttggcaatttttgcttccctttccatccctagattgcttaatttttttatattgatcatgaatctgttttactaaaaaaaaactattttcaaaagcaagaaaacttccccagattttcggtgtttcagaaaacatggtgattcgagagcctactttttagggaaatggatttgcaggaaacaatggaaattgtcaatgtaacctgagaattttagtaaaagcaacaaaaatcctttgtcccatatggtgagaagcaaaacaggccgctggcccgtcctgtgtgttgtggttgccgtggagagcttggccttctgagcctttggcagggcctagccaacctgaccttgctcacagctgaggctcagcagcagcagggcctttgtgggaactcgcctgcccctcccagtgaactatgctttgcttggtgcctggccagcaaggaggcgaagtttgtctgctgttgttgacctgggctggtctgcctccctgtcctgaacaccaattccagcatctcaccttgcttgactgtgccccagcgggggcgttggtgcctctcatctcacaattgcctctgtgacagagccagtctttgatctcgcctccaggaatccaattcctctcaaagtctgttaatcccttgggtccacgggttattcccgtacagcatccccactctgattactcatctcaaccgtggctgatctttgcattttgacctttggtccctgtcaggccacaggccctgtattctatttgtgatgcagagacttatgtcctaactgttaatatgttcacataaacacacacgccactacagtatcattaaaatgttttctaaaatttgtcatagagcagtactagcatttatatccacatgggattttgaaaacaaattatatagttctattttgttttccattaatttattattttcagtttaacttgaggtacagtcaacataacctcaatatcagatgatgtctacttttaaaaaagcaaatattttgaaaacatagaaaagtacagagaacaccaaaacgaacacttgtgttcagaccacccagatttagcaaatgttaacatttcatagtgattgttccgggtctaaaattctcattttaaaattaaattttacttctgtatgtgggcagagcgggcctcagggaaacagtgaagctgtgagtgttccctccctgctgtcccctgcccttctgttgcaggtgactgaccaggcatctgtggcccttgatgccacacagggccatgctgggcctttcccagcacagctgtgctggcagctgctccccgggtctctccatggagcactggagtcctcaattctaacagaaatgatagaactgagtagcataaaaagctgcaagccaaaaatgaaggaaagtttattagaacaaaggaagcttattgtaactctgtaagcgggggtgctccaagcatctcagaaaaaaagagcccaggaaatgaacagctgttggaatcccagtttgctagtgcttctctctgcttcattctttaatcctattccatttgcgttttggaaaatagcctccctcagcttcgaaatttacatgtggtatgtccagccacataagaggctgactattagacctcggttgccatgacacaggtcgagatgaaagaatctcattgtctcctctctggtctagtaaactctggtgaggaaggtaaatatgaggctagaatgacatgtatgacaaatatgaggctaggaggactgtattagtctgttctcatgctgctaataaagacatacctgagactgggtaatttataaaggaaagaggcttaatggactcacagtggcagaagaaggaagagcaaagggacttcttacgtggtggcaggcaagagagagcttatgcaggggaattcccatttataaaaccatcagaccttgtgagacttattcactaccagaagaaaagcatgggaaagaaccgtgcccattattcaattacctccccccaggtccctcccatgacacatgagaattatgggagctacaattcaagatgagatttaggtggggacacagccaaaccatattaatgacacttctgtgatcctgtggatttggggagtgatggcgatgatttcaagaaggaaaccccctctcctgcacatggctacatattctccagggaacaactattgcagtctgagaagcacacaacagggatatcagcaaaagctaggaatgcctttctagcccagatatctagcactggggaaagcacaagatattgctggtggtgaggagaacaatgaagacaacttgttttttgggtggcccacgggtcattaaaagtatcacaggacaggatttgtgtatggacaacaattcccatatttacaaatgaacaatgctctaagagttgggttaatgttgctgtgtttcttcaatcagtgcttaggctctattgtgtcagagatttagctggttatgagaaaacagtgacaatccaaacccaaactttttcaaagggctaacagttttacgttgaccctgcatgcatattataaaaaattagctccatttttgagcaatatctcataaaatgcacacttatatttctttctatattcattctcatttctaaaggtatgtgtctgggttatttttacccttgtaagccgtttcaaatcttttctgaaataaacaagatacacataaaggtgtaaaatgatgtcatgtttatatttccatactacctcatagaaacctgaagcatacggctactaataatacaatgatgtgcttcataatgacgtttcagtcaatgaagtggtggtcccatgagattacaatggagctgaaaaacttccattgcctagtgacctcatagccatagtatgtggtagcgcagtgcattactcacatgtctggggtggtggtggtgtaaacaaacttactgtgctgtcagttgtacacaattctagcatataagtaattactgtattatacttttttttcttcaacttttattctaagtcaggggtacatgtgcaggatgtgcagatttgttacacaagtgaacgtgtgccatggtatcttgctgcacggatcatcccatcacctaggtattaagcccagcatccattagctattcttactgatgctccccctcccccaagctccaccaacaggccccagtgtgtgttgcttccccgacgcgtccatttgttctcatcattcagctcccgcttataagtgagaacatgcagtatttgcttttccgtttctgtgttaatttgctgaggataatggcttccaactccatccatgtccctgcaaaggacatgatcttgttcctttttatggctgcatagtattccattgtgtatatgtaccccattttctttatccacattttcagtctatcattgatggcatttaggttgattccacgtctttgctattgtgaatagtgctgcaatgaacacaggtatgcatgtatctttagaatagaatgatttatattccttggggtatatacacagtaatgggattggtgggttgatggtatttctggttctaggtctttgaggaattgccacgctgtcttccacaatggttgaactaatttatactcccatcaacagtgtaaaagtgttcctttttctccacaacctcgccagcatctgttgttttctgactttttattaatagccattctgactggcatgagatggtgtctttttgtgtttttgatgtgcatttttctaatgatcagtgatgttgggctttttttcctatgtttgttggccacatgtatgtaattactatattatacttttatcgttattttagagtgtgctcccacttacataaaaggtaactgtgaaactgcctcaggcaggtccttcaggaggtatccagaagaaaacattgttattataggaggtgacagctccatgcatgttactggccctgacagccttccagtgggacaagatgtgggagtgaaagagggtgatacttatgatcctaaccttgtgtaggcctggctaatatctgtgtttgtgttgtaatttttaacacaaagttttttttttaataaaataaattttaaaatagaaaaaagcatatcaaataaggacataaagaaaatatttttgtatagctgtgcaatttgtgttttaagctgtcttactacaaaagagtcaaaaagtttaaaaaatcaaaatgtatataaagttaaaaagttacaggaagctaaaattaatgtattattgaagaaaggaacatagtttttataaatttagtgtagcctaagtgtacaatgtttataaagcctacagaagtgtatagaaatgtcctaggccttcacattctgtcaccactcactcactcactcacctacccagagcaacttcgagtcctgcaggctccattcatggcaagtaccctatacatgcgtaccattttttatattttatcccatatttttactgcaccttttctatgtttagatacataaatgcttaccattgtgttacagttgcctccagtatttagtgcagtcacatgcagtacaggtttgtaccctgggagcagtaggccatactgtgtagccctgttgtgtagtaggctgtaccatccagatttgtgtaactgcactctatgatgttcgtgcagtgatgaaatagcctaatgacacatttctcagaacataagcctatcatgaagtgacgcacgactgtgttttgactataaagacagtaaccatttctaacatttttttccgaagaaaatagtttttaagctcgggcttgggctggagagcaaatgtcttccctgaagtctcctctagtgcattgggtctcataagccacagataatttgttggctatttttatttgctgatgacaagtcacttctctaggctcttcagccctcaagtgttgcagatttcactttctgaggtcatggctgcaagacacattttcttgaccagcagctgtggcctgagttttagattgacagtgaaatgcatagaaacacagcaggcttcccccaacaccaagatgtctcagctttaaggaagatacaggactgatgccaatactgcatggctggtgactcctgggctcagcctctgaatatctccctgtcactccccaggaagggtgagcaggtggtcacgggaggaggctgagagcatggagagaaactcagctaagggagtcatttgctctggggtcgcctcagcttttgtctttgctctcatctcagccactgcagggtatgtgggctgcgcccgtgccggatcagctatgcgcatcaaagccccttactcatgactgctcggcagtggaggcagtgaagcacaggcactcggtccatccagtcctcagtgtgttcttgtcctatgttcagtatacccccataattccttgactgagtgctgtgagagaaaatgcaccacacaagagtcaagtcctcctgtgtctctgtgggtaaacaaaagttcacaaaccagctcttcagccggagccatatcttccccatgtttgtatgctaagcacagggtctggcatatactaggtccttggtcaaaatttgcccagtgaatatacacttttgacctcaattttttttttttttttttgatggtggacgggatctcacccaggctgtatgtagtgcggtggcatgatcatggctcactgaagctttgaactcccaggctcaagtgatcctcttacttcaacctcccaagtagctgggactacagctgtgcactgccatgtctggctaatttttaaaattttttttctagagacaggggtctcactatgttgcccaggccggtctcaaactcctgggctcaaaacgtactccatcctcggcctcccaaagtgctgggattacagggatgagccatcatgctcggtctgacctgtgaattctaattatttcatatgcaggttgtttcatgtgcctagtgtttataaacgttaagtgattgcctagctagtaatttctttctattttaaaagtaatatctatcaaaggtgtttgtgctgttaaaaggcacgaggatggtaacatgaagtcccaaactacttctttccatctgtgtttcagattatttgaatatattttgctgtataaggatggagtgatgtttcagattgaccaagccaccaagcagtgctcaaagatgaccctgacacagccctgggatcctcttgacattcctcaaaactccacctttgaagaccagtactccatcggggggcctcaggagcagatcaccgtccaggagtggtcggacagaaagtcagctagatcctgtaagggttcaaagaatctaagcattgtattcagcatgcatgatggggaaaaaggtttaagtcctttaaggaaggtagtttttagggaaacatccgcttaatcaaaaattttttaaagcctccacttaggtctgcaggttactttgctcactatgtggcaacgggatctaagcttcatatttgaaacacctcagccttctagtgccacctgcacctctctgccactttggctcctgtgaacttagccttgattttgacattttatggtcgtcccgaggtctgtgacatggaaggcatctgtctaaggcacacatttgaattgggtgcctccttttctttcccccacttcctaaagttgcaggggtcaaatctactcccatcatgctgagtgtgcaaaccagcctacttttatgtgaagccattctctgccctgctgctgatatacgcctatcccaagacagtttttaccacacaggcattcatgctgtggaacacagtatggtgatttctcaaaaaattaaagataagactgccatatgacccagcaactccacttctgtatatatatatatgccccaaagaattgaacgcagagactcaaacagatatttgtacacccatgtccacagcagcattattcacaattgccaaaaggtggaaacccaaatgttcatcaacagataaatggataaacaaaatctggtatagtcatacaacagaatattattcagccttaaaaaggaaggaaacaccagcacatgctacagcctgagtaaaccttgaggacataatgttaagagaaacaatgcaggcagaaaatgacaaatacagtacaatcccacttacatgaggtatgtagagtcgtcaaattcatagagacagaaaatcgaatgatgagttccaggagctgggagaggaggaatgggaagttcgtgtttaatggagacagagtttcagtttgggaagatgaaaaaagttctggagatggatggtgctgatggtcaacaaatgtgaatgtactcaaggccaccaaacacttaaaaatggtaaaatggtaaattttatgttatgtacattttaccaccataagaaaaaatatgaacttcttgcctgtcttctttatttaaaagtcaacttttttcctcttatagatgaaacctggattggcatctatacagtcaaggattgctatcctgtccaggaaacctttaccataaactacagtgtgatattgtctacgcggttttttgacatccagctgggtattaaagacccctcggtgtttacccctccaagcacgtgccagatggcccaactggagaagatgagcgaagactgctcctggtgagcctgtgcatagggaagcggcagcatcggatgtcagccccctgcggccccagctggagatggatatgagactagtcaagatgtgaatgctaattggagagaaatataattttaggaagatgcacattgatgtggggttttgatgtgtctgattttgactactcaagctctgtttacagaagaaaattgaatggcgagggtgtggccatatgaactgactagatggctaatatggacactttgggtatttctaatgcctgttcagggctggttttctgcatgcacgggtatacacataatgcagtgccatgcacatagggaagggtcagtaagagaagtttgccttggcagcaagtatttattgttgacattattcagaattagtgataataaaaagcagagtgattttggtcaattttattattaattcttaaattccctgcagagaatgccccctttattgctgcaccagggttggcattgctcccactgagccctactccaccctgtccctgcactcccttggttgccaaaaaaatgataacttaaatcccttccagacttaagaattttatggcatggcccaattgatataaacatttagaaggaaatgaaaagctaaaataggaagtaattattcctctaaagaaacattttgagcaaggcagtttagagaatcctaatgtctacactggcatagcacgagccatgtaagcttcttttttttctatgcaagagtattgatgtatgtgctgaatcttcacagacttgtcaatacacaggcagtattctaaaatagcactgaacagggagtcaggagactattgtctcctaaacccaggactagagttccctcgtactgtcactcctttggtcattaaatgcactgggcttgcccgcactttggccttcctagaacactgcttcataacctctctgtctgacttctgcatctccttccaggtcagctcattcacaagagttgctcccaagcctggatgagttgcaccttgcatcttgagcatgcatttctcacaataattattaagctgtgtgataatttctgctttcaggacactcatccattatcttggctgtgagctccttgggtacgggtaccttgtatgtttacttttatatccctagcacaaagcaagtgcctggcacatagtcagtgccctaagtattcgtagagtgaagaatgccagcctctcttgtccctggtttccttatgtgttgaatgtggttgagtttgtccattgctagggagagacttccagtaataaaatttactattctagatgcttctactgttatgttttatctgcccatttatctttcttagttaccaggagaaatgtgtgacacctatattataatgaaaacaatctcattacttatagtttatctatattaaacaaatttaattgcattttaaagcattctttgatactgttgcttttgcaataaatatggataatcttggttataagggagttaaaacaatgctgtaataaataaagtgcttcatgtgatcaaaatcaaatttgttatcctctctcaaaagcctgctctccctcttaccttccctaaactccagtgtccatttgccaaggccagaagcttccaagtcattcttgatccatttgtctccctcagtcctcactggcagtcaatatcccgagtcctatcaaaatagctcttaaaacttctgcctcttctccactccctcagccaccacccagctctgggctcttaacatcattggcctttgcaggatcttcacaccctctgtccttgccctcgtcttttttctctagaagccatcctgtgttcattcattcattcattcattcacttggtcagccaaatcacaagccagtactaagcacctgctccctccagtgcccatgcaggttcctggggttgcagaggattgtgaagtttggccatgcaggcatctgaacctcacagacagggaagagtttcgcagctgcattctaggtggcccagcctgctaacgcctttgtgaccatgtttgccacacttcctgtctccccaaccacagaatgatcctctcctctccaagctgcacatctctccttagccctgggactttgtctttgcccattgcaggccacaaccttactcagagagagaaggaaactccttttattttatggaggcccatgcaaagtgggtacccttttgtttttcagttggcctgttttggttattaagccacttcacagaaaggagtaaaaagtccagaaggatttgacatctggtcacatctgatctgatggcgccctgcctctgtggttcttcactgcttacaagtaaagtggagaccccatagcatggtggacacaccctttttcatcaggcctctgagtcttcccagcctcactccttggcacagtttcttctttccctaaatgcccaaagggcttgaggagtaatggctgggtcacctcttggtggcaggaaggtttccttactctgcagtcttatgtaaaaactttctagtggccaccagagtcacaacgaagagggctattaaataggtgtggacttgtacctattaataaagtgcagtatcccagtgcctcactcatctgcagaggtggtatcactgatagtggtctgagccagggctgggtaccactttgtggataccccacctcatatgtctctgaactttatgctgcactggaacaatttacttctacttctccaaatgaagccttgccacttccaaattgccaggatccaggcaagccccagggtgtgcttgacatacacctgccttcaactctgccaccctgaaggcccagctctacgacagagccttcactccccctatctcatgggccatgtggagtcaaggaggcccagcctttctgtccccaattgctctgtcatcagggtgagtttcttaccataagctttgctaattgagattcctaaaattgggacacattttaaaattctttaaatatttaatgaaggccaagaattttaggtctttgggaaatttttcaattaactactaataatttcccgccaaattaaatttgacataatttgaaaacaaaacgctcacctcttgctgggtttcctttaccaaatccactttctctgcagtcccagctactcaggaggctgagctgggagaatcgcttgaccccaggaggtggagattgcagtgagccaagattgcaccactgcactccaacctgggcaacagagagagaccctgtctcaaataagcaaacaaacaaacaaacaaacaaacaaataaaagccttcattttctcaatgttgcctctgttattttaaatcactttgcctatatatctacctgcagcatatggggtgtttttacatttttccacttacgtagatcttgtctttctacatccacagaaagcacctcaaatgcaggaatgccattcttgtcattcttgttgagtgaaaataatttatattgaatgacagagtaagcctcctcagccaaagacttgtgaataactggtgatatttgaaggctttgtaggtgaacacctctttaagagacaaatttaactttatttatggatattctgatatcaacaaccatctctttttggaatgatgctaagataataaatgattagaacatatttttatttgttttaaagcagaattattagctcaactgcatgtgtagaaaaaatactgggcctatgatttgttgtatagtttattcagggagagagatgcttcccttaatgatatcctaattttaaaatttatactgttttcattagagcaaaaatgaacacttattttcaatatttatttcatatttaaagttggaaaatataatgtagtctcagcattcaaggagtgggctataactatcctataatttagaaataatatcaaagacttggaaccaacccaaatacccatcaatgttagactagataaagaaaatgtggcacatatacaccatggaatactatgcagccataaaaaagaatgagtttatgtcctttgtagggacatggatgaagctggaaaccatcattctcagcaaactaacacaagaacagaaaaccaaccaccacatgttctcactcataagtgggagttgaacaatgagaacgcatggacacagggaagggaacatcacacactggggcctgccagggggtggggggctaggggagggatagcattaagagaaatatctaatgtagatgatgggttgatgggtgcagcaaaccaccacagcacgtgtatatctatgtaacaaacctgcacgttctgcacatgtaccccagaacttaaagtataataataaataataataataacttttttaaaaagaaataatgtgcaatgaatacaacacactcaggatttaagtaatctgagtatatgcatgtgttgtgttgtggttgcagttatatcattcccaatggcatattgtatatttattttaacatacaactgtttaaatcacacagctaagtattcctttccttcaccaagataactgatggcaaaataggtactcttgttacttaaacattactagcattattgccatttttacataacctctatgattttaataaagaaaattatgtaaaaaaaagaagtcaaggcattatctgttattgtgagaaatgggttttcaagcctagaatatgttacttaataacctctcagccctagttgattagtttctcagtcagcctgggagaatacctgttgggaaatcactggtcttagtttcccaatcaggaggcaccaatctaactattgaaaagtccccagttaaccaaatacacaaacctgcttaattaaaagtgtagttttgggatagacatgtgggtattgatatatgtattagaaaaacttagggtctgttggttttgtttcactcctgataccagaaatgatacctttcttgcgggatcgtggtatatctgtcctctcttattatataagtgcattttagcaaagcttagttttatattaaattcaattataaaatgggggattcttttttaagaaaaattaaaatgtgtaaaaactaaattgaaaatctttgatgaggaaaaaactaagataaaagttgtttctaaagcagttctgtgatcacattagttgatgggcacatacgggaagcagttgcaatttagtctcttttcagaagagccctttgcttttaaagaactttctgattctaaagtgttaggtgaccttgtctcagtagctgtggcatctctgagggcttggggataatgaagtgaagatgtagactgccctgtcttgaatgatcttaggacattttaataaccttaaagtggacattagaataatgggagtgggcaaaatgacatcatctcaagcccaggaaaagtgtatgtttttatgatgtttcttataacttaaacctccctgtacttaacacctttcataatttcctccaggtaaacctatgttcctatcaccataactcttatcacataaaaaataactaatagcactgcaaagatgtttagatgtattttaaaacttcaaacatcttgggactgaagacgttacttagatccatatatgtcctatccttaatacaaaaaatatcatgatgatagcaatcctataatcctatctagctcaaactaactatatcccaagcagcaaaaagaggtgaagaagaaggagcaggaaggggaggaggaggacacgaagaagaagaggaagaagaagaagaagaagaagaggaagaggaagaagaataagaggaggaggaggaggaagaggaagaggaggaagaggaagaggaagagggagaaggagaaggagaagagaaaaagaagaggaagaagagaagaagaaagagaaggaagaggaatggaagaagaaaaaagaaggatgtaggggaggaggagaaaacatttatcaccataaattctcagtccaaagggctgttgatgtatacagatgaataaacatgagagtagcacaagccacaatggagcagcactttagagattttcagttcagttgcctcccctttaagtttctctaaattagagcatttccagactaaacgttctttcctgaaccatgaaccattggccccgcctgtcagaaatttagaattatttccatgtctatgtacctcatagtacatgttgacattcaatgaggaataaaaatagccttaaaaagaaagcctgcttgttcagggaataatttctctgccttttcagttcaatacatttaaaatgagttttattttgtcttctcaaaacaactaaagttcagtattatggtgtattcaagtgtgtaggtattgaacctcaaaggactttttaagtttaactttgtatggaaagtatatgattatgtaggtagtctttggataataatgggttatcaagtgattttgaaaactctcagatccatcttattctttctaaacctcttactttccctgttcagtcatgagaactctgtatttcctgagtgaagaaagaggaggaaacagctttattgaggtaattcaaatagctcagataatagaggaatgagagtctattatggaatttgcagtagatgtccctagaatggagataagtaaaaattttccccagactcctgccatatgtaatcattcagtacaaccatcctgttcaaaaataagtttgttaacaaattttccatgtgtctctagaagagtggtcatcaacaaatcaacttaacaaagtcaggcataaatagactaaatttaggtgccccaaagttggaaataagattaagctctgtgattgaaaatataggactgatacctaataaatggataaagtagctatttagagatatacatcacagaaagagaaggtcttcaagtttggggctataaaactggagaaatcatgaagtccgatgaaagcaagattgccattgaaatgcagtctcatcaaagtttaatcagaattggggctgatgtaaaagaacactggaatgttgtaatttcgtctgaaaatgaagtgttttcgcagaaggatgttggtttacatggagtttagttagggaatcttaaaaccaaggatttggcagtgtttatctaactgtgtccaggagagaaaaatgtggaatctggcagtcatatacagaatgttggggacaattatgagattaaagtcatgtgtcattattttgcctaagatttaggaatatttcacttcactctccctgtcagggatccacaacagagcaaggtcaggagacagcaaagcaagtcatcaccgttacttagctggagctctggccccgagcacttctgtggacgtctggtcaatcaggctagaccaactggaggaagtggaggccaaagtagccgcaggccagagcaggccaaattactagttctgtccattctactgcaagtcccaacacaagtagatcttaccgctcccaggtcagcaaaagggcacacagagtagacccactggcgacagaggaaaaggagcaaggacaaggaaagaagtttgtgccttggtgcccaatgctgccttcctcagaccttgggctggtcagagcagtagctaacctgcatgggaggaacatccaaaacagagagatttggccaggcctgttggtcaagcagaatccaataagctcagaatgatccctccaaactaggtaacttttcttctgattagaaattttacttctcaagtaattttttaaaatcataactgaatatccaaaatggcagatttaagtatttcactcactggaaaagtttaaaacatcattgcaaaataatgcaatgtttttctgatttatttcccagtctcttaagttaaattgcttagtgcatgtcagtctgtaagggaggctgtgcagtgtagtagaaaggatgaggatttgaaaccatacttacctgagttcagatgctgattctgtccgccattaccactgtgttaccgtggacaagtcatttgaacagtctatgaacctaagtttcctccacttctaacaaacaaacgaacaaacaaaaaaggtggcatatgggggttgttagggttaaatgaaatagcattagaacgtgtgtagcacacagctttgcaggcaatcagcactcaaaatattagatgtcttctacctctggcttctttccccctgagatcctgatcaaccctccatggaccaacaaaatcaaacctgtatgactgtatgaatctgctatggattagagcagggtcctggaggcctacaaaggcagtgccctcagtgggctctgctggacccgtcagctaaaccattccctaaggtatctctgtctgttcctcattgctcacattcgtgtgcagaaacatgcacccacctctagccatgctcaggcaacgtcaagtataatatacatgtagtttaaaaaaaaaccccagcaacttccccttaataaatacatctctcatgaaccctggcattttgcacataacatttttttttttttttttttttttgagacggagtctcgctctgtcgcccaggccggactgcggactgcagtggcgcaatctcggctcactgcaagctccgcttcccgggttcacgccattctcctgcctcagcctcccgagtagctgggactacaggcgcccgccaccgcgcccggctaattttttgtatttttagtagagacggggtttcaccttgttagccaggatggtctcgatctcctgacctcatgatccacccgcctcggcctcccaaagtgctgggattacaggcgtgagccaccgcgcccggccaacatttttaagatagagaaaataacagtagtatcaacctcaatctacatcagtgagcacttgttttgtgtcacattctctccagagttttatactgattattttattcaacctcaacaaccatctttgaattagctactattgttattatgcccatctcatagattagaagacagaagtccacatcaaatgcacttgacttgggaggataattgataataattttcaactatgattttatttactggttgcatgctatttgtgcattacttatagaagtcatgttgactaagtgaagaaaagactggggaatacgttaaaacatttctctaaagctgattttgaatgatatgagcttaaaataaaactatttcaatatcacctttgttagattgccagcaatgcctgtaggcttttacgctgtggtgaaaccttaactttccccaaacttcatggtcacacttccatttaagcacaaaaagggtgtagagtcacaatatattaagttattttttggcaccagaaacaagaagtacccatcagcagtatgccaacctgtgcaagaattttcactaactggccctcaagggtcatggctcagcaaggtcatggccattccatttccaggctttgaaaggtgccggggcaagcaggagtaaggtagaaaaatgttggcatgcactgttgccacttctgccaaaagtctggcccatcaatcagaaagccagcagtcatctttttactgagagagttgtactgggggcagctgaagccacccctttatcctcaattttcatcccactactgttcaacagcacctctttccctgaatcgatgtcagataatacaaattctagcagcaaccaagagtgaaataggacaggcaatggggccactggtgaacagttaatgaaatccccaaaagagagaagaagatctgaggattgtagttttcagactaaagaagtatcacttgcttgaaatgatcaagaatccattcattcattgagcattactgaggccctcctacatgcaagactgtcttctaggcactggggagacagtcaaggacaaggtcctgccctcaggaagcctgcattctgctgagaaggagacagatgacacacagagaattttaaaagccagagaatgacaataatcacccagttaatggaaagaggctaaaggaatatggtgaataaatagcaccttacgatggggatggtcgggtacagcctctttgacgaggtgccctttaacttgagtttccaatgtcagaaagaagcttgtcaggagaagatccaataggtcacattctaggtagagggaacagttaaagcaaaggctgaggctgcaaggagttcatcttgtttgaggaactgtacaggccaagtagatggagtttggtggctgagactttcaaggagagtggatccagatgagacaaaacagacaagggaaggccagacctcacatgctggagtggccacagcaatgagtctaaacttcattctaaggccaatgggaagttgttgaaaggttttcagtgatgattcacaaaatctggtttatattttctaagatcctcctgtttgccgtgtggaaatggatggaaggggtgtgagagagaaggtgagaggaccggtgagcaggagtgcagcagcttgggagagagagcatggtggctttcaagggggtggctgcaggggaatggggaaaaggcaccagggtcagggcatgtttggaagcagtaagtgggacttgttcaattagctgtggtaaggtgagggaggaaggaggagttgaggaaatccagttgagttttgtcgtgattaaatttacataatattcagagaactagataacagcagcaggaggaaacctcttaatctagtgtctagtggaataccgtgtgtgtgcatgctattagaacaatgaagaaacttctattaattatgaaaaatgtgtatatatgcaagtttgtgtctgtctgtgatgctatataataggatatcaaacaaaatttttcctgttttcatggctcaaagccaaggacaatgtttagagagccaccagccacctcctgcttttactgagaggcactaatgaagacttggctctaccactaactcctgcatatatctcatcctccttcttttaagccacggaatgtgaagtaagtctcgctgggtgtgcagttttcaaaagtgcatctgccatccctaccccactctgctcatgaaactgaatatgtttgtccatcctctggggagactagcatcttgttactcacttgagcatctgcttagacagaaaaaagtttgaagataatttttttttttgagacggagtcttgctctgttgccaggctggagtccagtggcgtgaccttggctcagggcaacctccgcctcccaggttcaagtgattctcctgcctcagcctcctgagtagctgggactacaggcacccgccaccatgcccagctaatgtttgtatttttagtaaagatagagtttcaccatgttgaccaggatggtctcaacctcttgacttcgtgatccatctgcctcgacctcccaaagtgatgggattacaggcgtgcaccaccacacctggcctgaagataaatattttaaaaatcaatagttttctaaataccagaaataattggaaataaaaccaaaacaaaaaaattatacttacatgagcattaggaaaacagactgccaggaataatccttacaagaaatttgtgaaacctctattttttaaaaaatgtactttataaatacataataatatgtaatgattttttaaaccaatttttaaatctatctactaaatattgtatataatttatatatattgaatatatgaaaatatgatttttcagcttaatatagggttaaaatatctatttccaatcccaaaaagatttcctttgcaatttgacaaaataatttccaggttcactagaaaaaggaacagttgagactagaaaaataaaaggaagcagagttgtggatgctccctgtgaaatgctaggtacaaaacaaagtgttcataaaaagctgcatggactctagagttcacagacaagtcactgaacacaatggccttaaaaaagaaacacgaattgaacatttcatagcaaagcatcctaaggccatataagggatggattttcttaccaaaatatattgggaaaattatctatttcattcagaaacaaagtctagctggagacttactcagaccatgcactgaaatcagttgtaatgcattaaagagatagatgtaaaaacaatataaaaccactcaagaattttcttaaggctgctaaactaaaaaataggccaacatatcctgatcttggtttgaaaaaatttaaagaaaataaaaagcattgaataaaaccacacagaaaaaaaaaaagaactgacactataaagccctatatatgtatatgtacatataaaaataaaagagattaaaatagaacttacaggccaggcacggtggctcatgcctgtaatcccagcactttgggaggccaaggcaggcggatcacctgaggtcaggagttcgagaccagcctggccaacgtggtgaaaccctgtctctactaaaaatacaaaaattagccaggcatggtagcacatgcttgtaatcccagctactcaggaggctgaggcaggagaatcacttgaacctgggaggcagaggttgcagtgagctgagatcgtgccactgtactccagcccggatgacagagccagactcagtctcaaataataataataataataataacaacaacaacaacaataacaataacaataatacaacttacgtctgggcacagtggctcacgtctaaaatcccagcactttgggaggtcgactcagggggatcacttgaggtcaggagtttgagaccagtctggccaacatggtaaaactccgtctctactaaaaatacaaaaattagctgggcatggtggagagtgcctgtaatcccagctactcaggaggctgaggcgagagaatcacctgaacccaggaggcaaggttgcagtgagccgagatcgcaccactgcactccagcctgggcgacagagtgaggctccatctcgaatataataataataaataataataataataataaatacaacttaaaactggagaaaaatcttagtatatttcctacataacatgacattttactaagcaattaaaatatagcttattaaaaatagataaaagatacaaggagacatttaagaagacaaaaagctaataaagatttttaaatatccaacttcagtaataatcaaagaaatgcaggttaaacactacataatgccattctcacttctatgatttataaatattaaaaagtttataatccccagagatatgaaagggttgatgatacgtactctcatatgccatagctagcctattcttcctttctttatttttttgagaaactgcaatcgtttgggggatacaggtggtttttggttacatggatacgttctttagtggtgattgcagaaattttaacgcacctgttacccaagcagtggacacccgtacccaatatgtaggcttttatccttcaccccactcccaaccttctcctccaccaagtccccaaagtccattatatcactcttatatggctggcctattctttggcacatttctagaaagcattttggtgatacaaattaaaagccttataaaatttcttatgccatcatctgcccactcccaccccctagttattgagatgggcatttaagtattgcaaactttaaacataattccagctaaattcttgcagtccagatgtgcgctctagaacacgtaagttttaatgaatcatttgatcatttattggagtcatcttcacattgcttttgaagaaaacactggtctttcctcagattatctttgagagttggagaatcttttatccaaccgtatttaatcttccatccaaggatatgaattcgacctgatgggctattgaaactttgggggttgtactagtctgttctcacactgctataaagatactaccagagactgggtaatttataaacaaagaggtttagttgactcacagttatgcctggctgggaaggcctcaggaaacatacaatcacggcagaaggagaagcagtcaccttcttcacaaggtggcaggagagagagtgtcagcgagcaaagggggaagtacttcttctaaaagcatcagctctaatgaaaactcactcactatcatgagaacagcatagggaaaaccactcccatgatccaatcaagtcccactaagcggcccccttgacacatgggtatggggaatacaaattgaaatgagatttgggtggggacacagagccaaaccacatcaggggtctcctctttaccagccacagaatctttggattctcactccttcaaaatgcacatgcttgggcaaaaatacactgtgtccatcacaagcctttagttcaattttgaatggtggattagcgtaaaattcctagagcagtggatctcaaacggtgccatgacttgaaatcacctgagagagttgatagaagagtttgttggtcccctgctcccagtttcagattcagtagacctggggaaaggcctgctaattcacctttctaaccagcttccaggtgatgctgatgctggtggagaacccctggcccagaggaaagtatttctaaggtgagcaggacaagtagtcacttggtttttgagggggccaaaattttgaattaaaaacatgaaactatgatagaattatttcaagcacatatcagctagtgtgcgacagagattttggtgccataccaatatcctagccacactctgacaatcatttactactttttaatgtgagaccagcccttggttttccagttagactttcttttcctaaagggcaaatttccatcttaaacatttttttaattccccatagttatttgcacaggtaaaggatcagtagagatatgcttctgaactgaatttataaatcaaacataccctgaaaagagagaatccatagaaagttttggggttgtagccacagctgcaatttaggatttggtgcttagcccagttaagaaatgtcactaaatccccatctttccattatcccagttgtagctgaggataaactttgaggttgaagattttaatgatggtaaagctcctctaagagtccctggatggactttatttgaagaagccaataataatgatgatcatgggatgaggatagtattattcagttcatgccggttcttaatgaagttgcggggaaagagaaggagaatgtgagagatgcaaataaaggaattatctctgcctgggaaacaatttttaaaagccaacatttctcatgtatcggcctcgaggttttctttttttattttttagggaaggtttcttggaaaaagctgttgaggttgggtatcgaatgttctttgtctccttcttttttatgtacttatgtggttatatatgtatttacttttatcccagccattgggcaatatcctattttcccctgatgaagctggggctttggtgccctttccagttatagtaataataatggttaacttgtttatagcacttactaatcacaaggcactgtcctaagtatttgacaagtattaattcatttaatttataacggtcctattttattatttattttatagttgagagctctgaagcacagagagattaagtagcatgtccaacgtcagccaggaagtaatacagctgggatttatgctggtcagtctctaaccactatgccgagctgtgggcttaaagccatgctgctgaactgcaatggaataccaggaagccacaggctccaaatcaaaggacccctgtgaaattctggtccaatctatagatgtctttgcacccaatttttcatccaggtataatcaaggatcctaataattacttcacagacttcataaagtaaaatgataatatgtatgcacaaacaactacaacagtcccctgagcacgtgtactcggcacatgtgagtttctgtccttatgagaagaaatcttcacaacaaaggaggtgtgcattctctggccccatacatctacgtgttctacccatccttagaggcattgtggctgaaggtgagaacatcccttgtgtcctggggcatgctgtgtttagaagagctgtcactcacacgcatacacattttgactgagtcaaaattgcacctaaaagagacaagaaggaagctctcaactaaactgaattttccaggatttgtctatagcagagagacagggtgatattttaaatattaccatccccaggcctcagtgaaccaaactcaaaaacttttcaaacttttcaaaagctgcaaaacaaaacaaaacaaaaaactatggggcatgaagatgcagatgcatgcatacttccagagtaagtctctgcaagcccatgacaactcacaaaggagataagccttggtgagtccaagctaagatggagtgtggggcttcaaggccagccactggccaacaactcacctttgaatgcccagtgccctgggctctgcccgctgccctgccccaatgcattgcctacatcctagtagacttggaggcttgcagactttgcctgaagatggtggcaggaaaaccaatgtggaataggaccaacctgttgaaacttctatatgatccagagacaccatgcacagggcattgctgccacacttgccactggggagtggttctaaggagagcaggtgaaatgaaaagcatgactactgtgtctgacaaaggcagggctccagcagggcttgcctgtgtcatcgttctaatatgaaggcttatgtttcctggggcactgttctgagagtactgtgtgaaatgacccctttattcttcacaatggcccttattatcctgtattatgagacagttgagacttagagagattcaatgacttgcctgattcccacagccagtagccctctctccaggatggtgcaaatctttaaaggcatcgccctgctctctgaaggaaatacaatctccatcatagctgcaggcaagtccctgcagaaaccagcccctcagtacctctctactgaaattactattttttttttgccccattctcattctgcatttagtctacggtgaattgtgttcatgtcttcaagtgtattatattctgtcacctcaggacttttacatgtgttttctctgcctggaaccattctttcctatctccctgtccaggacaatcactattcagacttcagggtaaacttagatccagtgttttccccaacaagaaattggcagttactcatataatctgctttgtagtacattgttctttgcttatcatacattttactttattgtattgactgatggagctgttggtctccccactagacacaaggctctatgtggccagactttgtccacagagcatggagcctttctccacatgggtgatcaataaatatcattgcatgaacaaaaacttgaatttcttttgctttgctgtgtcatttcccccactatcccatctctgactctgaaaatcctaatttaaagttcttgctgataattggcctcatcagtttgacttatcagtttgacttaagactttgttgtctccatgcttgcctagcaagaaccaaaattcttatataccaaaatccttagagagttccaaagaagttatcataatgccaaaaaataatgcggagcagtcaaaaagaagggtctttttttccttcttaatttaaaaaaactcttctccgatttcccttgaagccactgacacacacataaccctggtctcactgtaacctcacaatccaggaagccacatatcatgtgctttggctcttacaggtcactcatgctcagaagcagggcaagaatgaaaaaaacactagtttcaggggaaaagaaaactcaggccctgttcccagcacggtaactctctagatgtgctgatttctgcatgatgttcagtctctctgggtctctatttccctttatttcatagagtagctttgagaatttagtgaagtaatatatgccagatgcctaggcaagggccaaacatgtaacaaatagttgctgatgccagttttcttctttcctttgcctttatcttgggagattttggtttaggaattttatagcatatctgatactataaaatgattaatctggtcatcagtggatctgtaaacacctggaaattgcatgcaaagttgggtatgtcttcaagtaactttatttctacagaaagtgtctctgttagcttcctgggtctgctttaacaaagtaccacaaactgagtggcttaaaaaacataaacatattgccacacagttctgggggctagaagtctgaaatcaagatatgggcagggatggttccttctgagagctgtgaggaagaatctattcaaggcttctctcctagcttctggtagtgccaagcatccttggcttgtcgatggttgtctccttgcatccaaatttggtctctgtgtccaaatttcctccttatataaggacgtcagttattctggattaggtcccacccaaacgaccacatttaacttaatgatctgcagagattctatttccaaataaggtcacattaataggcactggggtttgaactccaatgtttcttttgaggggaaacaattcaactcataaaagaatacagttttcatcagattcttaacggggcttatggcccttccaaagactaagaactagtaactgtaaaatctactttatggcttatccaataccaacctaaccagcaagcttgtaggcttgagatggaccatggtacgtcttgagtgccaaatcatggagaaacaccaaggcaattgtgatggggttgtttatgcacgtgctaatgggaaaaaagtacaggaagtatctttctacatcaaactttataccagttggtaaccattgctgtttggttaaaatcttgctgtgttaagaatttctcaagtctcattctaatgaagtttacaatccagtggctgagacatgtttaccaaaaaacacatatgcatgcataattataaattgggaatagtactaagatggaaagaagcaagattctataaaattaaagaatatgacttgacctggatcggccagggaaggctttactgaggaaatgatgcttcatctgagtctggaaaaatgaattaaagtgcatctaaagggatgagtattccaggcagaggaacagcacgtacaaagcctctgcgataggagggaacatggcatattggggaaactataagaaagccagtggtatgggaacagagacttggaagtgggagaatgagaacaatgtgagatgaggttgaaggacacttgggcattttgagaaatgcaggaacttatcctaagagaaatgggacaccattgaaaggcttttccatcttcctcaacctgcatgtcaatctatactcttagcctgctagccctctgccatcttgacatttttagccttgattcttcagagataccactttattctggatatactcccactactctggctatgctttttcaatctcatttttctctgtctgctccttaaatattgctttccactccctccctgagtgatctcatcctgttgcatggtttcagctaccatcctcttgtagatacctttacaaaacctttttcctgggttgtagttgccttttttcatctgcttagaaaataaataatgcacaattttcgtcaatttttgtcacatgaatatttatgaatatttatatggtctgcttaagccctgttttgtaactctatggataactgcttttgagaggatgttcccaaactggtatcattttagctattaagataaatttgctacagggcggaagagaataagtcacctctgaggaggtgtgaacagtgactggtggggtgctggccgcaaggcctccctgctcatcactggaaacagttgacagatagtctgcccttgtgtgctctcctgatatataaaacacatgctttgagtttgctgaggtttccactcatctttcccagggcaccctgactcagggctccaatcaccctctgctgacatctgtgtgggcacaaagcatccccccagctgagacggcatgaaaggaaaccaacacattaatgcacttgaaggtcactgtggcaatgtctgaaaatcagactgcagtaaaagtcttggtgcatctgattctcaggcagaaatacttctcaggtatctactgtggaagataaagaggaagggtagagaaagaaagagagaaagggaagaaaagaggcagggagaaaaagatgcaaatgaatatttgctaaacactacatgatttactttcacaggcgtagtttatttaatccttacagacagcctggcaaagtaggtatttttttaaaattttaatttgtataggctcagatccatgaagcaggtctcctgaactaaagacaaacaaacaaacaaaaaactagtaattttttcaacaagtttggaatcaatcattcttgctttcctttaaatttgatcttctttcaactataccacaaagccttggtcactgatttggggaattaaccagaacttctgtgtcattctgggttctgtcactcttgtgaggactcagctaccattgagttctctgtgctttttctttgcacaacttgtactgaacctgtacgtttaagttgaaccaacacagccagaaacccaaaccaaatggctgacagcaaatacatataagccagggacccatcagttcaactgagacaatctcctctgtcctatcccttaaatttctcccatcttattacaattttttttccttctagtctaggtttctcttcctgatttggctcagcttatactcttggatgtgggaacttatttttactggctctaactcaatactaattaaggattttcctcctgggacaccaaagggtggtcttcctggacttatttcaggtccttgaatgctttatgactgaaagcaaactcctcatacttgtctacctggctggtactcagatgctccaacgctgaagccctgtaggacaggggagattttagagaggacatggagaggagaatccaatcagagaatggcctttgggcactccagcaatggctctcattagcggattgtacttatccccctagcaggagtgttatattgaggaatttgaaggaaattttgtctagcaagaactgtctgctttagtcatcattaacggactacattgagcaagtggtcattcaaccaaattctcatacatagggcgaattcctttctgttcaactcagttagtcattctatccttggggactccaaaaggttttgtgcaaatctccattaggaatatacagtaatcactccccagcagtgagtttctttgttgggtaattccaataaatgtgtctctacttctggatttcttttccttactgcccagaattttgcctccattacccatgcactttaaattcttggggaggtttatgtcctcataataagctctagccgtgacttccaggtaccggtgaatcattccatgccccatgcttgctgctattttttgttattcacatcttggcactgattgaacatagatccaacccctttctattatttttacaaagaaacaaattactcaaggtctttactgcaattttaggcagatagaaggagcttacaggcagtacagaatgcaccctaagattggacataaaaatttctgaaaattctcatggaaattgtaggcacgtgacttggtcatctctttaaaaaaaaaatcttctttcttttctcctctctcattcccatattcctgtgtttttctaactgagagcagttgagctctttctttaatgtcctgttgttttctaaccaatgctctcagtgactcagctcctaatctcaagtggttaattaaggtattttgctaattaagtcagttgtttccatgagagttgactactggtatgattttttttaacagaacataaacataaaagcatttattgttaatagggtagtaatacaccaaaatggatgtaaacacatatctttcctttaatccaactctgcgggtattttttttttaagaaatatactccagtctgggcattcactgtctccttggcagaagcatatttataagtcatcccacccctccctccaggccatgtgagaagaaacacctggcaaacagactctgagctgagcatctcacatcttctggagcttcaatgatgaacaggtaattccccacctgtcatcaacatcatgctatatcctaaaaattaggcagagatatgtatcaatttatttgcctaataagcaaaccaagttaaccagttattaaaataatttttttctcacccttcacaccaaaagtcaaaccactctgtgtctctggaaactcagtgaacccagtcagaggtagtcatgaacttgaagtttgaaaataggaaaaacagaggacattctattttggttattgcaggtaataaaaataggcagtttaaaaggcctgcatgttagttcaaaacactcatctgatttatgcctttaagaacttaattttttcccttgactattttgagaaatcttacctttatgattgatgaggggctgctgtatctttctgaattatgattctttccaagtcttccctgctctgttctccaagcttctttaagtgctagtaaatgtagattaaatgaatgaatggtagataaacaaaagaatttcagaaagagaacagaaggaaagaagaagaagagacagacagagaggaaaatagaggagatatgggagagagagagagagagagagaactgattgctgtaattcatttatttaaaacaacattatctagaatagtcagtatcacctaatagaaatgtgttatttaaggggaacactcaacccatcagcaataaaaaagcagctaggacactccaactgatattccatatcataaactaggtcaatataatttattaagattatgtgattgataagggaagtaacttttctggttagattttggggaaatagtgcaaaaaaaaaataccaatgtttactgtccatttaagccctgtgctcatgttttcatttttgtgggaaaagggaaaaatgattctggatcatgccattcctcatttctctgacaacactctctcaaaattctcacagtacaatattgttttaaatactcagtgatcaaacactttcatctgaaactagaaaatatttaagaagaaataagacaactggtggttttatcctcatcattttcttttccttcatcccttcctttcttcaaaaccctagcaaacgtcatacgtacaaaagaaccgctgcctaaccacaggttttaattcaaggaaggcagaaatttcctctcccaaataaatttcaaaataatgaagccagtaattcaataaaggaaagaaaaataatattttcatggaggaaagttgcctactaatgcagtgccacagttttcaatccaagctgcccccaagccttgatagtggccaagaagactgatttcccagagagtctccagaacaggagtcatcagggacattctctttctttcctgctccatgattgtatctggtgtggtcaccatggaaagacaggccttcagctgagctgcctttgaactgtgtgagcttagccctgtttgagttgagacaggcactgagaggcataactatggctctgcatttagtccacatcaatcaaggaattgtcatgtctcttcctgactttgtcttaagcaccttgtaggacagataagaagcagtatttagaatgtcagagcacgactaaggggtgtaggtggtcaaacctcataggggcatatgactaagctttcatttctgaacaatggtgataacaacagtttcagaaagcaccatttctggaacttttacttttgacactgatattttgccaagaatttacatgcatctttatagccaatgatcctcattatagaaggatgatgatcactattaccaccattattcagaagaagtaactgagcctcaggtaggttaatcaatgtacccaggttcagtagggcacacccatggagaagctatagtatggaattcagctgtctgctgaaaatacccatgtttttaactgctatgcaaaatgatgtatttattatggagaagtcattttaaaatcaggtagaaacatataaatttatgatccataaaacttaaaagtgtttacccattgtttgttgagttgtgctctggtgtagaaccaaggacactggcctccaagggtggtcctccagctaagttgtcaatcctatctgtagccactcctctaccctctgctccaaccaccctcaacggcttatattccaacatacttcgtgcctttgtttaagctgcaccatctgccttaaatgtctttctcctgtctgagcagctcaaatcctgctcattccttacattttggctcagttgtcacgttcacttagaaactgggaaataagagaaagttgaagaatggttctttaattgagttgtgaacctagcatgtgttttggtaaatttgatactggtgtgagtgaagtgctaccgcattacagagcctttgtgtttgccaagtgagagcagacagttcctactttctgtatccactgtgattctccaagaacagaagaagatttctctccagaacaaggaaagcagggctgaaaagctgccattctgcctgcaaaatctgtaattcctgtatattcgagagaaaatttacgcatgagggaagctcccatgttcttacatataatataaatgggaaaagtactaagaatgtccaatgtccaataaataagtctttgatccctcatgaaatttttgataccctgctcctctttttgcagtgtgggtttattagaattaccttatcaatggcatatcaggtttctattccttccattaatttaaggaaaacgaatgagctatatatgcatctgtggataatacattgttggttatcacattcggcagctttagtgcagtagcaatccctccaaatcccagtgacttaaccaaaaccatatacttgtcacttgactttgtgcattagcagcagcttcttatctaggcagctctgcccaatatgtctcattgaaagctaaaaagtgctcattctgggcactaggctgaaggagcagcgcttatttgagatatatggtccttgtggcagacagaaaagagtaagatagctaaagaaaacaatcaatggctcttaaaacttctgcttggtagtgaagtgtgcacacacactcactttgcgtggaccaaatcaagtcacatggctgagcctgacggcaatgggcatgaatatttatcccttccattggaggcactgccaatcaaattgcagaaggtggggacatataatccttttaaaagaagggcaagtggccaggcatggtggctcatgcttgtaatcccagccctttgggaggccagagtcggtggattgtttgaggccaggagtttgaggccagcctaggtaacacgaggaaaccctgtctctacaaaaaatttaaaaaataaaaaaattagccaggtgtggtggcacatacctgtagtcccaattactctggaggccgaggcgggaggaccgtttgagccctggagattatggctgcagtgagccaagatcatgccactgcactccagcctggtgacagagtgagacctcatctcaaaaaaaaaacaaagaaacaaaagaagagccaggaagttgttattggttatacagttggttatggctacttagatattacttataatgggtgtgacctctattgcggattgtcatagcccgaattgtgttccaccccaaaaaattcatgtttggtatcctaaacctcagtgcttaagaatgtgactgtatttcaagattgggtctttaaagagataaataaggttaatggagttcattggtgtgggctgtaatccaataaaactggggtccttataagtagatgagagtagaacacagacatgtacagaggaaagaccacatgaagatgcaaggaaaagatgaccatctgctaaccaagaataaaggtctcaaaacatcgggcctcagaattgtgagaaaatagatttctgttgctgaagccacccagactgtggtactttgtaatggcagccctagcaaatagacagtgatgaataaattagcagatttgatgacattgatatttccattatttattttattcaacacctctaataatctctattattatattaaacatttactctgtattaagtatagtattaaatgttctatatacattatctgttttattcactcaagacaattctatgatgtaagtactactattttccacattttgtatatgagaaaatgttatatcgatagcttgaagggtttgaagaacttgtctaagttgacacccaggtggggaactgtgatctgatcctaggtcatctgaatccagaatcagctttctgccaccattatcaagggacattggatattctgtagcatttactaaaatcaagaaagttaaaaaaatataaacatgagagatctatgatgcccatcttgaggagttcacaatccagttgataaaagaaaagaagaaataagtataatcctagagaagataagataaatgtcatgtaaaacactctgtccagaattgttatttataacttggatgaggaaattgatggcacaataataaatgttgctgaagatgcagctgaaagagatgttattccttggataacactcaaaattttaaaaaggtgatacataaaactatcttgtcaggctggaacgattggccaaatctggagaaacgatgcatgatgaacaaataaaataaatttctaagtacaaaaaaaactggatcagaacaataacaacaaaataatgtagtttgttgtgtgaacaaaggtcattttagtttcatattagtcagctgtatcactcattgtggactaagtcattcaacaaacatttatagggtggctcctaggaggaagtggaaggaagtcactgctctcaagttgtcagtccagtggtgagagagacacatgagcaaatcatgatacaaggatctgacagatgcctttaagtgagtctgaatgaagcacctcggtaaatggcagagaaaggaaataatttttgtaggttcatgagaagaggttgagatgggaaggagtttgctgggcagagaaccaagttcatgataatctaggaggaagaacagtaagtgaatattcaattgtatgaaaaagctctcccctgtttggaatggctgaaatacaagttaaaacaccagcataggatgaggctaaaattttgactgggattcggttttgaagggcagtacagttaatgctgctgagtctggccttcctcttgtatgtaacaacaaggtaataaaaatttctagaggagcaacatgaccacatttgattttttggaagataattgttgcaagcaatgtacagaaaagactggagggtggagagaacagattcagggagatcagttaacgagtggttgcaattttccagtaagagaagttgaagcctaagggaggtaggttctgctaaaaatactgacactaatggtacagctgtggctctttccactgtcctggctcaaagtgaagttttgaactgtttttttgttttgttttttctgaaaccacccaagttgagctgctggttccttctgcactacccggtcccttcccgtgtccacagttctaccctttcttatacgggccttaaaaagtgctggggtattgataaatgtttatagtacagttgagatgggctgactgaaacatcaggatgtacacgggtgacatttctactgggtgctcatgggatgagttgtaagcagcgatcagaggaagaaccttcacgggggacaatgaaaagcaacgctagcaattgtctttggcaggacagagtgcagcactctactgaacatgacagacagccttcagcatggcttagctctgtcgcctgttgactgcccttgggctggccataatggtcttcttcagggcagagattgagttctttccaagtatgatctctgctcttctctgtgtgatccctccaagccatgcagaaggtcaccctgacctccgttcttgtcaggttctctatcatcccattgactccctggaaaactgcactcttaattttttatttgtaggctaactttatacctttatctttcaaatctttgccttttgatttccaaaaattattctctcaaaaatcttggctcttatcaactaacagctttcaaaaactatcatcttttatgtggacttcaaaaacttgactgtctttgtttttctttgtgtttgagctaaataaattttaaacctctcttctcaaattccccttaaagatatctctaacagtttgtattctctttgtgttcaagctaaataaattttaaacatctgttctcccattttccttaaactgaagatatcgctaggagtttgtgtctctatatagggacatacataatcagacaggtatggaaaagaaaaggatattatattattttctaaatataatttttacaatgattgtattaaaagccaactaaaattatgatatcctaggagaataaaaaattactaacattgactcaagaagaaacagaagaaagaataggctaattcaaatgatagggaaaaaagctgaaaaagatgagaaagtatgaaactgcttcacaataaaggtgcccgcccagttttatgcaagatgcctttgagaatcatacataatgcctatgattatttttaaaattgctctgaagcattggtgttcaaaatattggccgggcacagtggcttacggctgtaatcccagaactttgggaggccaaggcgggtggatcacttgaggtcaagagttcaataccagcctggccaacatggcaaaacccatctctactaaaaatacaaaaattagccaggtgtggtagcacacacctgtagtctcagctacctgggagaccaaaggacgagaatcatttgaacctgggaaatggaggttgcagtgagctgagatcatgctactgcactcaagcctgggcaacaagcaagactctgtcctcccccacatatctacatgtatgtatatatatatatgtgcacaagaatcacttggggaggttattaaacacatggactcctttctcctctcctctccccatcttctctttgggactttgatacagtagctgtgggatgggatctgggaatctgaattttaaataaacagatgctcggagaacaatactgtcctttgagaagcctgttctaaagccatggtctttttaaatatgaagtttgcattaaaaatccattaggatggattaaaaaatagaactttatttttcttaataaaagaaagaaatttcaatttcactgtaatagcatttatttaactgattgacctggctccttctctgagttcttatggtcaaatggccaatgcacatgtatggccccacagatattcttgaaagaaagtatgggtgccacctggtcccctcaacagtgtgtttgctcttatacactgcactgcaatttgcaactatgtgggttctaccatatagttgtcattaaaggaatcctcccaaaatggacaaatggcatgattatattcctgaagagaagccacagattgaagagagagcactattaaatgatgcttttactattgattgttcaaagaaaagatttcatcagtcacattatgagtcagacacaactatgacctcatcagatattaaaaacattggctgaataattttaaatgatcaggaatgttactggaaaatagagatccatacacagtatcggcaagagcaaaccttattttaattgtatattgtacctgtgaattagtttataaaaggatgaggtcttcaggatgctgagtacttaaaatctaagcatccagaatattattaaaataattttaattagagatatgatttgtaaataaatcaaaatgcatataatatggtaacattttaacagcaaatttgctgataaatgtgaattattaaaaagaataagcctcttcttacaggtagggctattcaaaatgtggtccatggactgctggtggtcatcaactatttgttacgtggtcaagataaatatggcaataatagtcagcatttagaaacttttacagcaatttggtagagtaacctgatgcctattgaatctattcataaagaaattaagcttttatttcgattgtttttggcttcttgttttatttttctagtaatttctttttgctttgttttaaccaaaatagcagtgcatgatggataggaaattgaaataaaggatttcaccacagataatttgaaaaacattgttttaaagcatagaaaacaattctaatttatgtataatatcctagtttattttataaattagcatagtcctgaaatcaatacctgacaaatatcccacaataacaaacctataattataaggaaaatattagcaaatcaatccagcctcaaattaaaatactaatatgccatgacctctttgaattttatttttttctttaacttttaaactgtaaaatggtttaatttctaataatgtgttatttatataattatgctaatagcttacaagagacaataacataattacattgataaatattcatgaaaaattatttcatcaacaaaacaggctattaagtagtaataactacaattttttataatcatatatttacttagtagaaaaaatctggaatattataaaccaaaacgcttacattggctgttttgttttgatttatattttcttcttatgtttatagctatgttctaaactttcaataacacatttttttttaagagacaagatcttgctctgtcacccaggctggagtgcaagggcaccatcatggctcactgtaaccttgaagtcctgggctcaagtgatcttcccacctcagcctcccaagtagctaggatgacaggtgtgtgccaccactcctggctaatttatttatttatttttttgcagaggcggggtcttgctgtattgtccaggctgatctcaaactcctagccttaagccattctcctgccttgacctcctaaagtgctgggattacaagtgtgagccactgtgcttggactataatatatgtaattttatgtaataagttaaaaaaagtacagtcattgtaggtataaaacattgtgtgtgcctagagtttaagttcctatgaaacatataaggatttaatattactcactcacaggtttacacattttccactaacttgttttggaagtaatttactcaatggctcattttaatttcatcttcaggaatgagcaatttgtaatttacaaagaaaagcaataaaaacattccattagtgttcctcaaactactgtgcattgcatgtatttgcataatgaagacagacttttttgttctctgaaaagaatcaagtcttttcccttcccaccctttggtcttacttatttccaaggtaacagggtggtaggcccagtcttcttcctttgaaatttcctccctgtgatgggtctgccttttagatcagttcatttctttatgacattgctctgaatttctgacccttctttattgcctttattgcaaaatgatttttgcaatagttctagtcatcactaatcacccttatctttttttttcgaacatttaaatcacatgatagcatgtgactcaggacagaaacttgtaccagggtgcaagtggttgaatatcttaactagtcagatttgggaaatattttgaaggtagagattgcaggatctgttggatggaatgcgggatgtgagagaatatttcaggatggctataatgattttggcctgaataactggaaaaattgagctggtatttactgaaatagggagaactgtgggaaggatttgggtgggaaatgaaagttccattttggacatattaagtttgagtgcattctatatattcaagtacacatagagaatagacagttgaaatttgaatctggagttaaatggagagattagtgttgaagttaagatgtgtggcttgttgctgagtgtggcatctaaagccaactggtgtggatgagatcatttgtagatgagcactgagcaagtgctctgctgcattctgaggatgggaacagggcctgcttcatggccacatgatcttggcagtcgcacaaaacctcttgcttaggaggaaccggtgcttgattgaatgctctgctctcactctcttgaaactgttaataattttttaacaagggcgctgcattttcattctgcactgtaccttgcaaattatgtagcaggttctggttggaaacataaggatccaaccttacgaaaggaaagagccagtgaagtaacctgaaaaccaagcaagtgtgaggaggtgtcataaaagtcaagggaacaaattgtgtgatgatggacagcatgacccacagtctcaaaaagatgatgcaaggtcatattacctcaggactgaacactgatcattggatttagcaacttgcgtatacttgttgcccatggtgcagtaagttgaagagaaaagaaaagaacaaatgttgaatgtgaataactcttgcaagcacttttcttggaaatgagaagcttaaaattgggtaggagctgagaaagatacagggtcaagagagggtttttttaagatggagataagtgttataaatgggggagtaagcaccttttgtggaatctttaagcaacagtccagtacggctgtggagattacactggggagccatatgaattaaaggatttactgtatttacaggttctacaaagggaggcacaacataccttgcaggagtcacctggagggagcaccaagggagcaggctcaaccaagcagtggaggagccaagagaaagtagggacctgtggacaagcacccttattgggcatcaggatggggtttgccagcaaacgcaggagggaatattatgggtatgcttgaatgtcactaggccacagtcagggaagagcaagaagggggacttgtggcaagaccagccttgtcacattggtgcacctggtcatctgggaaaagtgcccacaagcctgtttctctggagatgttggggaatcagaaaaatgggaagtctttaaaagttgcaattcaagatgttatggtacatcatttttcttggcaatgacccattaagaaaaaaaaatgatgaggtgggaatggaaataattccaggagcaaagcctttgagtaggagcggggaacaggttctagtgcaaagtagggggttggccctaggagacggggaaacccaagtggatggagacctgctgcgttttgtagaatgatccattctgattccttctatataaaaacagaagccttcagctgagagtgagaagcagagaggaaatgttgagatttgaagaagagaagaatgtgaaatagtcatctaggaggaagggcaaacaaggagaccaggactgacgggaagggcaagcgctgctaaacagcttaatagtgaagtggctgaaatatgaacatcgggtgtctctggtgatgatttcctttttgtagttttctagttttccagatgtttccaaataagcatatattacttccacaattatctttttaaaactgttacagagatgtaaaaaataggacatattatatatgagaaacggacttaggattttggagaggtgagtggggatcagaaggacacaggaaaccttattctgtttgcctggaaaagcaaggcctgcaatagatgaagaggagatttctgcagaaatgtacagaatatttttgaccttttattcaggccaacagatttactccatttctaggtctgagccaccaattgtgtttcttggttgagtttgagagtttggtaggacagatggtggaaactgttcccaaattctgaaacgaggtaagctaccattctgggctgtgaagtggtgaggtgcactctcatccctgctgtgttttagtgggaagccttgtgaggtttcatcagggaatatgaaaacatctcttacaccagaacctcactaatcatgtaaagtttgcttccttgttaaatgattaaacgtaaacataagaaggtaaggtccttgatatctgttttcagagtgtcttagccactccctatttattatgtcttaacagatttgcctgatatatttttttaaatttcaaaccaaggtcactgttctgaaagggaatttcagagataatacattgttattaagggattgttgctaattccaaaacatattcaccctgttagaccctgtgatattagctcatatgtgcttttattttaatctgtgattaatggggtgatgagtagggaatttcagggcaacattttaaactaagttcttctcatctttctgtcaaaatctttattgggatcataaatctcagctctcagaagaggatgtgggaattagatcctatgaccgttaaaacaccacatggagctcagctgtgtggacgcaaagtaactctgcgtggggcgtgaggttgggtgtgtgtttggaaccctaagggtggccagttgaagatttcagagccaagggcagctgaagaagccaactcctgagttttacactagcacagaggaggatagatttttatcttgtggtggaaataatatttaacctagcaatatgtatgtatttggatgatgtcatactttcttcttgaaatatacaaacgctttgatgaatttctttcatctttaaactctttcataatgaatctcttacataataaatctctttaatatattttgcagtctttgtattcacacacaattgtaaattcttaaaagaagagcatatttattctaagttcatatattattactattgaaaacaaagacacaatagataaagagtattgcatgagccctgaattgaaaactatgcttggaagacactaacagaactatcaagtcagttgaaggaaaatatttgcagccaggcatttctttccctgaaataatatctatgcctttttagtagatggcctgaggtggcaaggtaagagcttcagttattgtaagtgaaaacctcaggatatggctgggcatggtagcacatgcctgtacgctgtactcaggatgctgaggcaggaggatctcttgaggccaggagtttgaagctataatgctctacgatcactcctgtgaataaccatggcactccagcctgggcagcatagtggagacttccatcttaaaaaaaaaaaaaggaaaatgtaaaaaagttccagatatgcttagaagcagatttttcaaatcccatggggatgggctcaaagaacaatatgatcaataaccagctgacaatgattaaagcatcatctttggaagatgataagctaaaggtaaagaatgtaaatcttattgcctaaaactctttgcagtcagccaacttaattgagtgtctttgagaaaattattgtctcatctatcatattggtgcaatgaaaataatacctacattgtacacatgtggaatttaaataagaaaatattttatatatctacatagctcctggatatagtacaagtttaaaacattgtagtttattatcaggttcctgagagatggcaccaatggcaaaacggtcaccaaagctatacctttagaattagaggataatcccaattttgtggacaacatgtgggtctaagcaccgtagcatctgtcagcctgtcctgtctccttttttaaagagccaaataggaattctgttgtgattgaaggactttctatccatccctgcaatcctagatgctttgggatgcctgcatagaagttgtgcacttttttcaaacactgatggaataaaacagtgtaattacctctctttttttcacacctagcatagaagactgatttcaggctttttgaggggattgggtggtggtcctcatctgaggatgaggctacataagtcatggaagacctcgccaatccaggtagggtacaactctaggccctgtgtggctggtcaaggagtcagtcactggctcatctctggcctcccaggaagctggagttgaaaaggatctcagggtgatcagatagagaactgcagaaggggagggtcaagccagcttctttcagatttattacagtcccctaaagcattaatgacctttttgcctaaagctaatacagggaaacttttagttcattgaccttcaaataattacagctgtttggaaagcttttggtcatagaaactggcagtacttccaaacatttcaaagatgtctatcatcttaatagcacctgtcctttaaccctgcacacacactccaaaaaggttaactaaaaaatacaacgattaattttatattctgatgttttcttatgagcacagctgtggccactttagtgtccagcaaagcatttctttggcgagtgatttagggaggggtggaaagtggaatggaaaaaatctctggaaagtctttaacactggggcgtattttctccctgtttcactccaaggaattcccactcatggaatctggcctatcataaagaactttttccttttgtacttgattcaacttagtaaatgatgtcaaccagctatggtgaatgatgagtgttcctcaaaccacagaacaatagacttcatcgttgaagctctaaaagagcaggaatctgtctgttccacttccctcctgctgggcaccatcttctagctcagctggagcctcttgttcataattcctcccctagagcaagtccttttttgctgaactctaggacacccggcatgcattcctcttcaactgcctttgttggcctgaatgctgaaacaacatcactgaactaacatctccttaagaagacatttgtcatcaaagaggcaaatcctcaatgaggacaaccctacctttaaaaaatcatgtctaaaccagcaaaatttaaaagattcagagctttttttaaaaatctttttaaaggtaggtttcaaaaaatcaatttgccccactaaattcatggtaactggcacaggagatggcatgagaatgagaagtattccttttagctatacccacaatggcctgtgttcttgtcctccaatcgtatcacaaattgtcaaatgttggtgcaccactgcatcccatatttcacacatctgattttgtcttaagtaattatagttcccaaagctcacaactctctttttctcaactatatttctcctggagtttgtcttcacacaaaggtctcttcccagttttcttcttctaataacagtgcacttatttttttctctctgctaggcatactgtcaccacatctgactttgttctttacagccactcagtcatggcccttacagttttgcttcactccatatataccatttcatttcccttcccactgccactccctagaacaggcagttctggcttttcacactaatgaggaaccacagatatgactgtgcaaacagaaactggaatgtgatcttgttcatcgaaggggaaacttacaattgttctgggacctttaaaaatattttgttgaaacattaaaaactcctttgttgtaggttataaatgcacaggaaattttttaaaaatagtacaactaataattatttagtatactgtaatttaaaacatcagaaatatgaagaaataaagtattttatttatttgtaaatatggagtatagtttgaatgaggttgccctcctcttctcattgtaggacttagtgtatggagtgagcatctttactatgccctgaaaaactgtcatactcctttctaagtttgaatcagcttccaactatctattctttgttttttcaatgtcatgaaatgcctctgagagttcctttaatgtgagtttttttttgccagtgtaacttttccaggatacctttatcctaaaatggatgaacacatccattttcttcatttatgttgttaagtttgccttccctaagttcctctggaatgtctcaaacagtggcaatattccctccgatagctatttcttccataactccattaatactcaacttgaatttcactttcagagtgtattagggttctccagagaaataatacacacacacacacacacacacacacacatacacacacagagacacaagcacgcacatgcacagatttattttatcttatatatgtgaagatttataatatacatgaagatgtatacgtgtatatatatgaatatttattttattatggaaattggcttacacaattacagaggctgcaaagtttcaccgtctacaacctggagaaccaagaaagccagtggagtaattcagccaaaagtccaagtccaaaggcctgagaaccacagtcccaatgtccaggtgcaagagaagacgaatatcccagctcaaacagagagtaaatttgcccttcctccaccttcttgttctattagatgatgcctgaccacatcggtgtgggtgatttgatctttactcagtttactgatttacatgctaatgtcttctgcagacaccctcacagacacaccggaaataatattttaccagctgcctgggcgttgcttatctcatccaagttgacgcataaaattaaccatcatatagagttctctatttttgtttctttgctgtactttgatctttgtgacacttcatctgttggccaattttctcttttgattagccatttttgaaaatgttatgcagttttatcactagaagaaaaggaagaaacacaactacatgctttgctgccagtgtaaggattgaataaaaaatgtgcagagaccaatcaccaatagacattgaaagaagtggcatgattggtcactgatcatatgcacatctggtaggcatgtagtgatttgtgggttgaagatctagaagtgaagtttctcctttatgcaattactcacagttaatatactatagcaactgaaatcagaactgtggttgttgggggactgatgtcattgaactgaactgtggcaactgaaatctttggaatactggagctgtgctaagcaaggatgggctgattattactaggacaattttctgtcttctatttttatgtttagtgcatctaattcaactcacatttatcaatccagattttcttccaagataactaatatcttagtcatctaaccaatcaaggacctcacaatagtttacatgtagttttcacctaaacctgggtataacgtgtttataaccatcttcctggtcctcctaagcacttatacttatatcctaatatttcatctctattaagctccaggggataataggtgttctttaaccctctgcaggattagagaattgaggctgctttgttactattgttcacaataaacttccacaggaagtgagttagaagactctagacctttttaaatcctgaacttcctgggcatcttgtctgagtgatatcttcagtaaagtgtatcctaagagctgtctttgtgtttcctgggccttcttcacaagcttgctctccaaatagctccacatctgggagactgactgctgagctcctaagttgaaacacacagagttttcaaacatgttgctttgtaggcgacaccgacagaggtacttccacctgacgttctatctgctgtctttcaaatcagagtctggaaagagtaatcctgccttgcttatttagacaaggatacctctctctttggcactgctatagagagatgtcaacgtctcttattcacagtctccttcagtcactgggaaataggacaatatccctaaatttttcttttatataacacaaaactacctcaaaagaataagagataaacggtcagaggcttttttttgtctttttattctgagcccccaaagaaaaacctatagtgtcaagctggcagaattttgtaactatcttgaccaatggagtataatcacgtaatgccatgtgccttccaaggctagatgataagaacaccttgcactttggccttgcctacttaggacatttgttcctaaaacccagctgctagacatgctatgaggaaggacagaaaaacccatgtgcagaggctgtgcagagccaatttggccagtagtccatctgaggtcccagccaataatcagcatcaactaccagaggtgcgagtgaaaatgcaagcagatgattcctgctcccagctcttgtcacccctaatctttgagtctgccaagcaaatgcccccgatgtggcatagcagacatataagcatctgccctgcatccagactaaattcctgacccataaaatctgtgaatctgtgaatacaaatgttgttgtttccctttctttctttctttctttctttctttctttctttctttctttctttctttctttcttttctttctccttccttccttcatttctttctttcttttcctttttctttctttctttcctttctttcttcctttctttcctgctttctttttctttcgttcttctctctctctctctttctttctttctttctttcttgtttttttttttttttttgagaaagagttgctctgtaacccaggctggagtgcagtgacatgatctcgactcactgcaacctccacctcccaggttcaagtgattcttgtgcctcagcttcccaagtagctgggactacaggtgtgcatcaccacaccctgctaattttttgtatttttagtagagatggggttttgccatgttgcccaggctggtctcgaatgacctcaggcaatccacctgccttggcctcccaaagtgctaggattacaggtgtgagccaccacacctggcccaaatgttgttatttttaatacaattgtatgccactgagatcgaggtagttgttatgcaacaattgcagctggaacaagaacacttgaacctgtaatatacttgaaatcatatgagctatgagatcagtaaattatctttccttatctatactttctaacataaccacaatggatatggataatttgtgaagtcaataagaacatagtgaatgattgattccatgtggatgggagagggaagtgtctgcaattttgcatgtgtttcacatccttagatgctagtgagaagaggctgtaatgcattaattgttccccttatcaaatccatataatgatagcactggtatcacattacctttacttgtgaacgtgttgcattagaaatttctttagaagtagttcccaaactgtaacagaatgtgatgtgataatttcctaccctcaccaagtaatgccaagatgtagaagtctctttactctttgtagccaaatggttaatcctgggagagtggcatatttgaattcttttttttgttttgctagtcttttttttttttttttgagacagggtctcattctgtcacccaggctggagtgcagtggcataatcacggctcactgaagactcgaccttccaggctcaggtgatcttcccacctcagcctaatagctgggactatgggtgtgcaccatgaagcctggctaattttttgcagtttttcatagagatggtgtttctccatttcgcccaggctggtctcaaactcctgggctcaagcagtctacccatttctgcctcccaaagtgggccatctttcatttctccatctcagtctgagtctgtgcttgaactgatgtacttagagattaaggacctttctgagcaaagtcaaatgagccatccagatggttctggtcttcagaaggatcagaggtagtctgaatagcaagtaaggatcaactcaaccaccagttcaccaaataaagccaaaacattgacatcaaggaataagccattggctgacataagtacgtgctccagcaattgcttgtttcaactatttgaattcaacacattattgccactaggcaattttaattaattaatttatctttagcaagtgaatgtaacttatttttccatcttcttggggagaggggaaagcatttgccattttcagagtaaattggtctgggttagaagggagcccccatagcatcagcagaaagcaaattctatagtcaagtttcacaaccattaaattttaagattatattctgacggtacttcttagaaaaaagaaagaagtaaaatttcacctatgagataaattagaggctaaattgctacttcttgtcttcttgtaatctaaaagaagagactctcaaaaaatctttaaaaaaaagttgtcttgatcatttttgcatgaaatagctggagattagaggaagaaatggcaaggcacttggaggaatagaaaaatgaaaataaccaaaattacatctttgttacatgaggggccaaaaccagaaaacttcatacaaggttttgtgtcttggcagcaagtattgcccctacaccatagaatgtcattgcaatcatatggtatcaataacaaacgaattatggccagaatgtctaagatctgttcttctagactttagatgtgaattcctcttctcaaaaatctcaaatgcatgttcattctgaactctggctgttttttgacctttttgctgacctgaaagggttatatagctagagtaagactgaaactagttcctgaaacatccctcagagtggccaaaacattttctttatgactgtgaaacaattccagctcacgttgctttctgtaatacagctttctagactactgaattctacagtattttccagcataatccttttcagtttctgtctcaagacttgagttaggctctttcaatagggcctaaacacactaccaattgatagcattatgctgagctgaattatgctgaattagactttggtaccagaaaccagaaatgggagcccatatctattatctgtctcatttttagtggtctttgtggtctgcatggtcaagacataaaagccttaactaggacggtaagaatggagaaaagaaaatcatgagaggacttgctgacattctaatagtgggttgtaggggaagaagaagcaaagctaagacttctgggtaactggactaacgctatgatgcctaactgagaagaaggataacttagttttggatggttacaccctaaactaaaaaaatgtattaaagtaagacattttaaaactttatcataatatcttgatttgattttctaaagaattctgcattaaacatcttaatgatgaattactaaaggaatttctgttagtaagagaaaaagcctgactactttcactgacagtattcagtactgttctggttttatttccagtgcaatatgacaagaaaaataagatatacatattaaaattaaacataagttacacagccactgatataattttcagaaaatgaaataaaaaattaataaaaatgagttaagaggacagatagaaaacaaaataaactcaaaagaattctcatgaatcagacttaatcaaattgaatttgtaaaagcagagagtttctatttacactgaaaactctaaaatatcttaatatacacttagaaaaagtaagttttccctatgtggataaatttacagaatgttacttagactgtaagacctagctaatggagagacatcatctgactagatgagaatattcagtattatttatatgttgattatctcagccttctccaaattaattatgtttaataaaattttaatcaaattattaagtttttttggaagttgagtgcttgactccaaatttcttctggaagaaaaatgtgtatgaataccttatatttgataagaatgtggaaaggtttgctctattatatataaaaaataaagctaatcaaaacaaaattaaaggacaaactatattataaatattcgttaaaataattataaagactgtctacaatgggcagggcatggtggctcacgcctgtaatcccagcactttggaagccagatcacgaggtcaggagatcaagaccatcctggctaacatggtgataccctgtctccactaaaactacaaaaaaattagcagggcatggtggcaggcgcctgtagtcccagctactcgggaggctgagacaggagaatgctgtgaacccaggaggcggagcttgcagtgagcacagatcacaccactgcactccagccttggcaacagagtgagattctgtctcaaaaaaaaaaaaaaaaaagtctacaatggaaaattagacaaagcatttgaacagacaagtcacaaaaaaaggaaagaaaaataggcccctcaaatgaaaatcttctaaattttcttccaacaacaaagacgtgaaacaggaaattagggtttgatcactgcttctttgttttgttatggttgtttctctttcacatataagaggtttagcaatttgacacccagtgtatttcagacagaaatgtcacttatgtctgtggtaatgtaattttgggggaacattgtactgtatctatagtttaaagtgctcttagtttttgacctagcaattccacctgtagaattttttttctacaaaatagacatataaaaatacaaagatacgccaggtgtggtggcgcacgcctgtaatcccagcactttgggaggctgaggcgggcagatcacctgaggtcgggagttcgagatcagcctgaccaacacggagaaaccctgtctctactaaaaatacaaaaaattagccaggcgtggtggtggatgcctgtaattccagctactcgggaggctgagacagaattgctcaaactcaggaggcagaggttgcggtgagctgagatcatgccattgcactccagcctgggcaataagcgcgaaactctgtctcaaaaaaaaaatatatatatataaatatatatatatatacacatacatatatatacacacatacatatatatatatatacatacatatatataaacatacatggcataatattcactgctgtagagtgtacaatagcaaaaatttgaaactaacttgtgtaagttataatctatttcagttatgagtggtagaaaacccactgtaactcaaacaagatgaatattcatttctctctcttgtcaaagcccagataggcagtctaaggtatatataacaaatgattatatcagggtccaggctccttctgtcttgtggtcactgtatgaagctcaacctcaaggtaggggatggcagtatgtgcttataggcagcactgtggaagggagatacaaaagcaaagtgtgtaggcattcatctctttaggaaggatcttggagtctgccatgccatacttctacctacatcctgttattaagaacttagtaacatggttgcacctttattctaggcagccatctgcctagctaaaaatgtggagggtatattgccatataagaaagggagaatgaattttagcaacaactagtggtttttgccatgtgactgaatgaccaacagggaaatatattccaggacatcatacaattaaatactatgcagttgttacagactcaggcagctctacattcttgcagaacagggtgtttattaatcatttaaaaaaatgcatgcaaaaagcccacatatgttcaccgaaagacacataaaaatgtttattcctccattatttgtaataacccaaattttaaaatgccacaaatgttcaccaaaagtacaatgggtaagtaaactgtatcatatttatctagtaaaatattatactataggttatgggaatgaacaaagtgttgccatacataataatatggatgactcctaatgttgagccaaagaagagaggcatagaacatataatttacaatcccacttatataaagtccaaaaacagataaaattaacctacaatgctagaaagcagaataaagtcaaggaatggtcgtggcaggaaaggagaatgaaggagacttccgggggtctagtaatgttctacttatctttattatttttttttaattgttatactttaaattctagggtacatgtgcacaaagtgcaggtttgttacataggtatatatgtgccatgttggtttgctgcacccatcaactcatcatttacattaggtatttctcctaatgctatccctccccaagccccccaccccccagtaggccccagtgtgtgatgttccctgtcctgtgtccatgtgttctcgttgttcaactcctacctatgagtgagaacacggcggtgtttggttttctgtccttgtgatagtttgcttagaatgagatttccagcttcatccatgtccctgcaaaggacatgaactcattcttttttatggctgcatagtattccatggaaaatatgtgccatattttcttaatccagtctatcattgatggacatttgggttggttccaagtctttgctattgtgaatagtgccacagtaagcatacatgtgcatgtgcctttatggtagcatgatttataatcctttgggtgtatacccagtaatgggattgctgggtcaaatggtatttctagttctagatacttgaggaatcgccgtactgtcttccacaatggttgaactaatttacacttccaccagcagtgtaaaagcattcccatttctccacattctctccagcatctgttgtttcctggctttttaatgattgccattctaactggcgtgagatggtatcccattgtggttttgatttgcgtttctctgatgaccagtgatgatgagcatttttttcataagtctgttggatgcataaatgtcttcttttgaaaagtgtctgttcatattctttgctcactttttgatgggattgtttgtttttttcttgtaaatttgtttaagttctttgtagattctagatattaacccattgtcagatgggtagattgcaaagattttctcccattctgtaggttgcctgttcactctgatgatagtttcttttgctgtgcagaagaagctctatttatcccatttgtctattttggcttttgttgccattgcttttggtgttttagtcatgaagtttttgcccatgcctacgtcctgaatggtattgcctaggttttcttctagggtttttatggtgttaggtcttacatttacgtctttaatccatcttgagatattttttgtatacagtgtaaggaagggatccagtttcagctttctacatatggctagccgattttcccagcaccatttattaaatagggaatcctttccccatttcttgtttttctcaggtttgtcaaagatcagatgattgtagatgtgtggtgttatttctgaggcctctgttctgttccattggcctatatatctgttttggtaccaataccatgctgctttggttactgtagccttgtagtatagtttgaagtcaggtagcatgatgcctccagctttgttctttttgcttaggattgtcttggctatgtgggctctttattggttccatatgaactttaaagtagttttttccaattctgtgaagaaagtcagtggtagcttgatggggatagcattgaatctataaattattttgggcagtatggccattttcacgatattgattcttcctatccatgagcatggaatgttccatttgtttgtgtcctcttttattttgttgagcagtggtttgtagttctctttgaagaggtccttcatgtctcttgtaagttgtattcctaggtattttattactttgtagtaattatgaatgggagttcacttatgatttggctctctgtttgtctattattggtgtataggaatgcttgtgatttttgcgcattgattttgtatcctgagagtttgctgaagttgcttatcagcttaaggtgattttgggctgagatgatggggttttctaaatatacaatcatgtcatctgcaaacagagacaatttgacttcctcttttcccgattaggaaaagaggtaatgttctatttcttgaactgagtgctgttttttggggcatattcactttgtaaaaattcatcattatacacttgtgatttgtgcaatttggagtatggatgttacacttcagtaagatttttttaaagcatagttatatattgagcatacatgaaaaatctggaagtgtatatgccatagcaaattaggaatctgcacatttttttctgcaaagggccagttactgtatatttcacgctttgtaacagcagagccgtacagtctctgtcacaactacttaatttcactgttgttatgtgaaagccaacatagacaatgcataaataaatgggttctactaaaatttatttacaaaaacagttgaaagactgtagttttctagctcctatactgaattgttcatagtgcttactgctgggactagggttgaggggaagaatgccgtttagtctttagaagtttctaaaatgtctcatattttaaagttagcagttaatttaaagcacctacctttactaaaagcttattgttacaaatgttttcctgaaacaacaacaacaaaaacactggatctaagtgcaatcagtgagcctcaaggtaatgtaataaaatacaaatccggcacaagttaggcagcaaagtattcagcatattatctgtcacctaaaatgtcccaaagagtatagaatattttcttgcaaattaataataaatatataacatctgttaacaataaaaagccctattcaccaatgtgctttgtctataatagtaattttccattttaaaaacaggtattggccatgacacccatagtgtcaactttccatgttgtaacaagaaagtcattgttttactcttcatatggggtatatgttttgatcaagatgtaaacataccagtagcataaatgtgcatatgcaaaagaaaactatgattcatggactaaaatagcattcacaaataagctggcattgcttttgaactttgctaagataagagttcaattgttttgccttagcaataggaaaacaaatgtaagccagagaccatggcttctaaggatttaagatcctcttgtagacccaagatatatacaggcaataggtcactgagcttagacaggctgtgcctttttttgtgatacgtatatgcaaatgctataaaaatgaaaaaaatgttgcttttcaaataaatatgatagataagacttggagaaggacagaggaaaaccagactctcaagactggggcaacaccaggaaaaacagagaacaaacttccaaaggagcatgagttgctcaaaggacagcaaaatccgtttgctttgagggaaagccagtttaaagagcatgcaatttctcctgagttcaatgggaagacagtgggagattgagcaaggaattaatgagctcttaggaagactaattttaagactatgtgtacagctcatgaccttttcccccactccctttcaaataccaagttctactattacaaaaattcaggccgggatctgaggctggcccaggagcctagagtctccaatcagggtaatgacagtatatatacctagaaagggcaagtagtttactttccccatctgaacgagcaatgcttttagcaaaactgtggttggaaaaggcaatagttcatgctaatgctgttttttgattgtttgttttaatgataatcttctatctatatgatttctaccaacatatctgacaaaattccatttaagctcaaatcttaacaatgcccgacagaaggtcaaatctttatcaaacacatttcttaagtaccacagttttttggcagtggcccattcttttaaccccgttaaactttgactctgtttccaggcttctggaccttgtgaacagtgtcagaactagacaaagtctttctgaagcttccctatcctacaggagccttgctttgcgttttttttctttatttttttgttttttggattgccctgtgagagtacaagaaggctaagccagctgttatgacactgatgtttgaccctaaactacttaaaatgcctatcattcctaatatcatgaatcaggcaaaatctaggtcaagacgtttttgggagaaggagaatatgagaggatcttgttctctcacattaatagagtattatttttccttggaagatagcagggtaaatatgagagtggaaaataagaccctcaatctatgctgatgggggatggagaaaagcatggcaacaataaacttcagtaaagaggcaacttctgcagagatggactgtactaaaatgaactacctttggcaaagagacatgataggctccattgtagctggggttaagggagctgagcacctgagtgtttttttccatggcatactagttttttaaatgttgaaaaaagaaagttgtttaatcttcagaaaggtctttggaaagatgagatgatgggaatacatacaaattagtttactctcttgagagaccataactaagccatttattttggtcagcttctggccttacatgaccacggtttgggagcataagggaatggttcataattttatgggatcctagctttcaccatagctcctactcagtctctggagctcctgctatctccatccccttatcctcaggctctttgagggctattatttattagataaaacatcttaccattgaagttagaattatttacatgttatatatttttatctttttacttttaacctacctataaaattatatttgaagtgatttttatgtagacagcatatacttgagtcacatattttatctactttgacaatcttttcttttaattagcatgtttagactatttacatttaatgtaatactgagtttttaaaaattaggcctgaaattttattttatttttgttagctacctctgttttttcccatgttttatcttttctgccttgttttaggttacataaattatttttttttggtgttcgattttatttatgtgctttctattatatctccatatagacttcttagtggctaatctaggcattacagtatacatacttaacttttcaccctctacttaaaatcaatattttattgcatcaagtggaatatagacgagtacctaaaatacaggtcttacccttcctcttttatgttgtagttgtcctgtgtattttcatattcattgaaaataccatcagataatataaaaagttttgcttttaatcatcaaacatatttggactcaagaggagaaaaatagtctattggagttacccatttatttgccatgtctattgctctttcttcattctcaaagtttcaagttttcttctggtataattttccatctgagaacatttctataggaattcttttggtgtaggtctactagcaaaaaaaactcttttagttttatttcagcagagaatgtctttgcttaatttttattccagaaagatatatttgctgcacgtagaattctaaattgattgtccttttctttcagcacttgaaaactgttgtctcgctttctttcctagtttctccatgtagtttttgatgacaaatccagttattcaaactgttgtttctctatatgtaatgccttgtctccggctactttcaaggtattttctttacatttggttcacagaatttgattgttttatggttttaagatatatcctgtttggtgtttacttagctttttgagtagatagatttaaatctttcaccaaatatgaaaacttttcttcaaatatattttcttcaaatactcttcctatactgcatctttctcctttatttctagttccttagtgacatgaacactagatattttggtattgtcactcaggtccctaaggctctactaattttttgtttttaatattgttctccctgctaaattatcaatgaataattccattggtctgtcttcaagttaactgactctttcctctgttctctctatttaactactgagtgtatctagtgaatcttttcaggttatttttagttctaaaattttccttcggttcttttctatatcctttacttatttcctcagactttctatttatgcagtcattccaagaatgtttgactttatattccggagtatttttataacaatgcattaaaggctgcattaaagtctttgtcagtaaattctaacatctgtgtcattttagcactagcagctattgatttttttccatgtatgttgagatttttctgtttcttcatatgctgaataattttggattgtatcctgtataattttgaaaattataacataaaagtcagggcatttcttttattaggcaatcagtccagttagattcgtgttgcaaggtccaactagccttctgtgggtggtgatttcaatgtctgttctatttttaaagactttgactttgtagtgctatttggattggtattggatgtgtgtcaccaagcagtcagtctgagacctgggtagtggtaatcccttagttcaattcgaaaagttattggtatgctgtttgggcctggttccatgcatgcacagcttaggagtgagcccaggagttcgtaagcaaatttatagagttcatttacccaaattcctctctctccataatctgtctctactttttgattccctaaagttcctttttttagtcctccagcagtaaagcccgagttttatttgccctgctctgctgcactcttcccacagatacacccatatttgggtgaaaagtcagcaggacggagagggaaaaaagcaacaggagtccatcccattctcttgagacaacaggttcactgatcacagagaaaatttcttttccctcagagtttaggcaccttcaggtctgtgctgtcaccaatatccttactgctactgccatggagcagggattcaagataaccaaaggaagacaaaggtaaagaaaaataagaagttttctccactctctctgagcactcaaagattgtttttttcacatcttgagccagaactagaagacttccattgctctctctctttctatatcaatacccacttctgggattcaggcttccttggacccaggctggcagatggagagcaaaaaatggtaagagagcaaaaatttttttggggggcaaaaaatgatcagctcattataggttctgcaatacttctaattatagtcatcttctccagtctacctgctcttacttactttcagaattttcatatagctgctccaggcattctttatgggttttatgggtgcattcggttagagaaataggatgtacttaaactgtttaatccaatatttttaaaatatcacattacacagcagaaaaacaatgaagttaacaaggttgcatatcaggtttagttgcaagtaaacatttgacatattcattttaagtgctaaaaactattctaatatcttgccttctatatggtaagaagtgtcaagagccagatcttgattccctagctccatatggcagtagaattcccaataaaagccagaatttattatttattagctaggttagaattaggtgcttgcaaaaccattaagagcctgaactggcaaaatatattagttgtaggtttcgtgctacagagacagaggtactgccatccagagtcagtgacctgcagaaatctgctgcagattctataactccatcatccagaaaggtgaatggcaggagaatgcagaaactactgcaaacattcatgcctgggagacccacacttacacccactgtcatagagatggcttctgctttgtctgccttctaaatcttgtggcagggtgtctccttggtggaaccccacataaattcaaaaccctactggcaagggagtctagggagtgtagctcccaggcttctagtcccagaaatacaagagaactgaagggggcatgaagaatactgagtgtctgcagttagtatttagcaaagtaataatgtttagttctgttggaaaacatgtttttcatctggcaagtcaaggctaagttggtgttcatccttgtgaatttcattagtcataacacatatgataatcatatagatgcagttttaagttctgattttacacaaggtctgaggttagtaaaaacaaacaataactagctaaatcaaaattaatgttcactgtaaaaaatttaataatcacatatgctaggatatttttgattaccagaaggagatgtggcattccgttggtgttaaatgacctgtctgccacaagttctggtgcagaaaatcattaaagctcagagactctatagttggaataaagtttctggaaaacattgggacacatctgaactcacgataaattgagctaatgtggatatttgtaataaatatgcttatttaaaagagattaaaaaatagaatatacccagaaatcatagtgaaatatgcttatcatagaattaccataaggagagcacgatgcaccaggcatggtggctcacgcctgtaatctcagcactttgggaggctgaggtgggcggatcatgaagtcaggaaatcgagaccatcctggccaacatggtgaaaccctatctctactaaaaatacaaaaatcagctaggtgtggtggtgcgtgcctgtaatcccagctacttgggaggctgtggcacgagaatcacttgaacccaggaggcagaggttgcagtgagccaagattgcaccactgcactccagcctggcaaatgagcaagattccatctaaaaaaggaaaaaaaaaaaaaaaaagaaaagcacaatgcacgggtttttgtatgaataaacaaagtatattttttgagttttaaaaatctgagcaaaaaatgaaaaaatactttaacttataaaaattttattcctacagtttcacacaaatgttatggtcttgctttgaataatactgatttcacacttgaatttacccattttaaagctattttaaattaaaaataaatctttaaatactttctcagtcatccaaagtagaagagtacctcattttttatcatatgagagagttattgcaacatttagtatagagtgaaagagctaggttaagaaaaaagaaaaagagcatatgctgaggatgcattttgaagtaaaaataaaatatctgttcgagaaaggttaatgctgaagataaaagagtgatttcacttactttatcagaacagtagaaaataacatttacaagcagtgaagactatattactaaatttattggctttttaaaacttaagcaagatgaaataagatttatgtagctatagaacaaaataaatgaagtaatggccaatatgtgtacaaattttagatttggtgcaaatatgttcccagtttataattccaacaaaactacacaaagttccacattatctattacattccaacttaactgatgttggcagtttgcttatctgacatgatcttcacagttaaattgctttatgtcttggagtaatttcatacagtttgccctagccagtctctacagttaagtgttgaatgatcattttctgctctgtattactaaaagactaaatgcactgtactttgatcaaagattctaatggtgattacatagaaattgttactgaagcagaaaaagcctcaaaaattcaatgtatcaaccaagacagtactaactaaacctgatctataaaaaagtttctcaggttgacatgtcatatttcacattttgaacatcagcttatgtacttaaacacatgttaccgtggttacagtttggaaatggagttgacacagttgctgggatagcaaaatgaaaattaatatgctaatgtatggagataatctcatttaaaacaacatcttttcgatgtgcttaactggagctatttccaagatttgtgctcctttagttttccctatgaagagatctaccaatgtcatacctacatgttgcgtggtctgcctctactcttccaatttcactggagggtatgaatctaacaagtgttcaggccatgaaattcagagttgaagggactgaatcccaaaactaatagttcttatgtagcacaccaataaatgtaggtagttatttcatcatcatcattattctcctaagaattattggaacttatggacaaaatctagcacgggccccatctgtggtgtcactggcttcacctgttcagaatctttagcattatgccctttgatttgctgctgaaaccaaagactgtcttcctcaatttgtagaacctggtctacaggtgggcagaacctgtaatcttacaccataggattttgcagcctcagcagtcccagctctgactcaggcctaccagtttcttgaaatctctgttacatttgcggtgacaaaggaaaaaacaatcaaataaatgtttctcaaaaatattagaattaatatttcagctggagaaacttttttttccatttaatactggggcttttgtgagccagatgttcacctgtctgacaactcgtccaagaaggcatgtaattcacttatccaacattagacagcaaatagataatcttgagtccagagctcttaattcaaagatctcgtgatctgcccatctctcatagtggttttcaagtcttgtttccatttgactgacatcttatatttaaatccatcaaaagaggcactagggtttccctttctaccttcaaaaattctaagactttctttttatgcacccatgacaactctccacaactagtcacaattccaatgaggaatgctattctatcacataaggatgcttctaattgtgcttgtaatagggcctggggagtgtctggaatgtgtgtgtaaagcctacaattatccagtcatcatggaattgctgtggttggctctcagtctcagcacataaagaccttcactctgtaaactattttttgctaaattcctaaatgacctgtgcattccctcacccttttcctctgtacttttagaaagctctggagaggtcatagaattgtcttcaatgaaaatagagcctctcagaaagaaagtaattatatgatcagaggagttggcacttgcagatgtttaccttttaatatcaccttcacagtgataaagaacccacgggttcttctaaatttccagaccaaaattaagctgtagtcatggcctgcattcatatcttttttctaactttaatgggaatgccttcaatgttttattgttaaggtttatattgaatgttggcttaagaatgtttattattaaggaaagagctcttcattcttagactatgaagtttataaaaggaatggatgttttatcaaaaccctgtggagatcttgattgactgacacattctattaattttccaatcttaaactattcttgtattctaggaaaatctttacatggtcattgtttcattcttttaatatgcagtctcttttctgtcctttgtagtagctttatgaagtaagaagaaaacttccatatttttatattctgcaacattttaaacactggaatttttatataaacgttaaagacttcaacactaactccaatgttggtgtattggcagtgctttttgttattaatcatcaaatttatatttttgtccttccttattattctcccatcttctctgcctaattcccctaacatttactttttctccctctattgtttatttatgcctcagtctcaggcttttattttaagagaacccaggctaaaacagcatcttttaacctagaagaaggttggatatttattcattgaaaagaataaaccagatagtttggacctgtagaccccagccagcgctgaaagaaaagtgagtttctacatggaaaaaaaggagctttaaattaaagtcaacatgacaaatggtaaaacttgcaggtcctcttctttgtaggtgccagaatctattatctaggtttctatactgtatacagaagattgaagaatgtatttttttattgaagattcctttctgactggctagaagaaaaatgcccatagatatccacattgtaggttcccaaaatacttgtcagatcctgctcagttaccctacagtgacaaccactaattaacaagtcgtatccttgcacattaaactttcaaacagttttttagtgcagctcttaagtagaaattggcagttacaggctgggtgtggtggttcatgtctgtattcccagcactttgagaagccaaggcaggtggattgcctgagctcaggagtttgagaccagcctgggcaacatagcaaaaccctatctctacaaaaaatacaaaaattatccaggcatagtggtctgcacctgcggtcacagctgcttgggaggctggggtgggaggatggcttgaacccgtgaagcagaggttgcagtaagccaagattctccactgcactccagcctgaatgacagagtgagacccagcctcaaaagaaagaaaaaaatataaaaaaaatctaaatgacgagttaatgggtgcagcacaccaacatggcacatgtatacacatgtaacaaacctgcatgttgtgcacatgtaccctaaaacttaaagtataataacaataaaatttaaaaaaagttaactcaaaaaaaatcagcaggtacagactgccaagtaggatcagaaaacattaatatgaaaaacagagctgaaaaccaatgaggaaataggaaaaattaatatagagggcataggcaaaacaagatgcccatgaagagataatggcagataaaataatatccttaaaggtaagaatatcctgaatcttgccaggagcaatggttcacgcctgtaatcccagcactttgggaggccaaggcaggcagatcatgaggtcaggagatcaagaccatcctggctaacgcagtgaaaccctgtctctactaaaaatacaaaaaaattagctgggcatggtggtgggtgcctgtagtcccagctactcgggaggctgaggcaggagaatggcgtgaacccaggaggtggagcttgcagtgagccaagattgtgccactgcactccagcctgggcaacagagcaagactctgtctcaaaaaaaaaaaaaaaaaaaaaatcctgaatccatgaaacaagacattgatgctttatgtatttaagagaaaatcagaagatgcataagaggttttggaaataaaaatgtaataccaagagcaatatagaaaatgtgaataaggatagtggattgaaaatagagatgggagagggagaattatggaaatgagaatcagggagatgtggtgaaacaaggaagagagaaagggagaaaacagaggggtgtagagagagtgaaggggcagatggagagagagaagggacagcatggagagtggtaatgagagtaaagctaagaggagagagggaggatatcaagtaaagtggagaaataaagacagaaacagatgtgggggagatgtttcatggattcaggaaattagagacaagaagaggaagggaaccagtggtgagagaaaaagagagagggaaacaaaaggagaaaatagtggaaaaaaacaaaaagagaaaaatgaataagggcaaaaacataggtcaaaccaggtagaaagcaaagagagagattgaaataaagtattaaaagagagaggcatggagtgcagatataccttagacatattgatttcaattcctgtggatatacacccagaagtgaaactgctggctcctatggaagttctatgttcagtttttctgaggaaactcggtaccattttccatggtggttgtaccagtttacattcctaccaactgtgtacaaggatttcctttactcacatcctcaccaacggttatctttcatctttattataaaagccattctaacaggtgtgaggggatatctcatgtgggtttaatttgcatttctctaaagattagtgatgctgaacatttttttatgaactcaccggtcatttttatgtctttcttttagaaacgtctgttcaggtcctttgcccatttttaaattggattatttgttttcttgctattgtgttgtttgtgttctttatatattttggatattagtccctcatcaaatgtatggtttgaaaatattttctctgttaatcgtttttttttttttttctgtaagagccttctaagtttgatgcaatctcatttgtctatttttgcttttgctgcctgtgctttcagggtcatctccaaaaaatccttgcctagaccaatgtcatggagttttcctcctatgttttcttctagcagttctttaatttcaggtattatgtttaaatatctaatccatttcgagttaatttttttctacgatgtgagatcaggatctaattttattcctctacatgtggatatccaatttccccagcacaacttagtttttaaaattgtcctttccctattgtgtgttcttgtcatttttgtagaaaatacagaattatctacaatagccaagaagtggaagcaacccaagtgtccaccaaacgacagatggataaagaaaatgaggtatatacacacaatgaaatattatttggcctgcaaaaagaaagaactcctgccatttgcaacaatatggatcaacctggaagacatattcacttatgttaagtgaaataagcaggcacaagaagacaaatattgcacaattacactatatggggaaatctaaataactcatagaagtagagagtagaataatgactaccagaggcttggggagaaaaaaagggagaaaaatgagttgttggtcaaagcttacaaagttttagtcagacaggagaaataaatttttaaatctattgcacagctgggtgactgtagtcaataacaatgtattattcatctccaaataagtaagatggcatatttcaaaataaacaagatgctgaatttcaaacatctcaacacaaagagttaagtgagatgatgaatatgttaacttcattttatcattccaccttgtacacatattacatgaatgtatacagctgtgatttgtcaattttttaaaaatttaaaagagaaagagtcatggaattagagtaagaaaaaccaaaagaagaaggataaatcaaagagagtgaagaaagaggaagagaaagaagagaaaacagagaaagggagaaacagattaagggagagaaagtgaatacagcgaggaagaaaattttacatatatacatacactcatatacattaatttatgcatactagttggctatatatatatttgtgcattcttttctatacgtagaagattggaagatgaagctgagaaaacatctcagcatgcacaattaaaaaaaaaatgaatgaaaatagaagaaacttaagattatgagagcaacccatgaagtccaacatctgaaaaatgagagttacagaagaaaaaatggacaaaagagacatggagatcaaattatcaaagcaattatacattttcccataattgaatgacatgactttgcaggttaaaaggctcaccaactgtctgttatgataattaaaatatgactccacaaccagtaatggattaaatatatccctaaatcttctagtgagataaaagaggtcaaatacaaaggaaataggctttgaactcctttacagcaagtttggaaataagaaaacaaggaatgaatgtttgcaaaattttaacaactaatcgtctccaactttgaattctatacacagccattggaccaaacaagggtgagtgtagagtaataatatttagagacatgcatattttggaacatttgccttttatgcagtttttattagaaagtgactggacaataaaatgcactaagactggtgaatgaacaaagaccaagaaagatacagggaatgaaaaacagtaactaggcaacaggaatttccaaaatgtgaacaatgggaaagcccaggatattagctgtctaacattgggttgtggtcaactctgtcccctcaaccttgaaaacatttttaaaaaattatatatgaatttaatctatcaaatagaatgcaaaaaaacgatgtgtgaacatttcaaaagatttctatttctctagtgagcacaaaaatacctatcctgcattcttctcagttgccataaaatattgaatactgtgacttttcctacaagtgaagtgattaactgtcttgtagagcctttttacttcttcatttaaaaaaaaaaatcttttaggttcaggagtatataagcaggtttgttatacaggcaaactgtgtgtcattggggctgggcatacagattgtttcatcactcaggtaataagcgtagtaactgatacgtaatttttctgattctctccctcttcccactcttcacccttaagcaggccccggtgtctgttgttcccctctatgtgtccatgtgttcttattgtttagctaccacttatataacttttatgtgcagtttcttttgcctttagccttagattccacttatttctactcgtttaggtcagcacgtcttccctccgtcccctgcagggaagttgtttcatcatttgcattacagttagatgctctcgtcacagtctgtattcctttctgagatccccaaggtcctaaattgtttttaaaatattgcagatattagtgttcactctttgggttataaagttctatggattttgaaaaatatataaggttttatgtccaccattgtaatatcatacataaaattcccccaaatcatctgtgcttcatcctatcctggaacctctggcaactactggtcattttactgcctctatagttttgccttttccagaatgccctgtaattggatcatacaatatacacagccttttcatttttccttcttttcttttttttagggacaaaatggcagcagccagcctgaccattcccttcccatcatgagggagagggctgtggtatggacagcagcagctgactggccacaggtgcagccactgccatccagccccgactcattcctagaataagaaccaccagactgccctctgacacctgcctcagcggtccccaccactcctcaaaccctgtcaccgtccacagacaagccctggaggggtggggaaaaggtggggctctggggcttctttttcagagatgggaggtgcacaggctggggaggaacccccagagtatgcaatcttttaggactggcttctttcacttagcagtatgcatttaagattttttattgttgttgtttggggttttgttgttgctgttgttgttcttgttgtttcttttggttgttgttgttgttgttttgagacagggtctcactctatcgcccaggctgaagtgcagtggtgcaattaggctcactgcaacttctacctcccaagtttaagccattctcgtgcctcaacctccacaggagctgggattataggtgcgcaccaccatgcctggctacatttaaggtttatacatatatatattttgtgtgtgtgtgtgtgtgtgtgtggcttgatagcttactttttaacttctgaatagtatttcattgtatggatatgccatagtttgtttattcattcacctgttgaagtttttggtgattatgaataaggctgctataaacataagcatgcagggttttgtacagacaaaagtttttaactcaattgtttaattacctaggagcgtaattgtgggactggattgtaacattgtctttagcattgtcagaaactgctaaactgtcttctgaggtttcaatgttattttacatttctaatagcaatgaatgagagttccttttgctctccatctttgccagtagctggtagtgccagttttttgtttttattttagccattctaatgggtgtgtagtggtatttcattattgtttaatttgcaattttctaatgacgtataatgttgagcatcttttcacacgtttgtctgcctctaaatgtcttctttggtaaggtttctgttcagattttttgcctatttcttaattaggttgcttattttctttgttgagtttcaagagttgtttatatgttttacaaacaaattatttatcagataagggttttgtatatatttccttctacttcatgccttgtcttttgatggtcttaacattgcctctcacagagcaaaacacttaaattttaataaagacaactatttttttcccatggatggtggttttgtgttacatttaaaaactcaccaaacccaaggtctcctcgattttctcctatgttttcttctagaagttatatagtattatgatttatatttagatcaaggattcatttttagttattttttttgtgaaaggtgtaattcctgtctagatttatttatttttgcatatggatgttgaattatttcagtatcttttgttgaaaagactatcctttctctattgaattgcctttgctcttgtcaaaaatcagttgactatatcagtatgggtctatttctgcgctctttatgctgtaccattaatctaatgtctgttctttcatcattacaatgctgtcttaatttagctttacattaagtcttgaaattgggcactgtcagtcctctgactttgttctttttcagtattgcattgactactccatgtattttgctgttcgatataaactttagaattagattttcaatatccacaaaatagcttgctggaatattgattataattgcattgaatatctagactaagttgagaagaatggacaccttaaaaatattgagtcttccagccgggcgtggtggcttacgcctgtaatcccagcactttgggaggccgaggtgggcagatcacgaggtcaggagatcaagaccatcctggcctacatggtgaaaccccttctctactaaaaataaaaagattagctgggcatggtggcacatggctgtgatctcagctacttgggaggctgaggtgggagaatcgcttgaaccagggagttggaggttgcagtgagccgaaatcacaccacagtactcaatcctggcaacagagtgagactccatctcagaggaaaaaaaaagttgagtcttccaatccatgaacatggaatatctttttatatatttagatcttctttgatttctttaattacagtgttacagttttctgcatagatattctgtacatattttcttaaatgtctatgtaagtgttttattttcatgctattataaatggtattgtgtttttctttgaaaattccaacatttccattggtggtatataggaaaacaatggactgttatctattaatttgtatcctgcaaccttgccataatctgctattagttccaagatttttttttctattttttgtttcattttctactttttttgttactttttaattttctattttatttttacagtttcatttatttttactttatttattttttaactttattatctgtggaaagacagttttgcttcttccttcttaatatttatatcttttgttttctttttacaaatcttgtcacactacctaggacttgcagtacaatattgactagaagtggtaagggagaatatctttgctttctttccaactgggaggaaaacatctgtttttctctccattaggtatgatgttagctgtaggtttttcatagatgttctttaacaggttaagaaagtttccctctgttcttagtttgatgagaggtttttatttttttaaaccatgaacgggtattggatttttgtcaaatgctttttgtgaaacaattagtatgatcacctgatgtttcttcttctccaggtttcattgtgagaaaccactggggatcctgaagttaaaactcatcaaagtgtggggaaaactaagactggcctagcaggatttttactctcaagctaatctacactcaacctcaaagaatttattaaaattcacatttaaccatcttatcagtatacatcttcaagagctttcgtttctggtacaaaagtttcagctgcagttacttgtattcatctgtctcttcagatttcgaggtggtggtctgtcttgtgagctcaagtctctggtgattctaataaatgtcattgattttttaagtcttctcagatttatttcttgtttttaggatgggagtggtgacttccaagctttttacatgtgaaaggtaaaccaaagtcaacgtgaatctcctcttcatgtctacaactgagcaacaggtttttcaaaccttgtagctcaacccctactatctgacagtctttcagacacagctaagagtctatatatctttctgtttcacaacctcgctctgatactctctgtgtgtttcatcattctatcttttagcatggttaggatgatcctcacctagaatggagaaacctccagagatttgaatctgagaaaactaagtttccttgattcttcagtgttttttctgactactcaatagcagcaatgtaatttttcgcttctctacagtctgagaaacatcacaatataatccaagaccatcatgatgagatctggtggctgacatgaggaaagttgtgctctgttttctaatgcttcagctactcagctcttcctgtctctcatccctacttaaaacctacttatagggactatctgagatcagtgaacttgcaccagccacaccacagtcatcatcaatacatcaacaattttcagggaggtaccttctcactaaacaagttctaactggattgggatgagagagagtggtagggcagttctagtgaggaaagtgcttgtgtctaagtcagtggacaacttggtaactccctaactacttgatagaaattatattttttctctcatggcatatgttggtagaataaattattctatctttgtctccttttcccccatccaatttcatttcatcaggcttgaaattgctgaaaacatttctcatttttgggaaatgggcaagatggactttgatctgtgtttgctgattgattaactttactcttgtatctgaatgattccattgaaacacatgtggtcatatccaagtgggttggaaacacatgtgcaaatgcaattctgctagtacaacacacttttaaacaaaatcaacaataatccagggataataaaattaaacttgaaactgaataaaatctaccctcaccgatttatgaagtttgtccagctcagtttacaaaagtagacattcccccaacccactctccctgtctaataagaagctcatgatatgtgattaattattaaggacttgtggttctccataagaaatttaattctgtcagtctgcagggaaggcttgtatgatcaagttcaaatttccagctttgctcattttccagttgcttaggagttcataattttgagtctagaaattgccatctatacaactatgagacacacctaacaaaaagtatagaacaggacagatttcagccattcacacaaaaattgtgtgattcttgtcatatccatagtaccattggtattgttattcacctactatctccctatctgaattctctatctaaactcatcattatcttatttttaatgtgatcatgtaccacataaaaccatcttgcctactaccagtagtatgtatgtcatgctttcagagaaaaacagataatctgaagtaatgctttttggaaatattaaggaggaggttcaaaagccagtataaaggactcattagacattcacaatcctaaaggacttctatctgtagtcacaatagagtactttgccagtcctctgtcttcatttccagcagccaactatgacttcacagtctctcatggtgaccatgagtttccacatcggtccccagagctgatcattgtgatctggggatataattgtgatgtttattggatggaagagcagtgaaaattacactgttgctaatgagaagtcaggaaaacaccaaaaaaccaaaaaacatatgttttctcaagcctaaatctctggagaatccttctaggtctctaatgtggtgattgctttaaacacccaaatgtgctgaaaatgctgcctgaagtggatagaggctcatcatttgcatgttataataaggttcctagagttctcaggttgtgatcatattatttatctcattccaacattgagaacttttcttgtcacacctcttttatctaacatagcaacgctattttttcaactcatttccttctctaactttgttacccaatgtctactacattttcttcttagtgctaatcatgtgggagaggtgagagaagttaaagacagcccttatacattgccatctccccaaaagaacatcccatacagacttaagcacctcgattaaaacttaaactatctggtataacttatcttgtataacttatctggtgttcaatttattctctccaagaccgttccttacctcattcattaatccctgaggattggagtaaaggctttccagtccaaggtaacacttaaattttgttggctcactttgcagcctctacatcttattccaaataattaaccctggaagtttggctaaataaatttcaaagaatccaaagtactatctttccacattctcatatgatacccagataataaagataatgaagaaggtagactatttttttcagaaaggatggcttgacattatttctaaccccttatcttctctgttctcctccagaaacccctgaagcaggaaacagggtctggaggcagggaacctaatgacttcctggaactaatttaaatggaattaaattaaactttctaagcccaggtaaataactttgtaactctacttcagctatggcaggaaacatcctcttcattgcatagggtgtacaccaagtacataacattgtaacctcacttcattctcttcatttgcatagggtgtacaccaagtaaataaatttgtaaccttactttatcctcttcatttacctatggtgtacatcaagtaaccaataggaatcctctagagggtatttaaacaccagaaaattctttaactgggtccttgagctggttgttctggcctgctaccaccctgtggagtgtggtttcattttcaacaaatctctgcttttgttgctttattatttccttgctttgtttgtgtgttttgtccaattctttcttcaaaaagccaagaacctggacaccctccaccaataactcccctaagccatctgtgcacatacatctcttctttcggaaaacttaatccccttattttgttctttcctaaggtccaccatgcacattgcactttcatacacatcagctacaacactctggtgattaaaaatttttagctgtcaaaaatggttgagttgctgtaccggacaagactctgtactaatggctaagactttcagactagttttgcatttatttccccagattttgatgtcccattggctgtctggttcagaattcataatgctttgtcggcgtctcaagttaagtttgaagaacatgtccaaattctccatttcacctccattcaatgcaactgttggcagcatagaaattatcttcaaggtaaacatgaagaaaccctaaggaaataatacttgcccttccattggggtaatgacctggcaactgtagacatctgggggtgataggaattattcgacaggttctttttaaaaataggtaatgatcctttaaaggatgaaaccccatttcataacatgcaattttgttaaccactctgtttagaaaaccgggctctctctggtttcccagcgctggtagctcggcttgacgcatgaggttggggctgcctgggtcatgccaatttagattactggatctcacaggatgctacaaggcagacacaccccagagtgactcactgagtgggaagtttaaaaagatggttttcctcagccatcaattagataaaccacattttccaggagaaaaacagcgtcttgaaaagttctttacaaacaaagctttctttgctcattcagctttgggtcatgttttcttgtgaagggaagtatgactttaaccttaattgcacttacaaattagcaagtaaaataatgccagcctttcccccttccttccttccttcctttctctctctctctctctctctctcttccctatcctctctcttttccctcagaggaagacacttttatgattttagctctggtaaaattagagtgttcttcctctttgcctcttccctcaaagctgtggttttgaccaaccatgtgatgaatgagttataggtagaggcctgagatctgtttcttctgccctgaatagtctactcttctttatacattttttttaaccttttattgcaatctcattgaaaacgtactcaggaaaggacatttgtaagttgtgtctttttaaaaatgacagttttgatttaggatgtgtgtccagaagaactgaacactgaaaaaaaaatctaaatctccttgccttatggttattttgcatgtttggaaagtaccaaataagtttctcccactgcattgtaagattctcaaagacaaaacagggtatttgtcatttctaccttctgatatactatgtacctattacacatagaataacatattcaaaagcagatcttcataaaataaaatattttgtacaaaatctctcatttcccaactcactcaaaacttgagaccaaggtgatagagttattggctggagttccaaatagatatccagggccatagaatattttgtgcacactcttaaaatagcacagaatggataagaaatcagtagtccattagcaccttctccttagtgcactcctcctgcgagggaaagcacacctcaggcatgtgaatactggggatccaggaacactaaggcatccctgtgcttgctggtatcttagaattttatctccattacaggcaattcacagcagctgaagataatatgtgctcaacaaattcagatgagcgtgttgacaacagatgagcatgatgtgaccaggtctactgtgtggctctatgtatgggtgtgtgggtgtaacatcccatttaggtcttataaggctgaggacagcattattttcctttcacaaatgagaaaacacaggctcatatgagtagttcactcaaagccggaaacctaagaatacgacgatcctggcttcaagatgtgtacttttaaatattaaataatgtgcttctaccaagttatatgtcctctctgatattaaatattctgccactcatgtccactccaattccagtagctattttttttagagtaaattcacagcagaatggttggaaaacagacactagcaggataaaagaaagtctgtgctctttcatggttgtattatgattccttcatcagggccaaaggcttccctcttctgggggctggtggtggggcaggtgaagggtttttgagatggatctaaacaataccacccaaaactttccatatttccactgcttccttgagtatcttaaaaccattctctatttggggggcttggaagtatcctgggcatacgggttggttgcttactgaggtaatttagacaagttgaccgtcagcgcagcagggaactctcctcttgcacaatcaatgggcaatgcagacacctgcagtgggagctcacctggagggcattgatggcccatgggcatcattggcttggctcacaaaaggttccttagtgctgcatagagctgacagagcaaaggctgtgcagactctgaatactaattctgttcttctcttctaagtccagaagattcctcacaggcctccaggcaaacactcacatcctttatctcccaactgaggcattccacccatcacttattaaactgtatgctcttttaggcagttttggggagtttgcttttgaagtcaaagctgagcactgttttcttgtacttaatattctcatagataataggtggattgggaaaagttcatgaataataaaaagcaaggaaaaatgggaaattgcatatttttcaaaatatcatataactcttagtactacagaggatcttacataagctttttttgaaagattttaaaaaaacatcacattagcatcatgcttccaaaaatttcggggtccccataagctccctcttagcctttgtgtcagcatccatgtttagctaagacatccactaaagggtgatatgcaggttataacaaaataactaaggcaatttagctgcaagtggcagcattattgggttcttgatcctaaaacaaattagataggcccatgggcctatcacctcatgtttacttgtttactccaagggccctggctgagtgatgacctagagtcttggatagctaaggccactgactggacaacttttcttattaggtggtttatagttaacttttcttcctagagagatgccattctttttttttggtttgtgtgtgtgtgtgtgtgtgtgtgtgtgcatgtgtgtgtgtgtttccacttgtttttttggtttgttgttttgttttgttttgtttttgttttataattttgagataggtcttgctctgttgcccaggctggagtgcagtggcatgatcttagctcactgcaacctccccccacctaggttcaagcaattctcctgcctcagcccccttggactgggactgcaggcgcgcaccaccacacccacctaatttttttgtatttttagtggagatgggtttttaatctactttgggttgtctctagagaaagttgtcatttcttttcacaatagaattttgaggtgtcctgaaatgcaatgctgtgtaataaaatgggaagaatgaaacaacttttcatttcctcctgggaagtttccttggaatttcctgttatggaccctcaccactgcccaccctaccatgccaagtctcatctccattcagttgcgtgctcttggaaagatatataatcaagacaatttagcccaagttgttgaagtttgttgtccagctgcaattagatcctgataccttttggtattagtatgagtattcttatgctaatgctagtattcttactattcttctttaaccatgctacttgcctgtcatccgcaccaatttttacttatcttccagaaatatggtccataccatgacatccctgtttctgtgaaaactggtagaagtaacatctactgttcacttgctatattccagtagtcatcatcacagcaatccttgaggtaggaactattactatccacatttcacagatatggaaaattaacaggggctaagtccatttctgaaagtctaaatggcagctggatgcagcaaagctgttatactaacaatcatggtagcccctctcagaacccagaccctggagcatctgtaagctacatatatgttgattctctcctgataaaaatagacataattcttccaaagcctatatgtgttattttaccgatatttttagacatatatttttcttagaatcctgtcttctaaaattctttataattttctcatctatcacaaagacccagtatggctttattcttacttatcgttgaaaatgaaaacaacaacccgattagggagaacttgaagttgccaaatgttgaaatcagtttgtatttgtcacactaaactcatatcgctttctgtattggaatttgctaattgtatattctacttacactgtcccaatatatctgaacttcagcaagctttttaacaaggaagcttgagaaagtctctcttatggaaattcttaccatcatgaccaaagataactggagatgagtaagcaggagggctgttaatcggcttgattcagcttagagaggagctcctagaacttaacagatctaaaagcctaataaagttaatatgttcatctaattcagacaatgtaaaactggaatggacaatgacagatgtccatggaatagacaatgtcaaggtagagccaagaaaccttaaaatgtgactgatcattaacaagcataaatatccaataagcagagccaaaagtaagatgaaatgtataaaatgtaggatgtgacttactagcaccactgataaaaaagaaacaacaacaaaaacaaactccaacaacagtgtcaaaaactgcctctttaagtcaaaatgggagtgaccacacacgttcaatgcaatattagaattacagttttatctgtctaagagctaggtcatgtttaatgtttgctgtagctgtaggtgtctgaggctggaattatttttcagtgtcttggtttttgtttcacttgtctttgtgtttccctagagactccataaatatcttctgagccctgcagttcttctcataatccatcattattatacaggagacctactgatgtggtggtaaagcatggaagaagagaaccattctgtaattttataatgaagtcttagttttatagtgaggctgtgccctgcactgtgactttcacaagtgcttctcagcttttcctcatcccttaggtgagaagggaaggctaaagggggctggagttgggtatttccctttccgtagattaggctctggcaaaacaatctcctttgagggcaggcttttattaaggagaacagagagctttgggtgtatttaaaaatggttactctccctgccagaaagactgggatttttttctccaatcttcaccaaaagaacatggtggtgctcttggaggtaaaacaaaaaacatgtgggccctcccagagctgggcccccagagtttgtaactctcaagtttatccacattgagcctatagcaatttgtcaattatagtttaaatgttcttaccagcaccggctccagcctctggcttctgctcctcagcttcagctcctgtaaactatgattcttagtatctgactctctctccagtgtttgcagcagcggtctgctctcaattatctgatgcctctaagaagagttgttgattttcagtttgttcagtttttgtctttttgtgagaagatgagtgatgacttccaagctctttacatgtcagactggaaaatcataatgacagatatgtacctaaatatagtgaggagacagtagaccttacatagtctacccacatccagggagtagagtccagttttagctatcatatccagagaatggtgaaaagaaagtaaagccgtgcacaaataaaaatgatttaaaaatctgaaaatcagtctgaatcagtaataatgccaatacaattttgctactcaggaaatttatcttctgtcctaacgtcactactttgcaaatgcaaatatacaaaatatacagataacattaacaatttattttttgttacttgactgtaagttgcaaagtagtatctaatgagatgccaggaattctgccatagaaacaaaaatattcagtactttccagctactgttcatagaacttcagtaagtatattctttctcatagataatgatgctggtataatttggtaaagtaatagtactatgattcacctgccggtcccttaatgtctcagaaaatagcaagaaatacatattatccttgagcaaagatgactcaaagtcaataaaaatttcccacaaagaaaacatcaaacccagacaactttatagagtagttctaccacaatttcaaggaaaaaataataattttagtttttttataaagctcttacagaaaatagagaaagaaggaacacatctatctcattttatgagttcagcatttttaggcccaaacctgactacaactgtcacataaagaaaaaggatacaacaaccacactttcaaacaaaaatgtaaaatattagtaattaaataaaatattaacaatctgtatgtaacaatacataaaaagttagtacatcatgagtaaggtgaatttatcccaggtatgcaatgttagtttgataatagaaaatcaattaatggcatgtgttacattattaaagagagaaaggtagatgattatcttaatagatgctgaaaaggcatttttaaaagttcaatatatatatatatagataatttttaaaaaatgttttagcatattaggaatagaaggaaaccactaattttataaaaggcaagtaaaaacaaataaataaaaaaattagaacaaacaccaatcctaactgtaatgttgaaggcatttcctttaagattaggagaaagataaggatacctgttaccatcacttctcttcaaccgttgactatagaatctatagttcaatcaaataagaaaaaaataaaagcaataagaaaaaaaagaagaatcaaaactctcattttttgcaggtgatataattttatatataagtagaaaatttaaaagaagctacagaaaaactaagaaatttaataaaaaagtttgaaaagtttcttgataatgaaaatatagaaaagttggttgtatttctgcattaggaacaagcagttataaacagtttaaaaagagatattttccagggtgccatggttcacatctttaatcccagcactttgggaggccaaagtgggtggatcacctgaggtcaggagttcgagaccagcctgactaatatgctgaaactccatctctactacaaatgcaaaacttagctgggcatggtgacttgcacctgtagtcccagctacttgggaggctgagacaggagaattgcttgaacccgggaggcagaggtttcagtgagccaagatcatgccactgcactccagcctgagtgacagagcaagactccgtttcaaaaaaataaataaataaaaataaaaaagaaagatattttcagtggcaaataaagatacaaaaataactaggaataattctattaaaaggcatacaaacccctaacatagcaaattatgaaattttgattaaaaatcatcaaggagacctaaacaaatggaaagaaataaactattcctgaataaaacctcaattttccctacattaaactacagattcaatgaacagtcccccaaaaagattaggctggcacaaaagtagttgttgttttgccattaaaagtaatggcaaaggcaaaactcgcaattacttttgcaccaacctcataccaaaaaatgttctagagagcactgtggagctgcagggcttggtcaacatgtgtaggcaaaggtggtggaagacatacgcagtgcatctgaaggtgctgagtcaagccagtcagtcataatttgaatgagggagactttttcaaatttggaaacacatttgtacattacatgatttaatcactgagcaaggaccccaggaaataatgttaatacactgctatgctagttcttggatgcctggaaaattcagtagcacccaccaagtaaagtagagatgctggaatgctaacagcaaaagaaaggatcaaaaagtttagagatgtgggcatgtgaaagtggatacactatataaagccaaaacaaaaacaaaaacacaccctcaaaaacctataaggccacgtgatttcacaggcgggccttgaggacattccaactgttagacaataaatagtttgttcatgagccagacagcagcatcactgagaaactcttctctctaagcttggaattgttactggagaactgaactcaccgacagcaatgagtgccaaccaggaagcaggctctcaccagacaccagacctgctgacaatttgaccctgaacttcccaggctccagaactgtgagaaataaatgtctgttgcttaagctacttggtctatggtatttttgttacagcagcctgtactgactaagacatctttctccaagctgccttcagcgttgactgctgagagtttattgttgactctttctgtaagaactgcctttgcctgaaggaagttgccttgccaaatacatattttttttattatactttaagttttagggtacatgtgcacattgtgcaggttagttacatatgtatacatgtgccatgctggtgcgctgcacccgctaactcgtcatctagccttaggtatatctcccaatgctatccctcccccctccccccaccccaccacagtccccagagtgtgatattccccttcatgtgtccatgtgatctcattgttcaattcccacctatgagtgagaatatgcggtgtttggttttttgttcttgcgatagtttactgagaatgatgatttccaatttcatccatgtccctacaaaggacatgaactcatcattttttatggctgcatagtattccatggtgtatatgtgccacattttcttaatccagtctatcattgttggacatttgggttggttccaagtctttgctattgtgaataatgccgcaataaacatacgtgtgcatgtgtctttatagcagcatgatttatagtcatttgggtatatacccagtaatgggatggctgggtcaaatggtatttctagttctagatccctgaggaatcgccacactgacttccacaatggttgaactagtttacagtcccaccaacagcgtaaaagtgttcctatttctccacatcctctccagcacctgttgtttcctgactttttaatgattgccattctaactggtgtgagatgatatctcatagtggttttgatttgcatttctctgatggccagtgatgatgagcattttttcatgtgttttttggctgcataaatgtcttcttttgagaagtgtctgttcatgtcctttgcccactttttgatggggttgtttgtttttttcttgtaaatttgtttgagttcattgtagattctggatattagccctttgtcagatgagtaggttgcgaaaattttctcccatgttgtaggttgcctgttcactctgatggtagtttcttttgctgtgcagaagctctttagtttaattagatcccatttgtcaattttggcttttgttgccattgcttttggtgttttggacatgaagtccttgcccatgcctatgtcctgaatggtaatgcctaggttttcttctagggttttgatggttttaggtctaacgtttaagtctttaatccatcttgaattgatttttaataaatggtgctgggaaaactggctagccatatgtagaaagctgaaactggatcccttccttacaccttatgccttgccaaatattatttcctccgcagaagcagtccacatgcaatgactcatagatatggggattaagacacttggcccctttaacctgatttgggtattctctgaagaatcttcccagctccagagctccccatgatattcactgaggcctctgatgcatctgtgccacaattcaatttttctctcttctcccatttgtctcactcctctggtattgattgcatgaatataaacccctgcacagaggggtttcccatctcagagtccattttgtagggaacctaagcaaagacaagcatttaccatggaagttgacaagctgatcctaaaatttatatgaaagtacaaaatcagcaatagccaagaaacttctgaagacaaaccatgttgggaaatgggtggtggtattaagtgggcctgcaatatcagatatgaagacttataaagctgtaggaaatgggactgtataattctgctgccaaaattgataaataagtaatggaaaagaatagagaactggacaaatacctaaacatatgtggaaactcaattcacaacagtgtgcctcagatatcactgaaggaaggatagattgtttagtaactgtgtcttgagaattcatttatcatatataagagaatatctttatgacatcagagtagggaagaatttcctaaacaaggttcaacaaagcataaaccacaaagaagaagatgaagaaatttgactatattaaaattaagaacttcttgtcatcaaaagtcaccataaacagaatgaacaagtaatccacaaactggaaaaatatatttgaaattctcagttacaaaggattggtaaccagcatatataaggaaatcttataaatgactaagaaaacactaacactttcacttctataataaaaaaagacatgagcagacatattttgtaacatgaacataaatcttttagaaacaacttgtaatacaactggaagtgtctaaaaatttatattacctagatatatacccattgaggcagaaaaggtgcttgttggtttttagactctgaatatagaccaccactcatacatattgctcatctaggaacccttctgtataatttccagcgatttcaactctcactaaaatctcatctaaaaaaatactcttaacataccgtttaatttaactgttaagcaaaagttggtttcatctcaactagatttttcaagtacaattcttaaaaaattaaaagtattttactgtttttaaaaagcaagcaatatatgcatcatacatatatgtaacttatgcacacattcacacatatacaggtaatagctgtgaatgtatattttacatctttatacattataaatatgagaatttattttgaaaaatcagcccacagggaatttataattcaatagatttgaagtatggcatcaactctccagaaaagatcagctagaaatggagtatttgagtttacctctctggcttcccattagtacagaaatatcaaaatatgttacacatagcctgactgtcttctaatgctcaaccattggtagctatcttttctagtaaatctctatctcagtccttttccatagaatacttcaggaagccactatcaatttttcagagttggttaaacaaatgaaactcacttgccatctctacactagaccaaaaaccctgatcaaatagacttttttttttcattttgcctctcaggaacattgcattcctataacaacagagacaaagcattgtctcttctccctgggcacccctatttgcaatctcaagcactgaatcctggaatctgaaggactttgaaaagcacactggcttgaactgccatcttctaatgctataagagtttgtttttgtaaaagccagtcttattttaatcctagtcactttagtcactgtaaccaaaattatgtaaactttctaaatagactaaatattctaaaaatacagtgaaacaccagcctccacaccaaccaagtcacaatagggtgtctgacctaaagccacaaaatgaaaatatgatgggaaagtcatttatcaaactgcagagaccataacatgctcctatcactgtgtcaaaagcaaaggcagcaaccaaatggctattactcaaagtgataacattatctttgggaaagcattttatttatgcattcctataagtgcttatcatattagttacaatttatattcaacactatatgaatgtatttttgaacatttttccatattttggaaaatgatgaaactattttctactttgtaattttgtgttcagaatctcccttgaagaaatatgagtgtgggcagtggaaaaataatttgtttccatgtatttgttaccacttatagcacagccttgagtattttgagtcctaaataaacttctctgaccatagggaagaattgtgaaaacaagtacatcaaacgttataatacagacacaattgcctatatctgctgcccacctgcaaatgtagtgtccataaggcctctttctcaagtattgcatgtggtacccatgagctcatgaacaaccccactcagctgccaggttctggtcactgtctctccctctctctctctcttctcctgtagccttggctaacagaggatcccactactgatgcctttaaattacagaagcacatctggtaaaatagagaaatgtgttttctgttttgctgccacttaattttggaaaagtagcaaagccaacctactgccttatatctgctacactgtctgtactttcaagtattttagtatgaacagatgatgtgtgtataacttttcttgaatccagtgtacttagttataaattttttgtttagctataatttacatacagtagacttcaccctattaagggtactgtggttttacaggtcctcccaaagcagataacaatgtgggaatcaacatgcattatactggcaagtgttctgtttgaaatttagccgttgtaataggattttgtttcccactgatagtttttacataaaactgtataatccaccctatgtggcaggtggagtctctagaacagatttattttacatagcttgcccaaagcaaatgaaagctcatctaatctatcaaatggtgtctgtaaccacacatgatatcttgtctgcaggattcagagccttccttcagccagtgatggtcagttgtgcacatggttactcagaggcaatagaacgtggcatatacttcctgcctatctcctgtgttcaaaaagctgatcaatatcacacagccttggaaacttttgtgcagtgcttagttttggatagtgggactacagaaagtatggagaagtagaaaatagagatgaaaagttatccacactctatttagtaagcatataatttttaattgggtttgatgatggttgaaagaaaaaaaagagaacataagcatatttattaccacggaactggacacctaaaactggtaaagagggaaaattgtttaaaaggttggggtcgaggaagattaatatcgagggcaggtgattggttctggtaattaaaaaatgtaattttctgtggagtcctaaaaccagatacaagatgctgatacaataaagagtgaaaagtaaaggagtatgggcagccaacttagacttattttcctcccagcaatgaagagaagggaaagagtagcagcctccttcaaacaccagcccaagatccaactcttctttgaagctttcctgaacttcaaatgcctgctcttcttccccttccttagtaaacacatatcaaaatgttacattgtaccccgtaaataaatacaattattacttgtcaattgaaaataaaataaaatcaaaaaaaaagaaaaataacatcaattaagccagatgaggctactgaaaaataagttacatttaataaattttctctgctgtgcttcagatgtagggatgacacagtaaaaatctgggatcctttttttttaggacgatagcataaaatgcagaagaataagaaaatgtgaacggcgttcaattttccttcttttttttttttttttctgagacggagtctcgctctgtcgcccaggccggactgcggactgcagtggcgcaatctcggctcactgcaagctccgcttcccgggttcacgccattctcctgcctcagcctcccgagtagctgggactacaggcgcccgccaccaggcccggctaattttttgtatttttagtagagacggggtttcaccttgttagccaggatggtctcgatctcctgacctcatgatccacctgcctcgtcctcccaaagtgctgggattacaggcgtgagccaccgcgctcggccaattttccatctttattattctgatttctgttaaattagtagaatgattctactgaaagccagcattatttatcatgatctgactcctaaggaattcatttgatgagaggaggagtcggagggaagttaaaccaaacttttatggagttttcttttatttgatttgatgtttttgtcttttgtttttggctggagttagagtacagatagggaaaatgtgaagcagtagagaaattggatcatgtgacttaaggataaataactgagtaatatggccccaatgagacttaggagtgggagttggaggatgggtgtgagagaggtaaactgaaagctagtccatgtttggtctttgtattttcacttttttaatacagtgttacatttgaagttgtatgatccctctagaagattatcggtagaatagagaaagaaatacagaaaccagcctttatttcagagtacttatgtttgtgtatgtgtaaactggcaagccataagctctaatgagctcctatctaaccatagcatcaatgtttattgacctctcctataattaaaatcacatgtctcaccacaagcaatgggtgagcctttgcttactttaataagcttgtaacctaactatctggccacttaagtgccactggctccgtgaatcgaatcagcaggaagaaagaaaagagcgtcagtgtcagagtccacttttggcatttaagctgactcaacaatttattttaaaaatttacataaacaaattccaacctcaaatatttttctccccacctcaggtccatcaaattacaagttaactattcattctagtcaattgaataactcaacaaactaaaactgtgtaaccatttgtttaaagtgcaactgatttgggaaattctacctagatgtttttattaatgtcatggaaaattatatatattaatactattcaacatttaatcatcagccactttctaaatacttcgaaatgtcagggcaaatctaaattatctaaattttaaagagattaatctaattgcaccaagtagcaaggaaggaagaaattattcagagttaacttcttaggctattccaaggaaaatgtgaattacaactgtatttccaatgggttcaaaatcagaagttaatattatttctcaagtgaacaaacctcttttttaatgctaatctgttgttcacagaattacaaacttattgtatactaatagccaagataagaaaacaatctaagtgtccatcaatgaatgagtagacaaagaaattatgaaacatacgtacgtatatatgtacaatgcaaaatttttcagccttaaaaaagaagaaaatcctgccatttgcaataacatggatgaacttggaggacattacaccaagtgaaataaggcatacacagaaagacaaatactgcattatatcacctacatgtggaatccaaaatagtcagacttagagaaacagagagtagcatggtgcttgaccagagctggggagctgggggactggggcagtgttgttcaaagagtacaaacttccagttttaagatgaataagttctagagatctaatacataacatggtatatagttaatagtgatgtatcatatacttgaaatttgctaagagagtagatcttaagtattcttaccacaaaatatgataattaggtcaggtgatagatacgtcagcttgattgtaagaatcattacacaagatatatcaaaacaccatgttatatacctcaaataaatagaattttttatttgtcaatcacaagtcaattttttagaaaaagactgaaaaggttgctacaaatagttaaagataaataattggtgaaacacaaatgaatgcattccagctaagtgaattcattccattacacatttagttgagatacttaattaataccttccaagttaggtcagcattgatttaacaagtactgcatgcctttctccacccattctgagatatcagatagatagataggtaggtagagagatggatagataatagaattgtagtgtttgttataattcatcatacgtatttgaggttactgcctacacattctaactgacatctataaattaatgtttgatcactggatttccaagttgccaatgtctaactctcttcttcgatgaggttgaagcttgatacattatcaatccatgttccagataatattttgttactacatctcagtttgtctcagagtattatggtctgtaaacaagcaaccatattaaaatatagctggggataaaattaacaaattttagatatagtcattgtaagagccagatatatatttgatgtaacacccttctattaaggacgctatcttgcaatgttttttgtcttcatcatgaaacaagggaaatatttgtagacctaaatttttggttaagtagatggaagcatttctccagaggtttctgatatatggtaataagtccgtgaccaatgcaataaatgttcaccaaaagactgcaagacatgtatccatgctcaaggaaacacaatgcaatgataggaggaagagaaatttagaataaaaagactatagaattaacttatgtagaaataagtgactttattgaagtgcttcatgtctcaacctattttaaggaggatactatttagaataagcacatgtaatactaaccttctttccaaagaaaactgaatccagttgataaatttttatcacgttcttaataatatttgtagtgaaagagcttagtgttttttctccctgtgttacatggtctagacttataaaagcatgactttattttcagtgattgaaactgtaaactcatcagttcattattaattatatttggttgaaacaaaattcagaaagtaaaccactcttcttgatataaatcattgagggtttaaaattaaactagaagagaagcttctgtttcataagtaaaataatgaatataaaaacattctttctgcatcacagaccccttctaggagccagaatctagtgaaatatccagactttccctccaaaaaatacatattcaaactaaatattgtataacaacttttctgcaagcttgaaaaatctttgaagtagaagctaggaccaagttaaagaatacatgcatgcaacaagaatctctgcataattatgtttattattgcaagactgagccacaatttggctaagatttctagcagccaggggggataacggaaagcctagttatgatgactgtcatcaagagaaggaaacatggcacttaagaaaaacaaagttttgcttagaaatgaattataaataatttcccctgggactgtttagtaaactttactttggaaactctgtataatctcaaatgcaattttcatgtacttttttattttgaccacttaacaaaataagaagacataagattactaggaaacagcctgctggttgtctgagtcatagagaatatgcactcaacttaccctattgtcaatcgtgtctatacttggactatgttcacaaaaatttgctttctcactcaaagttgggttactgatgggcacaattcagatatcagccctctggaaacttctgacacatttggtcttatagaagatacgaaaagaagaaacaacatatgtataataaaaagaaaatccaagtaatgaagttagagaaatatgaaaaaaatctataattaaaaacaaactttcctaaagttaagtgtgtatacatatgtatatgtgtgtgtgtgtgtgtatatatatatatgttaacaagtcacatcatgtatttgggaaagtagactgagaacactgagaaacttctactaaaatgattagtattttaaaaaagttaatgaattatttttgtatttgtacaaactatctaagtcacttgtaacaaatagattagactgtttaaaattttcaatagcaatactttatgccttctagagaaaactagaaaataaaatctgggccgggtgcagtggctcacacctgtaatcccagcactttgggaggctgaggtgggcagatcacgaggtcaggagatcaagaccatcctggctaacacagtgaaaccctggctctactaaaaaaattacaaaaaattagccagacatggtggcagacgcctgtagtcccaaatactcgggagactgaggcaggagaatggcgtgaacccaggaggcggagcatgcagtgagccgagatggtgccactgaactccagccttggcgacacagcaagattccgtcaaaaaaaaataaaaaataaataaaaagcaaaaagaaaaaagaaaaaaaaaagaaaagaaaatctgagccaagtattttataactggttttcaagtgtaaagccaaacttttatggacatccaatgagttattcctgaagtatctcctagagagtaactttcagacaattaaaatgactagaaatgtatcaacttaaggtctggtggtgagcattggtatatagttaattgtagcactatgaatatgtgattgtaataaaataaaaaatatagtatgtagtagttatacataccaatcctaatgttgctatctcactctaagggcacagagtgagtagggtgaaggaacaaggataggagatggattcactgaatatatcttgttttacagaattgactttgaaaccatgtaagcattttacatgataaaaagtgcactttaaaaattcctaaaaatatttaaataaaataaataaatataaatgtgtaactagttgttggcataatcacacagaaaataactaatccaagtaactttaaaaaatagtgtgtaactgtacatctctaatgatatattccctaaggacaaaaaaaatactccattgtattcgtccattttcactttgcttataaagacatacccaagactgggcaattcacacacacacatacaaaaagaggtttaatggacttacagttccatgtggctgggaaggcctcacaatcatggtgtaaggtgaaaggcaagtttcacatggcagcagacaagagaaaagagcttgtgcagggaaactccccttcataaaaccatcagatcctgtcagacttcctcactatcacgagaataacatgaaaaatacccacccccaagattcaattatctcccaccaagtccctctcaaaacgtgggaattatgggagccacaattcaggatgagatttgggtggggacacagccaaaccatgtcatccacagaaagtacagacagttttcagtaataatatataggtggtagtcaggcaggctaggtagttaaggaagtgaccatgtccttgggatgcagcaaccatggtgactgtacgatcaacactataagcctcagcatttgctttgtagttaagctcatttgagaaaagctgtcttcagtaggaccttttactccttaatttgaaatatcaattaaattgatgacattttctgcttaaaaaattctaatttttcaactgaaaaggcctagaaatactaacacactcggtagcattaagtgccctcaatactcaaagtttggtgttgaaatccaatttccttcaaaaaggaaccagagctccccagagaaatggctacggccaggttggggacaggaaatatacaagatcatcttggaaactcttgtcacaccagatgacaaggaagctatcaaagattactagctttaggtcaaagacttgagagtcaactaacagagactgtcaaagatgaggtaatatgaggatcaattagggaaaaactgcaaaagactgaaatacatcaaataaatttaaacctgtgagttcaaagtaatactgaaaaagcattggttagtaaccgggagacattaatgaaccaactcattattttgaaaactcatagacaacagaacccctgggtaatcaaatagtagacaagagcaagattttctttattgtggcatttcagcaaattaatgaaaaataaattatagagttggcatagtgcctttttgtaactcaaaatgaattatggatgtaggcatgaagcatcaattattgccgatatcaaaaagggaaaaataaccagatatctgatgcctcctgatggagaaacaaagcacctcttataaaggagtcttttcagaaaaagcagacctgaatctgatcagtcctctatatgcaattactaactacagaaaatacaaaggacagagaacatgttaaactacattatggggttgcaagcagaaaaatcctgcaggacaaataattgtgtttcttcagcaaataaattgccaagggtgaaagaaagatggaaagaggaaaccaataggtgataaaagatttaaaaagtgtataaagtacatattaaggattacatgtaggcattatttggatcctgattcaaagaaactagaaaaaattgtaacactaaaaagttaattggagtcacttgtctttcaagctgctcacttggccctcttccaagtgtacttttcttccttttattcaaaaagaaaaaaaaagataattggaaatttgaacaatgacttaatatttgatgatattcaggaattaaatttttaaggtataataatggtattgttgttatgtcaaaagaaaataatttttccttttagagttacgtactgaaatgtttatttataaagtaaaatgtctggatttagtgcaaaataatttgggatggggaatacgagtaagggtatacataaaacaagtttgctgaagctagataatggcatatagggggtttattatctgatcctttttttacatttttgaaatgatcaaaattaaaatctttaaaataaaaacccatgcatttggtaggttttcctacatgccattgccttgcccccagggcactgaaaagatgtgctattttctccattttctgtgaaaagcagtcagtgaggcatgagagaccagcaagggttaaagagggccagtggctgatacatctggggagcattagctatattaaggacaagccagcataaaaaggtaaccggaagaagcagctgagtactctctggtcaggccttgaggtcatctgaatggagggactgcggtttacagtctagcaagggacatgtatcatttcagcgctttgtttcaaaccgcaacacaagagtttcactggtttggaattgattcaaagctgaacagaaaacttctttattctcaatcagcaagtttaaatattttgtattacacctttcaggaaagaatatgcaggatttatgtttatagtaacaaaaatttcatgtcttttagatttttgtgtgttgcagaaattcccattggccatacatgtgaatataatgataaacacttgttttaattgctatctcagcaacaaatatgtaaaatatttattatgtgacaacattgggaaaagcataggaattactgtaggggccgggtggaattataggggttcttcagtttcatggaaagtgggactttgaaatcaatcaaaaattgtctaagatcttgactctgccatttctcagcttgttgagttgggtattctttatcttgtactttgcttccctcacctgtcaaacactattgcagtgaggtttaaagataatgcctaaagcacatagcctacagtatacattcaatatgtggaagaatggtcattttcacatttgctttcttatgatcagcaacttccgccacttgactttgagtaaaggcatttttggatattagacctctttctccttatgtaaatatcactacttggtgctcctatagacgatcaactcaacctcttgaagaaaaacctgaaacaaatcaatagtgacagataacttttctcttatagtaaaaaaatttaaatttagtggttttttatataattatatgttattaaaactgaagtatttatgagttttcatatttcagtatttagataactaatactaagagggaggcaaaggtaagtacactagattatgctattagagaaaatatagccctgccttagttctaaaggacacagaatacagaatatgccacactgcatagtttaagctaaatatgtaggaaatggcctctcttcctggtcttttgttttaaaatcagcagtgaataattaaaatgcaattaaacacattgaagcaaccttaaggcacataacctcaggctatgcttgtaaccagctgttttggactgctttctatgaagtatacacttgattgatcattgctatatagtataaagaatttactttagaatcagaagatatgagctcaatcaagtcttttttgatctgcccttttctagcttgatgggcaaaaatctccttatgctttatttattttacttgttaaatgtacccatctcttaggattagttctgagtgtactgtaaagcattaaataagtaaacgttctctcttgaaaacaagtacacatgcacagaaaattttctatttctgaaacagatcatgttcccattctgactgtattgaatgatataaatatgcagggaaaaaaaaaagcctttttactctccatcatggaattcagtgagtggtgatgagtattcctgtccgtgttgaggagaaaatgttttaataaaaagagggaactaggaagaggttaaatcccacagacagatgtgagtgagattgtattaaaaaaaaacaagaggaggtaatcattctatatctagactgtaaattttattcaaactacatgttaaaatgaggtcgtttcacttacagtaaaagctaaggccatcaagggttttctgttgacccatctggcatttaatgtaggacaggagtttccaaagcaaaggagctggtactttacacaaaagttagaaaggccacaaggttactctacaaatttatggacctactttcatttcatagtgactaaggactgggcgctgggaaatatccttttttattgcactcagcatatttattatataaacaatccaaattcattgcagaataattaaaagtagtagagaataaataaatagtgttgcctaaagccccaccattcagaggtcatcaccacttttacgtactgatgtatctctattcagatattataaaaacatatgaatatattttataaaactttaaccagcccggtatgtttcatgacttatttttttcacttgatactcttttaaatattttcaaaaacatttaatatcgatctacattaagaaatatcataacatagtattctgttgtatggagtatgaatgttcttaaccaattttctgtcatatattattttttgttgattttttgaatatatatctttatactaaggaaatatgtgtcaaaattcttagaagtagaatttttgtatgttttaaattgtttttcctaatgtcccacagtttatgctccttaaaaaacgagtactttattgacttttcattgcagactttcttatatccatggcagacttttctgttagtgacatggtttgtttttgttttttttttttagtctgcaattctccttaaaaaggatttctgtcacatggcaaaatgttttgtcagatatcagttctggccgttggtgacagagtcatggaatataaaaagacatcgagaagaaatatgtgtgatctggaatcgtgaccttacaagtgcatctgcaacgttggctgtgtttgagcaagtgaatctatatgactagaattttttaattgatacatgacatttgtacatatttatggggtacctgtgatattttgttacatgcatagaatgttgaataaccaagtcatggtattctgggtatgcatcgcctagagtatttaccgtttctatgtgttggggacatttcaagtcctctctcctagctattttgaaatatacaatgcattgttgttaactatagtcacactattctgctgtcaaacatcagaacatttcttctatctaactgtatgtttgtacctattaaccaacctttctcttcatcttccctcaacccacatacccttgttagcctcagctatctactattctaatacctacttccgtgagatcaactgttttagttcccacaaacaagtgagaacatgcagtatttctctttctatgcctggcttatttcacttaatataatgacctctagttccatctgtgttgctacacatgacaggatttcattttgtatgaccaaacagcattacatatatatatatatatatatatatatatatatatatatatatatcccttttatatatatatacacacacacacatatatcccttttatatatatatacatgtatatacatacatatatacatgtatatacatatatacatatatatgtatatatataatctgtatatacatatatgtgtatatataatctgtatatacatttatatgtgtatatataatctgtatatatatatatatatatatatatatatatatatatcccttttctttatccagtcatcctttgatggatggaagttaattccacatctttgctattgtgaatagtactgcaataaatatgggagtgaaggtatccctttgatatactgatgtcttttcctttggataaatacccagtagttgcatggctggattgtatggtagttctatttttagttttttgaaaaatttttatactgttttccacagcggctgtactaatttgcattctcaccaacagtgtgtaagtccccttttctctgcatcttcaccagcatctgctatttttttaaaataatagccaccgtagttgggataagagaatatctcatgtggttttgatttgcattaccctaacaattagtgatgttgagcatttttcatatacttattggtcatttttatgtcttcttttaagaaaggtctattcatgtattttgcccatttttaatgaattatttatgttttgctattgagttgctttagttccttatgtattctgaatatcagttccttgtcaaatgaatagtttgtaaatagtttctttcagtcaaccatgtctcttttgattgtttgctttgatgtgaaaaagctgtttggtttaatatactccaatttctctatttttgtttttgttgtctatgcttttgaggacttagccgtaaaatctttgacgagttaacgggtgcagcccaccaacatggcacatgtatacatatgtaacaaacctgcacgttgtgcacatgtaccctaaaacttaaagtataataataataaaatttaaaaaaagtctttgcctagacctggcatttcccctgtgctttctttcttctagtagttttatagttttgggtctatgtatttaagtattttatccatctggagttgatttttgcatatggtgagagagaggggtccagtttaattctttttcatatggatatccagttttcccagaaccatttattgaaaagggtgtcctttcttcaatgtatgttcttggtgcctatgtcaaaaatcagttggctgtaaatatgtggatttatttctgggttctctattctgtttaattggtctatgtattttctattatactgataccatgctgttttgcttgctaaagctttgtaatatattttgaagtacaatagtgtgatgcctccagctttgtttctttttcttgagattgctttggctattaaggtttttcttagttctgtatgaatttgaggattttttttctatttctgtgaaaaatgacattggtattttgataaaggttgctttgaatctgcattgcttgaggcaacatggttagtttgattatattaattctaatagtccatgaacaggcatgtccttccatttgtttgtatccccttcaatttctttcatccatgttttgtggttttccttgtagaggcctttcacctccttgggtaaactcattcttagaattttttttagctattatagatggaattgccttattgatttctttctcagctagtttattattcatatgtagaaactctaataatttttgtatgttgattttgtatcctgcaattttactgaatttatcagatctaatagttttttgtgaaatctttaggtttttctagatataaaacaatatcatctgcaaagagggacaatttgacctcgtttttccaagttggatgtctttatttcttcctcttgactgactgctctggctaggacctccaatattatgctaaataggcatagtaaaagtgggcttccttttcttgttacagttcttagaggaaaagtttcagcttttacatttgataagatgttagctgtggatttgtcctatttggactttattatgttgaggtgtgttccttctgtgcctagtttgttgagagttttttttttttttatcgtaagggtaggctaaatgttatcaaatgctttttctgcatctattgagatgatcatatggtttttgtcttttgttctgttgatgtgatatatcttgtttattgattttcatatattgaatcatttttgcatccctgaaataaattccacttggtcatggtgtattatctttttcatgtgctgttggatttaatttgctagtattttgttagtgatttttgtatctatgttcatcagaaacagtggcctgtggttttgtatttttgttgtgtccttgtttgattttggtattagggtaatgttggcctcatataatgagttagagagaattctcatctcttcaatttcttgggatagtttgaggtgaatttgtgttaggtctttataagtttcatagagtttggcagtgaagccatctagtcccagacttttctttgttgggagactttttattactgattcaacctcattactcactattagtctgttcaagttttttaaatttttgctgattcaatttttgcagttgtgtgtgttcaggaatttatccatattctctaggttttccagtttgttagtgtgtggttgttcataatagtctctgaagatgtttagtatttttgtggtatcagttgtaatgtctcctttttcatttctgatttcatttatatgggccttctctcttttttgtggataatctagagagtcatttattgattttgtttaccttttttaaaaaaacttttttgtcttgttgatcctttgtattttttagtttctatgttatttagttctgcactgatatttattattccttttctctattaattttgggtttcgtttgttcttgtttttctagttcctaaaggtgaattataacattgtttagttgacatttttctgcttttttgatgttggcctttattactataaacattccttttaacattgctttttttgtatctcataggttttggtacgtcatgttttgattttcatttgtttcaaaaaaatttttattttctccttaattgcttctttgacccaatggtcattcagaaacatgttgtgaaatttccatgtatttgtaaagtttccaatattcctcttgttactgatttctagttgcatttcattgttatctgaagagatacttaatgtgattttgatttttaaaaatttattgacattgtcctaacatatggtctatcctggagaatgttccatgggctgatgagaagaatgcgtattctgtaactgttggatgaaatgttctgtaaaagtcttttaggtacatttggtccaaagtaccttttaaggaaaatgattttttgattgttgttgttaattttctgtctagatagtctaatactgacagtggtatattgaagtctataagtattattatattggatatatactcttcctttagatctaatactagatctaacactgggtactctggtgttgggtgcatgcatgtttaagaattgttatatcgttgctgaattgatctttttatcattatctaatgaccttctttgtctatttttactgtttttgacttaaagttcagtttatctaaatatagctatttctgctcacttttggtttccatttgcatggaatatcttttttcatctctttacttttagtctatatgtgtctttacaattgagatgagtttctcttacatagcatatagtcatatgggtttttttttttaaagtccattctgtcagtctgtaccttttaattggcaagtttaatctgtttacattcaacaatattattgatacatgaagacttatttctgatattttattgatttaggattgttttgtatgtcatttgttcccttctttctcttatattgtttatcattgtagtttggtgattttctgtagtggtaaatttgagtcccttctttgcatttctttgccttaaacacaaatttgctctacctgtggttttatacttttgtgtattttcatgatggtagatatcattctttttcctccaggtgtagaactccctcaggcattttttataggaccagtctagtgatgatgaattccttcagcttttacttgtctaggaaagactttatttctccttcatttgtgaaggataactttgctgggtatagtatccttagatatttctcttccagcattttgaatatatcattccattctctactggcccgtaagattcctgctgagaaatcctctgttagtctgatgagggtttccttacacataagtagatggtttcctgttacttttagaattttctctttgtctgtcacttttaccaatttgactataatgtgctatggagacagccttttgaaattgtatctcttttgagatctctgagcttcctttatctggatgtctaaatttcttgccagacttgggaatttttcagctattatttcattacatagatttgttttattctttttattttaaattcgtcttttgggacacctaaattttgagtatttggttgctttatggtgacctatatgtcacataagttttgctcattctttttcattctgtttcaaatatttgtctgactggattatttcaaaagacatgtcttcatggtctcaaatgttttcttctgcttgatctagcctatggttgaagctttgaatgtaattttacttcattcaatgaatttttttttccagaatttttgtttggtttctttttatggtatctatctttttggtaaatttttaattcatatcctgcattgtttttctgatttctttgtactgtttttatgtgttcttttgtatctcaccaagcttctttaatattattttgaattctcttttgaggatttcataaatttattttttgctggagaattattgtgttcctttaaaggtgtcatattgcctagattttttcatgttccttttgtcctaatatttatttctgtgcatctagtgtaataatgacttcttccattttttaaaaatttgcttttgtagggcaggacattttcctgaaggtgtatttatggtgttaattgtgcagggcactttgactttgattctgggggccaaatcattctgaatgatttatttatctgtgaatagcatcagtggtatttgtgatttctgcagtggcattgggtgtggttgcagtagaggctgtggtaaagttgttctggaaaccaggattccaggtgggccagttttcaggctccagtagtggtgagaggtgacaatgtgctagcagccctcactctctctcaggcctccttggcctcagcgtccactctggccacgcttgaggagcccttcagcccactgctgcactgtgggagcccctctctgggctgaccgaggccggagccggctctctctgcttgcggggaggtgtggagggagaggcatggcaggaaccggggccagcgtgagttccgggtgggcgcaggctcggcaggccctgcactcccagtcaccggccagtgccgctggccccaggcagtgatggccccaggccagcagctgcagagggtgcgccaggtcccccagcactgccggcccactggcgccatgctcaaaattctcgccaggcctcagctgcctccctgccgggcagggctcaggacctgcagcccgcctgcaggatccccgccccccaccaagggctgaagggtgcgggtgcctgcatgggactggcaggcagccccaccttccgtcgggtgtgggatccactaagcacctgatccactaggtgaagccagctggcctcctgagtcaggtggggacttggagaacttttatatctagctaaaggtttataaatgcaccaatcagcaccctgtgtctagctcagcatttgcaaaggtaccatcagcgctctgtgtctagctaatctagtgcggacttggagaacttttgtgtctagctaaaggattgcaaatgcaccaatcagcactctgtgtctagctcaaggtttgtaaatgcaccaatcagcaccctgtcaaaatggaccaatcagctctctgtaaaatgggccaatcagctctctgtaaaatggaccaatcagcaggatgtcagtggggtcagataagggaataagagcaggctgccggagccagcagctgcaacccgctccctcgccttccagctggggttagctttgatctttcgctcttcatagtaagttatgctgctgctcactcttggggtctgtgccgcctttatgagctataacactcaccacgaaggtctgcagcttcactcctgaagtcagggagaccacgaaccaaccagaaggaagaaactctggacccatctgaacatctgaaggaacaaaccctggacacaccatctttaagaactgtaacacttgttgcaagggtctgcggcttcattcttgaagtcagtgagaccaagaacccaccaattctggacacagtggcaatggtggactgagcatatttgtccttgggccccagtgtggtttacactggtacaagtgttactgggtttaagcaggctgattcttgggctccaggtgggtttctcagatgctggtagtggcagcagtaggccaagtgtgtggtcaggttctcaagcccctcagcagctgatgtgatgtgaattatgtcagtagcaatggtggagcaatccactggaaccaaaactgtccactttggtgttggaggtggctgcaacaagttgggaagaacagttcttgagttcaaggagtggcagcagtgcactgagcataccttttcttgggttccaaggtggcatacgctggcaccagtgttggcaggtctaggcaggctgattcttgggcctccaggcagcttgttaaggtgtaggtagtggcaatggtgggctaggtgggtaggtggaccctcaggtcccttgaaatgctgcatgggcgatggcagtaacaatgtgggagaatcctgtctcccaagtgatctatgcagggtgtgatggtggctgtgatcagctgggtggaccaatacccaggcctgcaggtggcaggggcaggtgggtgccagctatggtggtagtggcagttcaggcagggccaaacgcaggctcctgggaggagtgttcaggtcccaacagtggtggttaaggctgggctggctgacctgtcctcaggcctcccagtggtacgtgaggctttggctgtggtaggcaggtggggtgatcaccagacacatggttgaatgtgagactgggggcagcagtggctgtgctgtggtcctgctactggggagtgtgggatttctttcagtggcagcagctatatgcaggtggggagtgtgttctttggcctcaagtgttcgctgtacgtgaggtagcctatcctcggggtgcttatgaatgtgtggtggctttgctgctaggggaagcagcgtggctgccagtggcttgccctttggtgccagcagctgtgggcaagagagtctgtccctgggccatgtgaaaatgcatggtgattccattgcttggggcataagtgtcactgtcaatggctcatgcttcagccctggcaacagcagtcagccacagcagtagctgcaagcagagaatttcaatgagtctccagggatatggagattcaggggctgccttgctgtagctacttaggactcagagttgtgtaggacacagtgtgagctccctgtctcgatcaatgcaattgtgtggtctccaggcagccccctacattaatctcacggctcatggtggttaagggattctttcagggcaaggattttaggagttcgtggtgggaatgtaaatcattagaggtctctcacttaccccttcctcactttggagagcctcttcagactcctagcccatccccggcaagcaggctgccttgcttcccctctccttccatgcttttgatgttttgtgtcacttctttgttgaattcgaatgttctcttttagatgatgtatttgaagtgtaattctctacgtgctattttggttcccctttatgaagaaggcaagtaccagatgcttcaggttagacatctcaaagcccctcctagatattttagaaagcttttgagcagccaaaagtttgactcaggtatagcttggttcttttaaaagccagtgttataatattctttagcctttcgaattttaaatataaaatttgatatattgaacattacaatgggtacttcgtgcattatgcatctttcgttcttcttcataaactcctaactttctatttctactctaccaaattcagccacttcccatgaagaaaaccagaataaaatgccctgtttcaaattcagaatcaggttacatttctggtcaatgattatgcataagaaatacatttttggtgaccaaagctctgtaatttttagtgactaactatagggaaaacatttacaaagaaaagatgtagtcagtgtctatgtagcttacacatactgatattccccagagtccattcgacatgttctcatttcataatgcattgttggtactgcctatctcaaacaactaatttaggagcagtttacacacaagaggagtggccaaaattggaataaagccaatcttctcaacaggccactcacatgtggcatctgtacacatggcctggatgtctgcacttgatagaagatgaatagtgccaaccctggcaaggggggaggtagattaagacctgaattccagaacttagtatttttcttaggatacagaagattaggacagttaataaaaatgcagagacacacatgaaaaaaggtgatacgaatgtaagtgcaatcaaggatctggtatcggaaaacctgcctagataactggcatcccttacagaaaaatgctttacccaggtctgcctcatcttatgagccaggcttacatttggggaaagaccaacaatttatcggccatttgttgtgttgaaattggtttatgtagatcactctgataattgctgctgggtcatagcaaaaagaaagtgggatgagaaaagcagaactaaaagaaaaagcaaaaacaaaaattgatactcctgcaaagatcagactttcttttaattctgattttggcaatgtattggtgagcaactggtgacatggtttgcttggctataagaatctctgggtcaatggggaatagctgtttattcccccagggaagaatttcatgaggtcaggtgagtacctggatagcccatgcagcagaaagccactggtcaaattgctaataatgatggcctcgtgtttagcttggtagaaaagcagcaactcatgtcaaggaaaaggtcggaagagagttggtgtatgatctgggtaggtcgtcatgcaagagggaacctgtcccaatacaagtggtgccacaagtccttgagctgagggtgtcagggaatcaactagtatcaagcacatgttgaattcattagtggcagggacccacagtgggggaaatcccagctagctatggtactggaaactgtagtccctgtaatttggtgggttatcatcatcctagaatttgctactagcctagagaatgccagctttgtaattggtacacagtaccacattggcctgagaaaggaggtagttaagggccaaaagaggcacaagtagtaaccaggttaaagcatgggtgaaggaagttgaaattgacagacagtccatggtaatgttcttaaaatatgagtacttaaaatatgagtaccaaattaagcatgaaacccagtcaggaccctgttgattctccactcagccctgatgcaaatattggatctgtaaatcacccagggtctctagggaggggaccatctgctgcaatgaaagggcccgaggtatactggaagtcaatctaggaaggcccaaaaagaagtgtagtggaagcatacactgaaggtccttgagggaccgaaatgcaggttgggaagagactatactagcttccctgcagcagcagcgagcaagccctgttacctagttaggatggaatatatcctagaggaagctgctgctatggcagtccttgggaaatcacagcatgttctagcacaaaagccaaagtggagccaagtagtggatgccaaaggatagtggatatagaggagttaaaggaagagcagcttttgacaatgaaaaaatgagggtaatctgccacataaattctccttatcacagatgttatacctcaatggagatggtagagccagccagggacatttcgaa

SEQ ID NO: 85 - DNA, 171423 bp, Homo sapiens
gaattcattagtggcagggacccacagtgggggaaatcccagctagctatggtactggaaactgtagtccctgtaatttggtgggttatcatcatcctagaatttgctactagcctagagaatgccagctttgtaattggtacacagtaccacattggcctgagaaaggaggtagttaagggccaaaagaggcacaagtagtaaccaggttaaagcatgggtgaaggaagttgaaattgacagacagtccatggtaatgttcttaaaatatgagtacttaaaatatgagtaccaaattaagcatgaaacccagtcaggaccctgttgattctccactcagccctgatgcaaatattggatctgtaaatcacccagggtctctagggaggggaccatctgctgcaatgaaagggcccgaggtatactggaagtcaatctaggaaggcccaaaaagaagtgtagtggaagcatacactgaaggtccttgagggaccgaaatgcaggttgggaagagactatactagcttccctgcagcagcagcgagcaagccctgttacctagttaggatggaatatatcctagaggaagctgctgctatggcagtccttgggaaatcacagcatgttctagcacaaaagccaaagtggagccaagtagtggatgccaaaggatagtggatatagaggagttaaaggaagagcagcttttgacaatgaaaaaatgagggtaatctgccacataaattctccttatcacagatgttatacctcaatggagatggtagagccagccagggacatttcaaaattttaggaagcttttttcctttggtcacaatgactcagaaatgctgagattcagtgagaaaagtcagggatataatgcatcttgcaatcaaataattatgctacagactgcacaacttccaagttatctcactagatgtttacctagattagtaaattctacctatattttctgagcctagagcccaacttcttttataaataaacacaaaatattgttgtatagtttgagcatacattgagtcttccaacaataactgtaaattgagagaagattgtgtttggattgattggaatgattccataaacttgacagcctaaataacaaagagaagtttctaaaagaaaagatgtttatttgggaataggacattgcaataggaatatgcaaactatgtgcgtattcagggaggtaaagaaagacaaaggtttttaaaggaaaaaatgaggaggattacctaattgttttaaagtaattattttaattgcctagaaagagcaataaggagggtgatgccaggccaagtttggacaggcagttgctgtgcggatgtacttgcataagtatttttttgtataagattgcaaatggcctttgttcaattttgtggtttttctagcgtcttttttgttatcaggcacacaagtgtgagaagcctctgttcatgcctttccctggctctatttgtcagggttttcttttttttttgagacagagtctcactctgtcacccaggctgaagtgcagtggcacgatctccactcactgcaacctccgcccactgcaacctctgcctcctgggttcaagtgactctcctgcctcagcctccccagtagctgggactataggcgcgtgccaccatgcctgactaatttttgtatttttagtagagacagggtttttccatgttggccaggatggtctcgaactcctgaccttaggtgacccacctgcttcagcctcccaaagtgctggattacaggcatgagccatcatgcccagttgggttttcttagtattagtgacttcatttttactctgacaactttctcaagctgttcaccataacagaaaattatgttactgatagcaatgctgctcaggatatttgggctacctacacaacatgcctgtgttggcagaatttgtactatcacattcataatgactctacatgtaactgcaaacatctggatgcttaattatgtcttatggcacagttgtatctgagtaattaggaattaaaattaattaaattaaaaaaatatagtagagaagataaagccaaaagttggttctgagaaaagataaataaaatcaataaactgctagcaagagtgatgaaaaataaggagaaaaactctaaattaccaatattagaaaggaaaaacattactaatcatgcattcatcaagaagataatgagaggatattatttagaacactataccaattttaaaatttatttttcaaaacggtcaaatttctagaaaaacaattgctattgtcatatgaagtaaaggaagttataaatacctctatatctattaaagaaattcaatttgaaatttaaacccttcacacactgagaaataacatcaattttactcaaggtcttccagaaaataaaaaagaggaaacgccttctaacttacttaagagctaaacattttcttgattcctacaacccaacaaagacattctcttttctaaaaaggaaaattaaagacaaggctctttcttcaacttaggtaaaaattctaaacaaaacacttgcaaacacaatccagctatatataaaaaggataatatatcatgtgcaagaaggacttattctgagcatatgatgttggtttaacatttgacaatcaagcagtgtaattttgcaattaacaagaaaaaaattatatagtcttctcaatgtatgcaggaaaagcatggtaaaattcaacacacattcatagtgactcatacatagtacattagaaatagaaagatttttaaatctcataatgagcatctcaaaaacatacaaatgtaaacaaaaaataatcttattaaagtgagaggtgacagctttactcatgtgattgggaatgaaatatggatacatgctaccactccttactgtatagaacaggcatcacaaacccaaatacctgtaagtttcatgaaggttacataaatatttgaaccaggatggggtataaggcaatagagagtggtgggcctatgaaatttgagaaagtatcttctgccagaagtcattcaaattcaattacaaaaccaagacaaaacaaaacaaaacaaaaataactgggccagccaaacaaaatattttcagtacagatttagttggcagtctgcaaattggtgaacttggttggggttattttgggccctgcctttgattattcttttctatacccagctgataggatactaaagttcacatcttagcagaaaagagtaatcatattgattaatacctgaatgagaacttgtgtttaaatagatgccaaagccataagctaaagtttgttttatttggaggaaaaggctgaaaaggcaagtcacataatagaaagaataaataataatggggtacaatatacaaagaaaggcttagactgggggtcatcaggaatagtgatataatagcaaaaccacttgtttatgaattattctaagaaatctcagggtgcctctgcttgaatttatcaagtgtattcactgtacaaatgaatatgaatgaaagagggatttaaaaatgcattagtgagttggttggtttcattcatcaaatcctccccagcattttgtcattaaaagtgctttgcgtataacagacatttgggtgaaatctctgaatttaatagttttccattctgatatctactgtcttagatgccaacaatgaataggaacagccctctatgcctctagactggtgtcatcagcttgctcttgaactcagagctgcaaacacaagaaggtgaaaggaaggcaggccattttgcttaggaaatgtgaccgtggttggcccagaactgcttccctcgattctgcagggagagaggttcatggactctttggtgcagtgactttctgaatctaagctgaacttggattttgtattcccttggaaaaccttctgtcagttttgcagagggtgagttctttgacttttttctggaatgaagtggagagatcctatctagaagacgaaaaatctgaaccctatctcatcacctaccagttcctttgatgcatggtatagatttccaggtcagccaggcaggcaagacttacccagagtcctcaaagcttacccagagtcctcaaagcttacccagagtccgcaaaggaaatttgatccctgaaacaagaccaaagagagctggtttctcacttagtggccagcctggattgttgcccatatgccccctgccgagcatggcacgtggatgtgtctattttcaaaaatgccaatttgcagtagtctttgactgtgtttgtatttactgtaacaactgtatgttttagatgctgtgacttgcattcttctagttgtctgcaggttttcttgacctgaagagaactgagaacattggcagccaccaagagcctaggcaggaacaaagggagataattccatgctattttctacaaactccaacttacctttggactaaattattataaactaccaccaattgtctccaattcattaggttgccttttgtgtcttcctgaaaaccaaggatagcagaagaaaaaaaacatctatctgtctatctgtctatctatgtatatcttttgttatagcttgtttgaagaatatagaattaccacagagcctggtaagaccacttcagttagagtttctcatatgtaagctagctttaaggagtttctaacacttactatgttaattaagttgcataaatattacatggggatgagagtttgggtgcatgtacaatttaccaaaacacgattcaaagctggcaagtgtcttgtttctgtttgctatgaatggtgtcatttatatcagaccccacttattgatacttgccttaaaatataactttttaacatgaaatatcaaactcttggggacaaagtttgaatttcttagaggtaagtctaaggtttcattagggaaggaaggaatagatctgaagtcggggaaatagattcattactctgggatcttgtggacagagatcctaatttgttaatgaatagactctgtgcctaaatagttatagtaattagcaagcactcagtaaatggctgttgaatgacttagtggtggggaagtttacttttggaattaaagtaactcaccaaacatacttttgaggacagacttggccaaaactatgggccaaataattatgggccacatctttaaaattccataaattaaatattttattaaataggaaaagagcaactggaaacatagcactggttttaaaaccacaaaaaaatccctggaaaaaacatgatacaccatgggtttcagtgacctctacccacctgaaattgtgaagatctaaaaaggaggcaaatgtcaggagtgaagacaacccaagtatcttccaagagtaaagaaggtatactggcaagactgatgaagtttacaaacacggcaaatactttctaagagagatgtttatagcagctccatttagtgaataactattttgcagtagaaaaaatatgtttatcagcatagcatcactttgggaaaatcctccttcacattttttttatctacatgactcaggaatgcactcttttcactggagttgcgaagctgggagaatgaagacttaagttgttcaggttcatttttatcaccaggcagtaagggtctttcagagaatgaaaatagtgaaaagaaattcagagatgagagatgaatacagatcattttctggtcatgttatgagagtatgtggattcagctataccggaaaccattctcatacttttcatttaatgaaaaactttttaaaatctatttttggcatatttctctctattgcttttcctctgtccttatccagcaataaaatgtttcccttttaaaaattattatcaaaaatatttgtactttactaataaatgatccatgtcttcattaaattccttaatgttccactttgtgagtatcttttccaaataggaaactatttgagactttatcatctgaacacaaattttttaaatgtcatacagctcaaaatgcttttatagaaactagttgagagcttcatccagctctttttcaaaaggcagaagagttgttgggaagaataaaaagattaacttccatgtataaacaaggttattgaactaaaagaagtaacacaggcattaaaacctccattttgtcttgtagtcagcctctgaatgtctagccccttctagatggagagttgggttagggggaatgaaagctccactcacatcttcctgcatccacaattctagcatttattactctctaattgaaaagtcacaaatgccagttcaccaagtacttgagagagactcagatcttccttcctccctaatgttatcatctcaggctcccggagatgggacttctgcttgtgaaacttgaactccagtctttcctccctttgctgtttcaacttcctttggagattgtaatcatccttcaagcttgggtgatttatgctcatagcatttcgctaccaatattgggagctaggggtatctatctattccttgtagcaattgtccttctttatttatccccaaagccctaccagtcgaatttaggggtttagtagacaaattcaactgatatgacttgctcacaaaaattgaccccaaacaaccagcagcctcctgtcgtgcactattgtatctaaacctgacatcctctggttccccttctctcctagagaatcttggaattcatccccagttgtagacaaagtgatgaggtcattacaccaataacatttatgaagtaatttcagatgggcttatagatcaattttctagacaaagacactgaaatgtaatgggagcaaggcagccaaactgagcagaagtaggtgtagcatatcccaacacagctgctcctggtccccagaacccctaatcaatcagaatactccagtgcaaggtggagtccagccagatctgagaagctgtattttgcagtgtcagctgttctcataggcagcagatgatttctggtttctctggcctgtttctaatatacattgatatatttgcctattcatgtgacaataccacactattttaattgctgtagctttatgataagttttggtgtctgataaataagtcttttcatcttgcatttcttctttaagatggtcttggctatcttaattcgtctgaatttccttacacactttagaatcagcttgccaaaatacaaaagatttaagcctataagagttttaatcacatcattttgaggataattgatataagatggagtgttataatccattcatattttataacacacagtgtaggtttaagttttctttaatttctcttaatgtttgtggctttctgtatagaggcctaacacaacttcagttaagatttattcctaggtatatgacgttgtgatgttattataaaagcatttgttaaattttattttctgacagttttcaatatagagaaatgaactgatctttaaatatttttgtatacagcaatcttgctgtatactctttctaattcttatgatttgtctgtgaattactttaatttttacatagaatcatattgactgcatatatcagaagtttacctttgcttctttatctctgaactttataccattcatgtcttttttgttgccttattatattgactatttaactatgaacttgagcaaaatgctgcatagaaaagataacacctgtgccttgttcccagtttcaaagggaataattctatttttatcactaagtatgacatttgctgaagttctgttgtttttggttttttgtagatattctttttcagattatcaagggtctgttttaacctagtttgctaagagtatgtgtttttcttaaatcatgaatgttgaatttcatcatacacgttttcttcttctgccaagattatcatgattttgttcttcagtctattattgtgtcacatactaagagtgagatgccatacaagtgctgggagtaaaaaaaaaagttctgaggcgggcaggagcccgactatttcaagcagacatcacactgtttatatgaatagcaattacaaataagtacatgtaaacaaaagccataggttgcaaacatagaaaagttggatacagatgttgagaagaagaggtaccaaaaggaaaagcaatgacattttaaaatatctatgagagcttagcattattgcaacttgttaagcacttactacatgtattaactgacttatcctcaaaacaaacctattatttccacttaagagagaggaagctgaagctcatagtggttaaataacatgtccaatgttgcccagtgaagtgctgatgatggaattccaactggctccaaacctcaactctcaagtttcttttggagaaggcaacaaaacatactgggtaaggatttgtacagggtttagttttgataagcaatgttttttgaagtgatattcttataggtggaaatattaacagataagaagaaactgtactctgaactatttcacagagactattcatgtgtagtttatttataaagtctgcaattcttttattctgggcactgtcacataaatttctctaaacgaaagaacttaattgtgtgctttaggggctgtgggcagagaaaaagattgaatgcttttcttccttgtggtagaataaattcttcgattcccctcttccttcctacatgaaaactgagcattctcataatacttcctaaaacagcgcctgttcctgttgacagtgttaaccacttcaactcttcagtgatgcgctgtgacaacatcacgttccttaatctttcttctgttctcctgtttcttctggcttcttcatgggctcctccatttatatttaaaatgtcgaggtcaagagatcgagcccatcttagccaagatggtgaaaccccatctctactaaaaatacaaaaattagctgggcatggtggcaggcgcctggagtcctaggtacttaggaggctgaggcaggagaatcacttgaacctgggaggcggaggttgcagtgagccgagatcctgccctgcactccaccctggtgacacagcgagattccgtctcaaaacagaaaaaacaaacaaacaaaaacatgtcaggaaatgatgagcagtaaactgagaaggatgttaactctgaggaggaagaaagaaaaatagagacagtgaggggtatacagggctctaaaattcaggttgaaagattttgtgctaaaatagggcaacactttatgtgaagaatgttcaatatgttcttctctactcttttctatgtgtttgaaatatttcatcacttaaagaggaaaaaataaaaatcagaatgggttctcgagttttgacagctatgaagttggtgaatctatgactttagtctcacgttctcattttaggactctgtttctttctttataagattatttttcattctcaagttctcggaatgcttttatgatgttatgttccactgctttcctaatttacaccatatgaaacttcaaaaggtttgcttaggcaatgcattcaaattagttgttttagaaggggactgcaaggactgtcttattgcactgaaggcagtgccctcacttgaatttaggctcttctgttaactgaataaatgaacgtaaaatcagtgtcttaaattagcatcacaggtctaaaaataggatgtgttatgccatgctcagattgggtcaacagtgaaatgaggtatgtatgtaactaaaaaagagtcacaatgccagcaaatgcaaaggagaactttatttctaaggggggtatgtcctgcaggtggaaagcgagcctccaaccttgaatgtaaagccatgattcaaatgagagaaagaagaagtagttatttatgctaagtggggaggcagaacatacacattcaataggatataggaacatgttatgaatattcatgaaaagcaccaaacatatgcatattatgtgtatgagacatatggcgacgaatgacccatgttcgctttgggatggagatttaacattttaatgcattataaataggtcctacatggtaaaaggtgaaatgtagggaacaagtccaggaactgtgcatcctctggagaccagttgaaaccagtctgcagccggcagtcatttatcaagaagggaggtggaggcaaatgggagatggccagcctttgtcctgccatggccaggaatttagcattttggggtcttttagccagaggagaatccgttagtctgtggaagatatttaggacatatatttcagtcttcagttatgtgctgaagaagttttcccacttgttttggaaaagtgtatttccattcaactcaccagagatcggggtctcctcctaccatttaatcccaagctaaaatttcagaaaatgtttcccaaatgatttagcagaacgtgaccactctacttcaaaatggcccttggagtggacaaaataaaatttgggcttcagtactcttcctgactcgaggccttcctgagacctccagccacacccagggcagttagagcaaggagctggggagaagtctccccacacaccagcctccaccagaatcacctaaggggatcaactccttcaaaaatattctccaaatgtgaaagatgacataatgaagctgggatttgaagagctcccatacgccccaaaatctgaggaactgaagaagtcctggtttggtctcttgaggcctgagcaggggccaggcctcctccttatgttaattagaacttgctttccacacagtcataaagaaggaactggtaaaactcctaatcatccaaatgaagagaattattgaggaaaatcaggctgataaataggagaatgaggggaaagagagaggctatggcttgggagcaaggataaagtctttgttttctctttgttctctcttgcatctcaccctccacttcttaaattctctaaaccctaaaatattgaatccattgaaatcttggagggccatggcagtggttcttgggaatctgaaggcaagagaaactgtcttaattcctttaatttgggtcagaaataatgaaaagcaaaagatgtgactttagtatcatcgaggtagaggccagaatgcttgggtatgttaggatgaagccctaggcccagggctaaagtagatgatgctaacctaatggaaggaaattcaatatttgaaagtgttttcttccaattctgaagaagttgtatttcaaacatagaatatttgattgaatgtaacatagttgtctgtccccaggagttatctactgtggaggctgtgcctgaacttggaatggaaggttatttttctcaggttcttgcttgagggtctctaggtctcaacatgcagggtaagctgtgtaaaaacggccaaagacagtccatattctgatatatgtgggattctatggagggattgtgagcaagaagctggagacagaaatgaagatccagcacaggtgtcagccagccagccagcccgacaaacggcacagaaattaacaagttcttaaaagaacattgccaacacagactttaagagtaaaaaatactaggtcctgatggaatcgaggatagagtttatgacattaatattatcctacaaggagattcagtgaaaaacctgaacaccatctccccataagggaagctaggcctgcgatgtggagggcacatgacccgggaggaagtcagtggacccccatgcaaggggaccacacctgaagggaccagatgcaaaggagttggaagatggcccaacctctgccagagacatggcaatccattccaagctgagccaataattgcagggtccactacctttaagacagctctgtacacatctcttgaggaggacttcgatcactctcctggctatcatacaaagataaacacccacctatcacttgttgatcattcagcaggaagaactgtctgtgaaccaagacagtcctatcccaggtgtcctcaatcagaacttccctctcttcaatggcccaagacatccataaaggtttcttaaaaagacgttggggcgttgacatcgagaaatgcaatggagtttggaaaggaaagcttctgcacctgcaagtgaggactagcgagaatgggctttcggtatccacctgggtcaagagagggacggcactcaatcctgatgccacatgaggtctgtcatcctgcctccagaccccccaccactttaccctgctgcttgactcaacctcatggtgcttctatgggcttctctctatggactgtctgttcataatggttaactgcatttagggagaaaaaactgagaatttcttctcccttgaaagactagtactgtacatttttaatgatttttttggactctataactttcttcataaaattcaatagtaaaatgtatttatttatgtaaatatatatttatagatatataaaatgtatattttttattactgagctacacacacacacacacacacacacactgtgtcaaacctagcaaattgtatctttaagaaatcccataggataactatgaatgcaggctgattacatttttttaaaaatatgactatttttttaaaaaaattaccctagaaataattatctctgcttgttcccttttttggcttaactttcatgtgtccatacccttgcaagctgttagtgcagtgctgacagctggtctctgactctggcttgccttcttgattttgccctgccttctccaactggtcctcgtgtttatcttctatcccaacacactcctggccgactcctcttcttgagttaccggtattttgtggccagcgcatcaggataattttagcaaaggcagaaaaggaaagagttgtgcgatttttttattcttcctaatctctctttctggagaaatgaatctgggaaaagaaaggggaagtccaataggaaaggccagcatagattgctgtgcttctgaaaagagagaggattatacagacggctggcctggactgagtagttgacccccaaggggaccaccacaaggggcccacagctctctccctgggattgctccccacttcacccatgctacttatggtggtagatggagttgaagggatccacttaggagctctggggccctggtggatcctattccataacaggacactgcatcagcccagacctgaaatgcctggacacattaatagcttctttacaatttttttttttttttggtggggaagggggtggtgatccatagcaattcttggttgattgattacttctgatttcaagtaagttattattaactttctggctcatacacaagttgactgctgtatcctttgtaccaataactttatcagaacaacagctgaatatattgttattctcatctctataatcattcccctcttcaaagtaggtatcatggctaataacattaatagtagcaaaatagatggcactttcactggtcaggagctgttgtaagtcgtttacaaatattaactcatgtaatactcatgataaccctgagaaagttactctagtcattcttatttaacagatgagaaaactaagcagagacaggttgaataactttccaatctctctccacttaccacaagtggagctggaagtcagactgagatagtcggactctaaagtctaagttttcaatcattaaattatttgtctttatacaatcatcaatgcctaacacaaagtgttaagtaaatgagtgcttaagaaaaatctgagtaaattgttctaactgaggatattaaaactgggatctgtagcaagtgctttaacatagtaaagtattttctttggtatactgtcaacctatattggaaaactgagccttcaagaggtaagccctaaccccttgggtagagctagggttgaaagccatctgctgattccatatccagggctctgcttactattctgccaagtgatccttctctcaggccttcttggaagagtaacccagacaactgcaggatcccttggtcttcctgtggctcaggcctgctctctgaggccctcacacagcagattgaccaaaggcctcattctagctcattttgtgtaaaaagggataagtgcagaaggaggcctggggcaccatggaaccacagtgtccaagggtcctcactgtggtcctaactaagcttcatccaatggcttgactttcaaatcaaaagtgagaaagtctaggttctgttccttccccatcagtaatcctgtgctcttgaatcattcccattctgagtaagagcagtcagggtgaaaaatcaggactggctctcagcctccaatcccattttccaacaactggaaactctcctatttgggtccctcaggaaggcttgagcttctgggaatccacctgaagaccaccaaggtagttgttcattgcaaatgacccctgttttgccttttggattcaatgaccaacaaaagtcacaatgcctcaaattaagatacaactttttaaaaatgtaaatttaattacacagttgagggtcttcagataaatcagggagagttttggtttacaaataaaggcacaagaattttgctttatgaataaagtcacaagacttatggttcacaagtaataagctaccacttttcatgatttttgccaagtcatatcacttgactactcccactttgtcagtgaaactaaaaccctctgcttctcacatggctttaatgagatgaggtaatgcatttagtgggcattaatttttttgccctttcatacaagcttagatttcccgcttcccctcttcattatttattctcaatcacctttagtaaaatactttatttcttttttcatcctgttctccctaggaaacaagaaaaggtcaattcaccatctttgtaagaaagagaaaaaatagctttgggagattttacgaggtggctttctaatccaggcacagggctccagtctgagtctttgtttagaaaagagtttttcacaagatgtttttccacagatagcactttggtggctttacaggcttctgtggggagacggtcatctgtggtggctcttccagccaagcattacatttttgttcttcccagtgatttcagggaaggagactcggcttatagctcaatgttgactgttatcagctccttacagtataccacatgcagtctagtaattcaaaacggtaaattatttgttaattattgaaggttaattgtagaagacctagaaagcatgtaagtagaaaagttggtctccaaaatctaccacccaggagattccctgttgtgatgttgatgatttaagaaaacattacacgtgcacattacacctttcccagcccaggtgtccctcagcaggagactggataaactgtggtgcatttaaacactggagtaggattcagcagtacaaaggaatgagccacctatacacaaacaatatggacgaagctcaaaaaataatgctgagtgaaaaaagctttacatgccgagtacacattttatgagtccactcatatgcagttctagcgcaggtaaatcttgtcgatgatagaaaaactggaagaatgtctgctgtggcaggacaaggcagaaagtgagaaataggcaatgaaactttctaggtgattgtaacattctatatcttgacagggatttgcgttacacaggtgtatgcatttgtcaaaattcatttaatgatacacttaggttttgtgtatttcatttatgtgaattttacctagaaaagtataaaaaaattgatatcagttaatcatatgcaaactatttagatggaagtaaactgatatctgcaggttattttgaaatgcattacgcaaaagatggattgatggatggacaaagatagatggacagatctgtgataaagcaagtatagtgagagtttaattaaagaatctaggtgtaattacatgggtgttttctgtgcaattcattcaatttttctgagggcttaaatgtttttcatattcaactgtcagtaagaaaaagaacacaacatgtttctatgtcaaatatgctcccacaacattttaaaggacataaaatcaacaacacctaaagaatggaatacaataccatcactgttaaacatgtaggtttttttaaagtttatagtacatcttacacttagctgtttagacacttgacttattagatccttaggataaattcctaccaacatcaatgttgactcaataaagaattacagatttggttcctattgcactgttttcctcctgaagatatgggacagttttctcacttactaaagaaaagacatctacttcctcatatttccataaagattgagttttgttctttttgtcatctttgctaatcagtttgatatttttaatggaatacccttatcatttattatttagattaatccctgaggttttcagcaacaagagaaaaagacttaaaaaaaagaggagagaattttcaatgcccagtgtttgaacctcagaacccatctgaatttcaaagatcgaaaccatgacagatctccatcctattttcatgatttgaaatgcaatcagtacagtcatccattggtatctgcagggtattggttccaggacccccacatgtatcaaaatctgtggatgctgacaatctgcagagagatcgtctaactgaaagcaaaaatcagttctatctagtattttctctgagactattccatgaatgtatatgtgatataagtttgtgggaggcacttacccttcatgctatgatatcactatgctttgaaaattgtaatttgggagttgcagatgctagcactttggggttattagcaagctgtataaaaacccaatgaatgccaagcttggatcactcatatctgaatgatgattaaaaactcatacaattcctgcaccaattcaatgtgccagaggaggcagcacacaaacaaaacactcacttggctcctgttctcctccagctcattgtggtgtagattacagtcctgttttatccctttctctggctctttcagcaacagataaaaccactgaagccactcagcagacaaacacaccagctcacgagcccagaggacaattttcctttcccagcagcagcacatggtccttccctgggctttccagatgacctttatagcagcagctgacttcttgaatggtttgtattttgatgggctatctaagcaaaataacaaagcagtattgccttgtctaagagcctgagattcagattttagatccatcttgcatttggtttgatttgaaaatgagatttttagaagacaaaagcaaatgtgtgtatgtattcctcatcaaggtttaaaccattggtgagcaccaggtgcattttacaatttccaaaaatgatattaagtgttaaacaagttttagacagtattccaatattaggttctaaaagggtcagccaatttcatccgcttgaaaatcacgttatctgattctctataaaagttgatactaacggttgatttcctgttgaaatttcacttttctctctgatttcctcgacattgcactttctagtttccatctacctgcctgaacatctcttttctgtcttgactggcttatttcatttatcctcaactctagaaatacttgttattcaaacttcaggcttcagctttgtattctatcttgactttctcctataaaattaggagccaaaatcagttccaaactttttggatgggttcctaaaagtggaattaaatttaaaattcttataatatgtatataaattggtacaacttgtttggaagacaattttcatttctgccagctgcagagaaaaacaatttccctctgtacttgccaagcaagacccttccatgctcagagctggatagatcaactgatgaaaaagggtctcatccaacccttagccagtcatatggatcatcgtgttctttttctatttttaaaattaaaatcgttatttttttttcttatttatctctaatcatttccttttttttttttgagatggagttttgctgtgttgcccaggctagagtacaatggcatgatcttggctcactgcaacctctgcctcccaggttcaagcaattctcctgcctcagcctcccgagtagctgggactacaagcatgcgccaccacacccagctaatttttgtatttttggtagagacggggtttcaccatgttggccaggctggtctcgaaccagtgacctcaggtgatccacccacctcggcctctcaaattgctgggattacaggcatgaaccagcgtgcccagccaaccattttctttacattaaaaatagcccattgctcaatataaatattacaaatctttttccagctttatttacattttaattttcaatgtgtttttcttcattgtgaagagcatttaatgtagtcatctcattttctatgaactaaagaatgagcacagagctgtgatggttaagaaacttggtgagagcggtgaaggcataaattaattatcgtatcagaagaaagagctaaatggagaaatgtgaaaaaattgcagacacaatatctattgaccatcatttcagtgtatcaattttctttatctgttctcatctactatttaatttatccatcaatgttttatttcaattcctgtattttttgagttttgaattattaattctttcatctgttgtatagaccgaatcctcctcatagtgctttgtttgcaaatatgaacatttaatgtgctcaactgagtgtctatttttatttaacttttattttaggttcagaggtacatgtgaaggtttgttacctaggtaaacttatgtcacgagagtttgctgtacagattactaaatcatccaggtatgaagcccagtacccaatagttatcttttctgctcttctccctcctcccaatctccacccttaagtagaccccagtttctattattcccttctttgtgttcataagttctcgtcacttagctcccacttatacttgaaaatatgtggtatttggttttcacttcctgggttagtctgctgaggataagaatctccagctccatccataattctgcaaaagatataatcttgttttttatgactgtgtggtattccatggtggatgtgaactacattttccttatccaatctgttactgatgatgagcatttaggttgattttatgtctttgctattgtgaatagtgctgcaatgaacattcacatacatgtgtctttatggtagaatgttttatattcctctgggtatatacccagttatgggattgctgggtagaatggcagttctgcttttagctctttggggaattgccatgctgctttccacaatgattgtaataatttatactcccaccaacagtgtataaatgttcccttttctcaacaacctcaccagcatctgttatttatttacttttaacaataaccattctgactggagtgagatggtatctcactgtggttttgatatgcatttctctaatgatcagttatattgagcttttttcatatgcttattggcatcatgtatttctttcaaaaaacgtctgttggccggggcagtggctcatgcctgtaatcccagctactcgggaggctgaggcaggagaatcgcttgagctcgggaggcagaggttgcagtgagccaagattgcaccactgcactccagcttgggcaacaagagcaaaactccatctcaaaaaaaaaaaaaaaagtgtctattcacgtcctttgcccacattttaatgtggttgtttggttttctcttgtaaatttaggttccttaaaaatgctgggtattagacctttgtcaaatgcagaatttgcaaatattttctcccattctgtatcttgtctgtttgctctgttgacagtgtctttctgttgctgtgcagaagctcttaagtttaattagatcccgtttgtcgacttttgctttagttgcagttgcttttgttatctttgtcttcaaatctttgttcattcctatgtctaggatagtattatttagattgccttccagagtttttatagttttcagttttatatttaagtctttaatccatcttaagttgatttttgtatatagtataaggcaggggtccagattcagtcttctgcatatggctagccggttatctcagcaccatttattgaacagggagtcttttccccattgctcgtttttgtcagctttttcaaagatcaggtggtcataggtgtacagccttatttctggctctgtattctgtttcattggtctatgtgcctatttttgtaccagtaccatgttattttggttgctatagccctgtaatgtagcttgaagtgggtaatatgatgccttcagctttgctctttttgtttaggattgccttggctatttgggctctttcttggtttcatatgaattttttaattttttttctggttctgtgaagaatgtcattggtagtacgataggaatataattgaatctgtaaattgcttggagccttatggccattttaatgatgttgattctttctatccatgaacatggggtgtttttctatttgtttgtgttatctctgatttctttgagcagtgttttgtgattctcaatgtagaaacctttcaccttcctgattagctgtatttctaggtattttattcttttgtggcaattgtgaatgggatctaatttctgatttggctctcagcttggctgttgttggtgtataggaacgttagtgatttttgtacattgattttgtatcccgaaactttgctgaagtttatcagatgaaggagcttttagactgagactatggggttttctagatatagaatcatgttgactgcaaacagagatagcttgacttcctctcttcctatttggatgccctttatttctttctcttacctgactgctctggctgggacttccaatactattttgaataggagtggtgagagagggcctccttgacttgtgccagatttcaaggggaatgcttccagattttgcccattcagtataaagttggctgcgggtttgtcacagatggctcttattattttgagatatactcgttcaatacctagtttattgagagtttttcaatgaattgatgttgaattttattgaaagccttttctgcattattgagataatcatgtgggttttgtctttagttctgtttatgtgattaatcacacttatatatttgtgtatgttgaaccaactttggatcccagggatgaagcctccttgattgtggtgaattagctttttgatgtgctaatttgatggtttgggtttgcaagtattttattgagggttttcccatgtatgttcattaaggatattgacctatagttttcctttttttgttgtgtctctgccaggttttggtatcagaatgatgatggcctcacagaatgagttggggaggagtcccttctcttcaattttttggaatagtttctgtaggaatggtagtagctctcttttgtacatctggtagaatttagctgttaatccatcaggtactggacattttttggttggtaggctatttactactgattcaatttcagagctcattattggtctgttcaggaaatcagtttttttctggttcagtcttgggacagagtatgtgttcaggaatgtatccatctcttctaggttttccagtttgtatggatagaagtgttcatagtagtttctgatggttatttttatttctgtaagatcagtagtaatattgccttcatcttactaattgtgtttatttggattctttctcttcttcattagtctagctagaggcctatctatcctattaatttttttcaaaaaaccaactcctggattcattagtcttttgaatggtttttgtgtctcaatctccttcagttcagctctgattttggttacttcttgtcgtctgatagttttggggttgatttgttgtggcttctccaattctttcagctgtgatggtaggttgtcaatttgagatctttctaactttttgatgtgggcatttagtgctatgaatttccttgttaacactgccttagttgtgtcccagagcttctggtatgctgtatctttcctctcattagtttcaaagaacatcttgatgtttgccttaatttcattatttacccaaaagccattcaggagcatgttgcttccatgtaattgcatagtttttagtggttttcttagtcttaacttctatttttattgcactatgctccaagagtgtgtttggtatgatttcagttattttgcatttgaggaagattgttttatgtccaattatgtggtcaattttagagaatgtgccatgtggcaatgataacaatgtatattctgttgttttggtgtgaagatttctgtagagttccatcagatctatttggttcaatattgagttctggtcctgaatatctttgctacttttctgcctcaatgatctgatactgttaatggagtgttgatatctcccagtgttattgagcgggagtcatgtctctttgtaggtctctaaaaacttgttttatgaatttgggtgctcctgtgtttggtgcatatatatttaggattgttaggtcttcttgttgaatttaaccctttaccattatgtaatgctcttctttgtcttatttttaatctttgttggtttatagtctgttttgtgtgaaattaggattggattgaaacccctgcttttttctgttttccatttgcttggtatattttcctacatcccttcatttcgagcccgtatatgtcattacatgtgagatgaatctcttgaaaacagcataccattggatcttgctttttatctagcttgccactctgtgccttttacatgggggcatttagcccatttacattcaaggttagtagttagtgttgatatgtgttgttattgtgttgttagctggttattatgttggcttgtttgtgtggttgctttatagtgacactggtctgtgtgttttaatgtgggggtttttattagctggtagtggtctttcatttctatatttagtgctcctttcaaaatctcttgtaacgtaggtctggtggtaaacttcagcatttgcttggctgaaaaggatcttatttttcctttacttagaaagcttagtttgctgaatatgaaatttttggttgactttttttttttttaagaatgttgaacatagactcccaatctcttttagcttgtaggattttagctgagaggtccactggtagcccggtggtgtttcctttgtaactgacctgcctttcctctctagctgcctttaacattctttctttcatttcggccttggaaaatctgatgattatgtgtcttggggatgaacttcttgtgtagaatcttgtaagaatcatctgtatttcctgagaacaatccttcttaaagttttataagaatctgaaaaggagggactacttatatactcattctatgagaccagcattatcctaataccaacatcagaaaaagatgatactaggaaagaaaactacataccaatatcttttacaaaaattgacacataaatcttcaacaaaatactagtcaactaaattccacaacatcttaaaaataatataaatgatgcccaagtaaaatttattctgggaatgtaaggatggttcatatattaaaaaatcaattaatataatacaccacattaacagaataaaagacaaaaactacataattatttcaattgaaaaaaatatttgacaatattcaacatactttataataaaaactaggaataaataaaaacaaactagaaataaaaggaaattacctcaatataataaaagccacacatgacaaacccacagaaaacaccatattgagtagtaaaagactaaaagcttttcctttaagatcaggaacaaaccaaggatgcttcctttcaccacttctattcaacatcatactagaagtcctagtcagagcaattaagcaagcaatgaagtaaatgttatcaaaattgaaaaagaagtaaagtacctttgttcacagatgatatgaactcatatgtagaaacattaaagattccacacaaaaatctcttagaactaataaatgaattaagcaaagtggtaggatacaaatttaacacagagatcagttgcagtactatgtaataacaaagaacaatctgaaaaggaaatttgagacaactccatttattatagccttaaaaaagcttatgaatttacttaatgacagaggcaaaaacttgtacaatgaaaactagaaaacacttccaaaaggatttaaagatgaaaaatcaatggaaatatgcaccgtgttcatggactggaagttttttttgtttgttttttgttttttttttttacagggtcccactctgtctcccaggctggagtacagtggcacgatctcggctcactgcaatgtccaccttcccagattcaagcaattcttctgccacagcctccgaagtagctggggctacagttgtgcaccaccatgccccactaatttttgtatttttagtagagatggggtttcaacatattggccaggctggtctcgaactcctgaccttgtgatccacctgcctcccaaagtgctgggattacaggcaagggctggaagttttaataatattaagatgtcaataatactcaatgcaatctgtagattaaatataatcatcccaacaataaatttttgcaaaaatagaaacatttattctaaaagttataagaaatctcaaagacccttaatagcccaaacaatattttcatttgtttatttttgagacaggtctcactttgtcacctaggctggagtgcagtggtgcaatctcagctcaatgcagccttgacctcctggggtcacgcaaacccccatctcagacttccaggtagctgggacttcaggcacgcaccactatgcccagctaattttttgtagagaagaggtctcactatgttgcccagactggtcttgagctcctgggctcaagcattctgcctgcctcagcctcccaaagtgctgggattacaggtgtgaggcaccccacctagccagcccaaacaatcttaaaaatgaagaagatatctgaaggactcacacttactgatttcaaaacttaatttcaaaagctgcagtaataaaaactgtgatactggcataaagacagcagacacattaacgaataaactagaacagagagctcagaagtaatcccttgcatatatgaaaataggatttcattttgacaagggtgccaagatcaccaatgaagaaagaaaagtcttttcaaaaaattgtagtgagaaaactggatatccacctacaaaagaatgaactcaaacccttatctaacataaaattaaaaattaactcaaaatggataagactaatcattaaagctaaaactataaaactctcaaaaggaaacaggaaaaaagcttcacaacattgtatttggcaataattgctcagatatgataccaaaggtacaagcaacaaacaaaaaaatacacaaattgaacttcatgaaaactaaaagttttcaagcatcaaaatgcattataaacagagtgaaaaagcatcctatgcaatgggagaaaatacttgcaaatcatatgtctgataaaagattagtatccagaatatacagatgactcctgtaactcaacaacaaaaacacaacctgattaaaaatgggcaaagaacctacaaaaacatttcttcaaagaagatgtacaaatagcaaataagcacatgaaaaaaagttcaacgtcactgatcatcagagagatgtaaacccaaactacaatgagataccacctcacacaccctaagatagctactatatatgtatattatacatattgtattattataatgcaataatattacatgtatattacatatataattacatgaataacatatattacatatgataatatagatgtataattattacatgtaatcatgtatataaggatgttacttgtgattatatattatattataatataatatataattataatatatattgtttatatatgcagaaacagaaaataaccggtgtccaggtgttgtctttgatgtggagaaaatacaatacttgtgcattgttagtgggaatgtaaaatggtacagattttagggaaaacagcatagcagttcttaaaaaaaattttttttaatgccaaatgatttcagttctgggtataaactcaaaagaattgaaagcacattcttgaagagatatttgtgtactctgttcatagcagcattattaaaaatagctaaagtatgaaagcaacccaagtgttcatcaatagataagtggataagcaaaatgttatatgtacgtacaatggaatattatatgcctttaaaaagaaggaaatactgacatatgctaaagcataaatgaaacttgaggacattatactaagtgaaataagccagtcacaaaagactaataccatgtgattctacttctgtgagatacctagcatattagtttgttctcacactgctataaagatactacctgagattgggtaatttataaacaaaagaggtttaattgactaacagttctgcatgggtggggaggcctcaggaatcttacaatcttggcagaaggtgaaggggaagcaagcaccttcttcacaatgtggcaggagagacagagggagaccgaggaaacaccacactttaaaatcattaactctcatgagaactccctcactacaagaacagcatgggtgaaactgcccccatgatccaattacctccacctaatcctaacctcaacacatagagattacaattcgagatgaggtttgagtggggaacaacaacaaaccatgtcattccacccctggcccctcccagatctcatatccttttcatatctcaaaatgcaatcatgccttcccaacagtccctcaaagtcttaactcatttcagcattaacttaaaagtctaagtccaaagtctcatctgagacagggcaagtcccttccacctatgagtctgtaacgtcaaaagcaaattaattacttccaagatacaataagggtacagggattgggtaaatgttccctttccaaatgggagaaactggccaaaacaaaaaggccacaggccacatgcaagtacaaaatgcaacaggacattcattaaatcttaaagctccaaaatgatctcctttgactccatgtctcacaaccatggcacactgttgcaaggggtgggttcccaaggccttggagtgccccacccctgtggcactgcaggttacagtccctttggctgctttcatgggctggcattgagtgcctgtggcttttccaggtgcacaatgcaagctgtcaatggagctgccattctggggtctggaagatggtggccctcttctcacagttccactaggcagtgtcccagtggggactctgtgtggaggctccaaccccacattcccctttcgcagtgtcctagcagaagttctccatgaaggctccggccctgcagcagacttctgcctggacatttaggcatttccatacatcctctgaaatctaggcagaggttcccaatgctcaactcttgtcttctgcatatctgcaggcccaacattacatggaagccaccaaggcttggagctagcaccttctgaagcaacaccttgagtcttacattggtcccttttagccatgcctggagctggaacagctgggacacaaggtaccaagtcctgaggcggctgtgcagagcagcaggatcctgggcccaacccatggaaccatttttccctcgtaggtctctgggcctgtgatgggaggggctgccgcaaagatttctcacgtgccctggagacattttccccattgtcttggctattaacatttggcttctcattacttatgcaaatttctgaacctgcttacattcctccccagaaaatgcatttttcttttctgccacgtggtcaggatgcaaatttttcaaacctttatgctctacttcccttttaaacataagttccaatttcaaaccatctttgcaaatgcatataactgactgcctttagaataagccaggatacctcttggatgcttcgttgcttagaaatttcttccaccagataccctaattactcttccttaagttcaaagttcaacagatctctaggccaggggcaaaatgccaccagtctccttgccaaagcatagcatgagtgacatttacgccagttcccaataagttcctcatctccatctgagaccatctcagcctggacttcattgtccatattactatcagcattttggtaaaaaccatttaacaaatctctaggaagttccaaactttcccacatcctctcatcttcttctgagccttcctaactgttccaacctctgcccattacccagttccaaagttgcccccatattttcaggttatctttatagctgtacaccactatcccagtaccaattttctatattagtttgttttcacactgttataaagatactacctaagactgggtaatttataaacaatagagatttaattgacttacagttctgcatggctggggaggtctcaggaaacttacaatcgtggcagaagatgaaggggaagaaagcatcctcttcacaaggcagcaggagagagagagcacgaggaagtgccacactttaaacccatcggctctcacgaaactccctcactatcatgagaacagactggggaaaaccacccccatgatccaatcactctcaccaagttcctccctcaacacatggggattaccatttgagatgagatttgggtggggatgcagagccaaaccatatcacctagagtagtcaaatacatagagacagaaactagaatggtggtggtaatgggctgaagggaggggagaatgaggaattattgcttaataggtatagagttacagttttataagatgaaacggttctggagatagatggtggtgatgattgtacaacattgtgaacatatttaatgttattggactgttttaagtccaataagttttggacttgcttaagatggtaaattttacgttatgtgaattttaccacaataaaaaaaaattgaaaaagaagttcactgggaaatgcatatttcgatttcaaagaaaatttgattatattttccctgggaatattatgagtattgctggaaaaggagacattaattgcagaaaccaagcccctatactgaatggaatcattacttagcccctctgaggcttgatttctccaactttctatgttgcatagcagagttacttgtaggattaaattaagacatggattaaaatttcaagtgcaatgtttacctagagaggaaaacctagcattttagtacctaataaaatttttatttcatgtgtttacgtaaaatgcctcttttaaaaaacattgattgaggaatatttgaatgcagaaatgaatttcttataaattgttgtgattggcttaaaatgcaaggcaaatttttaactgtcatcttctgatatgagaaagttaacattcagcttcatttctcatcatggaagtagctttgagctacaatacacacaatgaaatggtaaatgccctccctgaattgttgaacataaaacataagagtctcaggtcctcctgaaagcagacaacgtaacttctgaaagaaatatgtcccttgaaacaacttcttcttctaggctacctcagatcttcaaattccttcagcaaataaatatgccaacgcatctttaaatggtactgttgtgagattcaagggttaagactttataggatatggttgatctgagtttgttattaatggctggtcacatggcctttggaaggccaagtggtaacattggcttccaggagagaggatgttttggaaaatgataatatatgtgactatctgttccagtccatcaagtgttggcagaacctcccatcctactgtctgtttcctttggtttggtttaacctattttttagtaacatcagtttacgttctttcctagactttgggaagggagtttcatattttgcgtaagatcatatgagattttattgcaaaacctcaaaccatatttaatttgattgttctgaactatgccattgactttgagttccagggatctcattaaatgttgcatcttggtccaaaatttttctcaaaggaaatagaccattttttaggctccaaattgccatgcccaagtagataggtctttatgagagggctactatttagagttctttttgttaattctaaaacttctgttagtcagataatgactgttagtctttggctacaaaatttctaacagtcaacagaatcacagctgtggctaaaggatagaaactgatacttacaaagtcttataaaaatttccttttccttgctgtcaaggatcatagaagagtctccttgaaaccaacgtcgtattgatcatctgtccaatttttgctcaccaacttaatggcaacctatactacaaccatcagcctgataggatggtacaaggcccctcacctggagctaaccatcaggttccagaaacaatttctttctccactactgccatcttgctttattgttaggaggttacatgttagcaacaacatctgccatcctcagtcacttcgagatggtataagcacatgtgcagtcaccttcagtattataagaattaagaagaagcatgacaggcctagcagggactataatacttgggggagtttctttacccctgtggaaacttaggttctcaactgtgatgttacgtatcatccaaggtcattaaaaagatttggaataattattttgtgatatatgtgtggatgtgggatgtctcggcaagagccagccatttacacaattaaagagttattcctaatgaatcagtggagtaaaaccgcaagatgctcattagaacagagtaatggtgtctttaaaagtgattcttaaggaagcttcaagattgggtttgatctggtaaggctaccccagacactgtactattcttagaatgactcagaatcattgagatctgcttttacctagcttccacactggactcatatctaagaaccacagagagatggatgaagagaatttaaaataaatgctaaatgacaatagaatataagtatctgtgttggtggctcatacaccttctaaagagtaagtgtgttgcatacctgaaacacatgagtacattttatccaccagagaagcacaatactcagatgaagcagactatttatgagtttacctgaggaactctgagggccacccaaattacctgtcagaaaatttggataggacgaggtcctgtattagcatgatgagagcattagctagtaaaatgcagcttatcactatttaatgtgatctcatttgtattcatcagataaaatcctgaagtaagttctattacaagtataatacatgtaatgctttagacatagttaatcatatttaagtgacattttccattaattattataatgtgcatttaatgcattaacttgaaatatttcattttgttatggaatacaagaaaaaataggatgaataaaacttaaaatccatgttaaacatagataatgaataaattagttgtttgtaagatataggtgaaacttaccaaatgtataggtataaataatgaataagcaagtggcttttaagacatggtcagaagtccttacgtgagttaacacagataagccagacattaatatatgggacatggaccatagataaagaagcaaggattgaaggaccaaaaggcacctagtatttatgatataatgatacattagacatattaagcactcagcatttctgacaccttataataaccatccaggttgacacacattctggccaaaagtacaaataaaattgatagcatctcatgaagccagatggtgaacaacagctgtggacactacttatccctatgtctgtttgctagagcaattgtgtatattgttaactctgaacactttccatttgctaagccctcttgcttacctttaactctggtctttataaacccactctggtcctcattactccaagatcaataaggaatcctaatgcagcagaggaggcagatcatataaacatggattaaaagaaaatttagtttctgtggtctttctgccctgcttgccttttagacttgatgtgttaacctcccacttctctttcttctttctgtgtttctaattgatttaataaactgaatgattcaagcatcttagtttagtctgtgagcatctctggggtagcttgaagactaccattgtattaagataatttctcacatgacagttaagtttcctaatctgcttatgtatctctgaaaaaggatttaactagtgaattagagaataaactacaagcagcaaaaatcacagatgatcctttggagttgaaaaaggacaatgtgtatggattgccaaagtagaatcagatatgcttatttgaataaacattgttggtttgtgccagtagaaaacaactgggaaaagcctgacgacaattgtctagggttcttgtctggttttagaaaaggttagtacaaatcttctgattctttctcctattgactcagtcccttcagtccaaggcaagcattatttattttttaaaagcagtaccttagatgtattgaatgttacattacagcaatctaactgaatattagaatagataataaatatgaaaattattactatgcatatttaaatcaaattgttccatcttctttaatttatcatatttataatatgtgatcttttgtgcctggcttctttcatttagtgtaatattttcaaggttcatctatattgtagcatatttatgtaataataatatgttcatattcagctcattgcagtactagtcacagtagccaaatgtggaaacaaccaaaatgtctatcaacagaagactgaataaataaattgtggtatacattctgtataatattctgtcattattattatattattatattctgttatgatataataataacatattatattctgaattttattatatttttatatataatgaacacattttcatgttcttgctcaccatttgtatattttctttttttaaaataaagacagggtctcactctgatgcccagggtagaatgcagtggtacaagcacagctcactgcaatgttgaactcctgggcttaagtgatcctcctgcctcagcctcttgagaagctgggactacaggtgcaggccaccactcccagctaaaccatttgtaaatcttctttaaagaagtgtctattcaagtcctttgcatatttttatttgggttgtattatggtctgaatgttaacatccccctaaaattcatatgctggaacctaatacccaatgtgataatattaagaagcaaagcattttgggaaacaaagcatgagagtggttggagggagttgccttgccaattctaccatgtgaggccatataaaagttgccatccatgagaaatagtccctcaccagacactaaatctactggcaccttgatctttaatcaagagctgtgaggaacaaattcccattgtttataaattacccagtttaaggtatttggttatagtagccccagcagactaaaacaggttgcttatgtttttgttgttgtaatagaagagctctttatagatattctacataccagaccttatcagatatacaatttatatccattttagggttttttttactttcttgacaatattttttaaggtacaaaatttctaatttaaaataagattcatcttatctatttttttcttctgttgctctgtatcatttataagaatcaactgccaaatccaacatcatgatggtgttttcctcctaagttttctcttaggagttttacagtttcagctcttatatttaggttcttgatccactttgagttaattttttgcaaatggtgtgaggaagggatctaactttactttgcatgtagttatccagttccccaagcaccatttgttgaagaactattttttccccactgaatggtcttcatgccattatcaattgaccacagatgtatttgtttatttcttgactctcaagtgtatcccatttgtctttatgcctatctttatgccagtactacaatgtcatgattactgtacctttgttgtaagtttttaaaattttaagtgtaattattgcagctttgttcttagttttcaatgttgtctttgattgcacccaaaagaaaaaaatgcccatgtataaatttaaccaatgaggtgggagacttgcacactgaacactacaaaacactgctgaaggaaatgaaaaaatacaaagaatacctgagtaaatagaaatacactcattgttctatactgaggaagacttactatttttaatggtaataataataatcctatttagtatttcttgaaattacatgtgaatttgaaaatcagcttttccatttctgtaaaaaagatcattggaaattgtacagagattgattaaatttgtatacagctatgattattattgccatcaacaacagtaagtcttccaatatagaacaaggagtgcctatgtatttatttaggtattctttcatttctttcagcaatgttttgtagttttcagtgtacaagtatcctaccacattggttaaatttatgccataaattttcttcctttagatgctattgtaaataaaaatttttaaaattcttttctcattgttcattgtgtatagaaatagacaaaattttgtgtgtcaattatgtaccctgaaatcttgctgaattatttacatagctttagcagttcttgtagattctttgggcttttctatatagaatcatgtcatctgcaaatagagaagtttagttttacttgtacaatttgaatgccttttatttctttcttttgcattatttctctggctggaacttccagtacaattttgaagagcagtggtgaaagcagatatccttatcttgttcctgattttaggggaaaagctttcagtcattcaccactgagtatgttagctgtgtgctctttcttcataaatgccttttattatgttgaagaagttaccttctatttctagtgttctaagtagttttatcatgaaagtgtgctgaattttgtcaagtgctttttctgaaatattgttcttcaacaaatggtgctggggcaactggataactacatgcaaaagaataacgttggatcccttcctcacaccatatgcaaaaattaactcaaagtggatcaagaacctaaatgtaagaactgaaactgtataactcttaagagaaaatttaggaggaatacattgtcatgatgttggatttggaagtcgattcttatatatgatacaaagcaacagaagaaaaaatagataaattgagccttattttaaattagaaactgtgtacatcagagaacattactgatatggtttggctgtgtcttcattcaaatctcaacttgaattgtatctcccagaattcccatgtgttgtgggaagggcctagcgggaggtaattgaatcatggggcccagtctttcccatgctagtctcataatagtgaatatatctcatgagatctgatgggtttatcaagagtttctgcttttgcttcttcctccttttctcttgccgccaccatgtaagaagtgccttttgcctcccaccatgattctgaggcctccccagtcatgtggaactgtaagtccaatccaattaaacctttttttcttcccagtcttgggtatgtctttatcagcagcatgaaaacagactgatacaattatcaagaaagtagaaaaaaatttataacggaaaaagtatactgaatcaattaagataatcatgtggtgatttttatttgttctattaatgtgatatatattatgctaaatgattttcttacattgaaatacccttgcattcctggaaagattcaccttggtcatggtatataatcctttcagattcagttaaattcagtttgctagtgtagtttggtatatgtgtctaattttcgaatctatatttgtaaggatctgtggtctataattttatgtgtgtgatgtctttgattttggcattaggaaaatattggtttcatagaaattagttaggaagtggttttttttctctcttatttttctattagagttgtgtcacttgacatggggatattttctgagaaatgcataattaggtgatcttggtgtcatgcaaacatcataaagtgtacttacacaaacctagatgatataatctactaaaacataggctctatggtacagtctattgcccctaagctataagcccatgcagtatgttactgtactgaatactataggtaactgtaacactatagtaattaattatgtatctaaaaatatccaacataaaaaaacaaagaaacatgacactaccaagagaacacaataatattttaatagctgaccccaaagaaatggaaatctatgaggtgcatgacaaataattcaaaattactataaggaaactcaacaagctgcaaggaaacactgacagacaacttaattcaattaagaaaacaatacacaagcaaaactagaaaatcaacagagagatagaaatgaaaagcaccaaacaaatttctagagttaaggaatacaaaaaaatgaaattaaaaaacaatgcaatggagagcatcagcagcagattagatcaagaagaagaaagaatctgtgaagtaaaggacagggaatgtgaaaatatccacttagaggagaaaaaagaaaagaacaatgaaaaagaataaagaaggcctatgggatgtatgcaacaccatacagagaactaacatttattttacaggaatttcagaaggagaagaaacaaaaagctaatactttacctggcagagttgtcctgtagaaataaagaagcaataaagactttgccagacaaacaaaaactggagagttcatcaccaatagacctgctttacaagaaacgctacagggaattattcaagttgaaattaaaggataataattagtaacatgaaaatatacaactcactggcaaaaggattactcaaatgcagaatatcctaatactataatagtcatatataagttacttatatctctagaataaaggttaacagacaaaactattaaaataactataccaaaaataatttgttaatagatacacaatataaaaatatgtaaaagtaacatcaaaaacaaaatataggggtggggtaaaaaatttaatgtagagttttgaatgaaattgaaattatcaacttaaaataaactattagaactataaagtgttatagataagcatcatggtgatcagaaaacaaaaacttacagtagatatgcaaaagataaagagaaaagaatcaaagcaaatcactacataaacgcgtgaaatcacaagaaacattgaaagacaggccaggtacagtggctcatgcctttaatcccaacactttgggaggctgaggcgagtggatcacctgaggtcaagagttcaagaccagcctgggcaacatgacgaaaccccatctctactaaaagtataaaaattagccaggtgtggtagcatgtgtctgtaatcccagctactcaggaggctgaggcaggagaattgcttgaacccaggaggcagaggttgcagtgagatgatatcgtgtcatcgcactccagcctgggcaacaagagcaagactctgtcttaaaaaaaaaaaaaagaagaagaagaagaaaaaaagagaagaaaatagaaacaaaagatctagaaaacaatgaacaaaatgccagtggtatgtccttacctatcaattctcaccttgaatgtaaacggattaaattctctgataaaaagacagagtatctgaaagggtttcaaaaaacaaaaaacaagacccagctatatgatgcctacaagagactttcttcaggtttaaggacacatataaactaaaagaaaaggtataggaaaagatattccatgcaaatggaattgcaaagagagcagaggtagctatacttatattggacaaaatagattttaagtaataaactacaaacagagacaaagaaggtcattatataatgatgacatatgtataagatacatatataatatacatgtaatatatgtgtatatatattaatataagaaaaattttaaaatattttgggacaaatggaatgaaaacacaacatatcaaaacatatggaatgcagcaaaagttgttataagaggaaagtttatagcaataaagactgacgttaaagaagaggaaagatttcaaacagcctgatgattcacctcagggaactagaaatagggagcaaataagcccaaagtaaatagaaaaaaggacacaacaaagatcaaatcagaaataaaatggagaccagaaaagcaatagaaaagatcaataaaacttagagttggcatttgtaaaggaaaacaaaattggcaaacttttcaccagactaagaagaaaagagaagactcaaataaaattagaaatgagagtggagaaattacaactgataatacaaaaatacaaaaaattatgagactgccataatcaagtatgtcaaaatttagataacctagaagaaattcctagaaacatacaacctaccaaggctgagtcatgaagaaacagaaaatctgaacagatcaataatgagtaagaagattgaatcattaatttaaaaaaatcatctcctgccaaaggaaaacgcagtgatggcttcacaactgaattttattaaacatttaaggaggaattaataccaaaccccataaaaattcaaaaatttgaagagaaaaaaagtttccaaattcattttatgagtctagcattatgttggtatgaaaaccaaaaacactgtaagaaaataaaactacaggcaaatattcctgatgagtacgatgtaaaatcctcaagaaagtactattagactggattcaacaacgaataaaagtgatcatataccataaccaagtgggatttattcttgaatgtaaagattgttcaacatatgcaaatcaataaatgtgatacaccacattcacaggatgaagagcaagaatcctatgataatctcaatagattcagagaaagcatttgacaaaatttaacatcttctcataataaaaagaaaactctcaacaaattaggtatgggggaatgtaaatgaatacaaaaaaaagtcacatatcatagacccacagctaacatttttctcaatggcgaatagttgaaagcttttccactaagaccaggaaaaagacaaagatgctcactcttgccacttctattagacatagcactgaaagtcctagctagagctttcaggcaagaaaaagaaataaaatacatacaatttagaaatgaagaaataaaatagtctctgatggctaatggcatcatcttatatgtagaaaaccctaaatattccaccacaaaatcccagcactttgggaggccaaggtgggtggatcacccgaagtcaggagttcgagaccagcctggccaatgtggtgaaattccgtctctactaaaaatacaaaaattagccaggcatggtggcaggtgcctgtagtctcagctactcaggaggctgaggcaggagaatcggttgaacccaggaggcagatgttgcagcgagccgagattgcaccattgcactcctgcctgagcaacatgagcaaaactcagtttcaaaaaaaaaaaaaaatctgttaggactgataaacaaattctataaagttgtagtttacaaaatcaacatatcaatatcagtagcatttctatatattaagaactattggcaaaaacaaaataagaaaacaatcccatttacaacagcacaaaaaggaatacagtacttaggagtaaatgtaaccaaggaaaacaaagaactctacatggaaaactgtaaagcattgatgaaagaaattgaagaagacacaaataaataaaatatattccctcttcatggatcagaagaatcaatattgtcaaaatgttcatactacttaaagtgatctacagatccagtgcaatctctctcaaaattaagatggcatttttcacagaaatagaaaaacaattctaaaatgtgtatgaaactacaatagacttggaagagctaatgcagtttttggcaagaagaacaaagctggagatatcacaaatcttgatttcaaagatatagtaatcaaaccagcatagtatctgcataaaaacagtgggaaagacaaatagaatagaatagacttccagaaaaaaagtcacacatacacggtcaacttaaagttgccaagaatatgcaatggggaaaagatagtctctttaggtagtgttgggaaaaatgtatatccacatgcaaaaaaaatagatattgaatcttgtcttgcaatgcacaaacaattcaaaatgaattaaacatttaaaacctaagacctaaaattgtaaaacatctagaggaaaacataagggtcttgacatcggtcttggtaatgagtttttggatatgacatcaaaatcacagagaagaaaagcaaaaataaataagtgggactggataaaactaaatcacagcaagggaaataatcaacaaaatgaaaagacaacctacaaatgtgagaaaacatttgcaaactatatatatgataagggagtggtatccaaaatatataaggaactcatacaaatcaatagcagtaaaacaaatcaccaattataaaatgagctgaagacttgaacagacatttttacaaaagaggtataaatggcaaacaggtatttgaaaagttactcagcatcactaatcatcaaggaaatgcaaaacaaaaccacagtgagatatcacctcatatccattgggatgactagtatcagaaagtcaaaagataataagtgttggcaagaataaagaggaaagtaaatcttcattcatacattattggtggaaatgtaaattgctacagctattagaataatggaagttcctcaaaaaattaaaaaggaatgaccatacaatctggcaattccctttctgggtatatacccaaaggaaataaaatcacttttcttaagagacatgtgcactgccatgttcattacagccaagatgtggaaataacatgtgtccatcaaatgatgaatgtacaaagaaattgtgatatatatatgatatataaaatagttatatatgttatatagacgtctctcaatagatggatggatagatagatagatagatagatagatagatagatagatagatagatagatagatagagtttagactgtgcaaaggagtttagactccttgttaaggcagcaggccaccaccacaggggtataagcaggctaagagagtgagcatccttagaaaggacgttctgggtcaggtgcagtggctcatacctataatcccaacactttgggaggctgaggtggtagagtcatttgaggccagggctttgagaccagcctgggtaaaaaagcaggaccctgtctctatgaaaataaaaataattggccaggcatggtggctggctaagccaggaggctgagacgggaggatcactggagcccaggagtttgaggctacagtgagctgtgatcgcaccactgcactccagcctgggtggtagggtgagaccctatctcaaaaaagagggcaaggagaggagatgggagggaaggggaggggaggggagttgaggggaggggagagagggagggagggagagaggggagagagggagggagagaagggagagagagaatagaatattattcaacctttaaaaagaagtaaatcctgccatttgtgacaacatggataaacctggaagacattttgctaactgaaataagccagacacgtttccaatcagtacttagtggcaaacaaaaaaagaaaaagaaaaaagccagacacagaaagacaattattgcatgatctcactcagatgtggaatctttaaaaagttaaaacaaagaaacatagaatagcaggatagttaccagggatctagggtggggaaaatgaggtgatgtgggtcaaagggtacaaaactgtagttatgagtaagttgtagaggcctaacatatagcatggtgatgatagttaataataacccatcatatacttgaaattcactgagagtagatcttaagtatatgaatatgttgaatagcttgattacagaaatcattttacaatgaatatgtatattaaaacatcactctgtatgcaaatatgtacaagttttatttatcaattatacctcattaaagccaaaaaataaagaactttcttcaaagtcacattgaacaattttcatgtataggttttttgccaaccatatagataagaaagatttggaaatataatatttttagctgagaatattgcagtatttaaatacacaaggcttctgttttaaacaagagcaaggaattgataatggtgaggcaaccagcacataattagttgttaacatttatttagcacatattaaataccagacattgctctaaatgccttatgtacattagcccatttaatcatcacaataatcctagaaggtaaatgcttttattttcttctctgtacagatgatgaagctgattcaaagcatagtaacttcatgtctcagacttactaagtatcagggccagaattagcacctgattactctccagatcatttcctaaaccacctgctacactgctttgcattgccagaaaacagacctaaaatctatacatacatcttttttctcctttcctttcacagtcatttgttaacatatttatgccacctttaattcaatatgattaaaactagactgtgaagttgtttctttaactggctttctatatctgcaacttccattgccattctccaaattctcgaggactcttgctcccaaagcctgtaaggaataggaaactaattttaaggaggactgtgcagaagttgtggctcactggttcttcattggctaatttacagtgtatccctagaatttatcctagaatttggtcactgcaatagcctccttctgggtaccctaatgtccattccatgattctgatgtttagagtaatctaatagatacagattaattggtgagcagtaggaagacactgaatggcagtctgagtgaaaaacttcaatctttctaatatatcttaagatcattcatatatgatagttctttactattcagtcaaaattccttgggttgaaattgtacattctaaagtaggttcaacctctttacaactttattttcatgtacttctctatctccagtacatttacagtcttctagccattcttagcaaaagcaccaagctggaaaggaataataacatcctcccctgataaacaactgcctttttacacaaagttatctcctgatccttttaagtcttaccatctcagttcatgccaaaataactttgataactttgatagaaataacatagaaagtcctttgatacttatgggaaaataataacaattaaaaagtcagaatggattttcttacaataagggtattgtactttgtatcttcactaagaactagatgtatgtgattgcttaaacctagatgacactatttcaattatctacttctgcataacaaagcacctccgaaactatggcttgggcaaagctcagctcttctcagctccacatatgtttgggcaggggcagggcaactagaatttaactcccatgattctagctggggtgactggcaggtcttggggctggccatacccctctttccctgtttttgatgtggcttccctctctttgatgtggttttgctgtgtccccaccgagaatctcatcttgaattttaatccccataatcctcataactcccacatgtcaagggtgggaccaggtggaggtaattggatcatggtggcagtttcccccatgctgttctcatgatagtgactgagttctcacaagatcatatagttttataaggggatcttccccctttgctcaacacttctccttgctgctaccttgtgaagaaggtgctttgcttccccttcactttctgccataattgtaagtttcctgcaacctcctcagccgtgctgaactgtgagtcaattaaacctctcctttataaattacccagcctctggcagtttttcatagcagtatgagaatggactaatacagtaaattggtaccaaggtagtgggacactgctataaagatacccaaaatgtggaagcaactttggaactgggtaataggcagaagatggaacagtttagatggctcagaagaagacagaaaaatgtgggaaaatttggaacttcctggggattttttgaatggctttgaccaaaatgctgatagtgatatggacaatgatgtccaagctgaagtggtctcagatggagacgaggaacttgttgggaactggagtaaaggtcactcttactatgctttagcaaagacactggctgcattttgcccctgccctagagatccatggaattttgaacttgagagggatgatttagggtatctggtggaagaaatttctaagcagtaaagcactcaagtggaagcagagcataaaagtttggaaaatttgcagtctgataatgcaatagaaaagaaaaacccattttctggggagaaatgcaagtctgctatagaaatttgcgtaagtaatgaggagccaaatattaatcaccaagacaatggggaaaatgtctccagggcatgtcagacatcttcaaagcagtccctgccatcacagatctggaggaggcctagaagggaaaaatggttttctgaacccagcccagggtccccctgctctgtgcagcctcagggcatggtgctctgtgtcccagctgcttcagctccagccatgactaaaaggggccaaggtacagctatggcctttgcttcagagggtgcaaaccccaagacttggcagcttccatatggtgttgacgacactgtaggtgtccagaagtcaagaattaaggtttgggaacctctgcctagatttcagaggatggatggaaatgcctggatgtccaggtagaagtttgctgcaggggtggagccctcatggagcatctctgctgagcagtgagaaagggaaatgtagggttggaggtccaacacagagtccctactggggcactgcctagtggagctgtgagaagaggcccactgtcctccagaccccagaatgataaattgcactgtgcacctggaaaagccacagacactcaatgtcagcccatgaaagcagtgggaagggggttgtaccctgcagtgtcttggggttggggcttcccaaggccatgggagcccacctcttgcatcagcatgacctggatgtgagacatggagtcaaaggagatcactttggaactttaaggtttaatgactgccctattggattttggacttgcatggggcctgtagcccctttgttttggccaatttatcacatttgaaatgggtgtatttacccattacctctacccccattatatctaggaagcaactaacttgcttttgatttcataggcttataggtgaaagggattttccttgtctcagatgagactttagacttgggcttttgggttaatgctggaatgaattaagactttgggagactgttggaaagccatgattggttttgaaatttaaggacatgagattttggaggagccagggacagaatgacatggtatggctatgtccccatccaacatatcaccttgaatgcaatccacatgatccccataaaccccaaatgtcaagggcgggaccaggtggaggtatttggatcatgggggcagtttcccccatgtggttctcatgtggttctcatgatagtgagtgagttctcatgagatctgatggttttataaagggctcttccctcctcgctcagcacttctccttccctctgccttgtgagaaaggtgccttgcttcccgttcaacttccaccataattgtaagtatcctgaggtctccccagccatgcagaactgggagtcaattaaacctctttcctttataaattacccggtctcggccaggtgcagtggctcacgcctgtaatcccatcactttgggaggctgaggcaggagaaacatctgaggtcaggagtccaagaccagcctggccaacatggtgaaaccctgtctctactaaaacacaaaaattagccaggtgtggtggcgggcacctgtatttacagttgcttgaggggctgaggcaggagaattgcttgaacccaggaagtggaggttgcagtgagctgagattgtgctattgcactctagcctgggtgacagagccagtctctgtctcaaaaataaataaataaataactgagtctcaggaagttctttatagcagtgtgagaaaggactaatacattcttcctccagcacctttctctgttcatgtggcctctcgctctagtagggtacttgactctttgaaatggtagctgtgttccaagcaggtaaaaattgatgctccaaaacttcgtaatgcctacatccacaattaatacaaaattacttcagctgcattcaatctgtcaaggcaagtcaaaggaccaggcaaaattcaggaagaggaaaggggaaagaagttcccctttcagcagacaagaggcacacatgcattgggatgagagtaatcactgacagtcaactttgcagaaaacctaccacacaaaggtttacttttgctttgcttcagtaagacatatcaaaagtattttccagcaaaagtactgtatgaaaaccattatcattttcctttctttctatatactgccacatggtagtttgattgcaaaagtgtatctcactctgtgtttctcaaaattataaatacatgaatctttagagaatactcaatctggtggaaaagatatttttctcattttcacaggctaaataaattttgatttgtagtgggttgaaaaactacctctaaaatctcatgtccaagccctaacccctggtactctataaatgtgaccttatttggaaaaagagcctttgcaaatataagaaagtaaaagatgaaatcattgtggaataactgggtgggccctaaggccaatgacaatagactttataagaagaggagaagactcaaatacacagagggaagaaggtcaaatgaagacagaggcagagattggagttatgctgtcacaagccaaggaacgtctggacctaccaagagctagcagaggcaaggatctcccccagggccttgagaagtagtatggccctattgacacatagacttcaatcttctggcattcataatagtgacagaataaatttatgttgttttaagccacccagtttgtgataactggttatggtatcccaggaaactaatacatagttttttaatcaaaatcttattgaaaatattttttaatttactatttttaaaaaatttttattcctagttcatctgacttcagaggcacttcatattgcagaagaaaataagaggggtgaaagaccttgcatttattttaaatttactgatactctcttaacaagaatatgtgaatcttagttcctgaattttttaaattgccctcatcactcttgcatctacagatataggactcaaataatctcatcacttatattccgaatagcatctctgtagtctcatatacttatggcaagaaattaacacaaaagtaaaatatttaattggtcccatggcttaaataagtcttccttaaagagtgacacctataccagcaacatcagtatcatttcagaacttgttagaaatgcaattcctggataccactcctgacctatagaatcagaaacatagcaatctgtgtttgaacaaaccctcctagcaattctgatgccactaacatataagaattgctgggaattctgccacttactcaatgtgactattcaaattaagcattctagaattgtggaaattaccacaggatggagggagagttccactcagcccactgtggagtcgatctgagctaaaccccactgatcacctgacctctacaagcccctactctgactggtggactacagtgacttttggttctcttagaattaatgtcaattcaaagccagtattcagtaatgttcaaaaggtctgattatttccttttctctgatgcacagtgcacctggagaatgatgccatttcaaggactcagtgctggttgctactgctggcagattgggcatccatcagcggctgtggccaggctgaccttggtaagtggaactccgtgttgcttccagtgattatatgcttcaaatctttgaaatattaatatatggtatctaattgaatttcttatatatgaatatgctaaacaacttttttttcaattgatttctttttcaaatttccttccctttttaacctgcctcatctagcaagtgttttttctaagatggctgctgtccaacatctggttctaaaaggaaactacagaaatccgtcaaaacacatttgcttgattcctgtgggtttttgggtggagaataaatttaaactctgtgtgaacctaatgaggataaaataagcaaggacagaggaatgaaacattagattgagactgtagaaaaccaaaactattaggtttatgccccaagcctttcctctgtgatagcaatatgtttgggtccaaaggaactggcttgctacacaacctatcttgcactgcagatatagcatattcattatgtcattgagatcctgtaggtatcattcatggttttccttttgccactttgtgcaggcagatctatataattatgaacagatgtaatcccagccactggatatagtttacaaactagactctccctcacaatcgatgcttaccgctcaatgggacagaattgaacagaaactggactttaaaatagaagtgtgacaaatttctcaacaaagttacaggatattctatcaaggatatgaattacagaatattattatcctatgcacactagtatttcattccagctgctctgctgctgtgtgtaggtaagattcatacatctgaaaaaaatgggagaatggaaatagaggaatccattacttgatgcttgatgtaatggttacttatcctttccaaaggttgcaatataactggtgtttagcaatagatagcaagctccaagtccagaataaagaaggagcactttatatttttttatgtcatcactttatgtagcaaactttctgaatcataatttattgatgcaatcagttgtaaaacgtaccattgtttcctatacttctgggcagaagaaaaatgttgccaattaagttatatcttatatttttatatctatcgaaagagctgttttagatatatttagacctgcatacttatcactttataggcaatgagaaagtgttatactttttaattctattaacccccattagctttttatgttattgttgtcatgcattttaattcaacatatattgtaaatatcacaaaatattattttataattaatattttaaatgtgtccatgtatttaccaacatcactgacttgcttttccctcctccatttctgtatttctttcttgatcattttccttctgcctgaagaattctgtagtacctactgtaatatttgtcaatgatgaaacctctcaggcttattttgtctagaaatatctttatttcaccttcaattccagagtaaatttttagttggcagagaattgtaaactggcagtaattttatcattaaagatgtcattaaattgttttctggcttccataatttgttttaggaaattagctatttatcttattgtagttgcttgaaggtaatgtgtattttcaatgttttattattgttttgatttccctcagtttgactctggtgtgccaaagtgtggttttcattgtatttacccagcttgggcttatacacttcttaaatcaactgcttgatgttttgggtcagacttggcaaattcttgagagatttcttcttgaaatattgtttcttccccatcctcatcttctccctttctagaactccaatttcatatctggtagaccttcatgtaaatatcttttaaaagatgtgcttccagaaaaaagaaatgcaacctaaaggaagagcaaagaagtaagaaacagtggtaaaaacgggactgagaaacactagggtcaacatcaacaacaattgaccatataaaatattaaaattattatttacaaattgtttcatgaatataaaaataagtcagaactaaaatagggaaataataatatgttagatctgaggcaatatgttacttaagtcttctaagaatctgtagtttctaggtgaaggataaaggtaacactgaactttgcaaagtcatgtgtacacattaaatgttggagactatttattcaaataatagaaatgaaatataaacccttcaaaatattattgggtgatatgaatttttgcccaaaaaaactactaaaactttgaaaagaaaaaaaatgaagtatgaaggaaagcaatattacttaaaaccacaaaataggatggcaaaaaaaaaaacctgaatatactagtttaactgaattggccagttgaatacaaattaagattggattaaataaaattcagcaatattttgtttaaagaagacacacttaaaacatgggtataccaaaagactacaagcaaaaggataggaaaagattactatgcaaactgtttttaaaaaaatcatattgcaggggctggcaatttctttttgtaaagggccagacagtaaacattttaggctttataagtcgtaacttaaaactacctaactctgtgattctagtaagaaagcatatacagacagtatgtaaacaaatgagcatggttgtgcgctaataaaaatttattcaaaaaacaggcaccaggccatatttgctgacctctggtttattagaagaccataatcttgtgccttatggataagcaaaaaatatatatacaaagaaataaactaagatagatgatgttacaagaaaactcagcctcaagagctagcataggtaaaggaaaaggaattgaacaaaggtagtacgtaagttgtttttgattctctcacccatcattaactccacgatttctttccgtttccctcatccccactttacatcagttctagacaaggtaaaaattagaacatagctttgggagagtagttcccaatagcagacgatccagagttttaaaaaacagaatcccagccgggtgcggtggctcccgcctgtaatcccaagactttgggaggccaagatgggagtatcacaaggtcagaagttcaagaccagcctgaccaacatggttaaatctcgtctctaccaaaaatacaaaaattagccgggcatggtggcgtgagcctgtaatcccagctactcgggaggctgaggcagagaatcaacttgaacctgggaggcagaggttgcagtgagccgagatcgcaccactgcactccagcctgggtgacagagacagactcagtctcaaaacaaaaaaaaacaaaacaaaaacaaaaacaaacaaacaaacaaaaaaccagaagccccagaaaccgtagactggaatataagagatcttatggatgcactaccggacagcccttctgtagccacttgggtcatgagagtgaaatacagtatggcaccactgtttgtgattaaagatgttaacgctaatggactccactggcattcatggctaattacttaagaaaagattaaaagacaaccgtcaccatttcatacttcgcattggaatcatacattgtaaagcatttgtttcttatttgtctcttaattacaattcttaccactaggtggcattcacccaaagttgtatctccctgggaaagtgatgcagaggctgcaaattggcagggcctggacgtggctcacaaatatgctttgattggcccattgtgttttcaaacatttggatgactggtcaatatttaagattagagaattttaccctataaaattgtctttcttgcttttcttgacaaatagaagacttggcaatactaggtctttctccacctgccaacaatcacttgatgggacaaggctgctcccacagagggaaaatgcactcttcatatcaggccctgctgcttcttcgcttcttatgtgctttaattgattatatccctgcttggcccctgcaggtattcaacttggtgacccttgcattatagtttcaccagaacttttgagcaatgaccatttattctaaaacactaacaaaaatataatttcacattggagtgcctttcagaaatgcagatgtaaagttaaaacagaataaatcatacaagaatcaagacctggttacagaatgatacaaaaatcttgaattaaggaaaataagggaggacccaagagcaaagtaaacagccagacactattaaaagataaaagtacaaatgcatccagcaaatgtcagtttactggatccagcactggtttaaaaactctatacgggtcagggccaggtgcagtggctcatgcctgtaatcccagcactttgggaggccaaggcaggtgaatcacttgaggtcaggagtttgagaccagccttgccaacacggccaaaccccatcttgactaaaaatacaaaacttaaccaggcattgtggcgcacgtctgtaatcccagctactctggaggctgaggcaggagaatcacttgaacctgggaggcagaggttgcagtgagctgagatcacaccactgcactccagcctaggagacaagagtttaaaaatatatatatatatgtggatcaatgcattaggttctcaaaatctctctatgaggtgtagtgtttccttctcatcccacagatagaaaaagtgaggcccaaagttgaataacttttccaaagtcatagatagaaagtggcatacctgggcttaatcccaggtagatctgaggcaaagcttaagcttttagctttgactccaaggcccttattgcaaagagattatttgaggaatagggttggcgttggagtttggagttgtagaattgctttgccattcatactggttctttctgtgccctcagattgatgaatcctggttttctctgttgagtgaagagataattcctgatggaagaaaatagatatttctttatcttctttttgaagaggagggaagaaaagggtccctttcagatagtggcatggcctatttggattacagtcatttgttcccttctctccctaggattatctttcctaggataacttcaaatatcccagggatgcttaaatttcatcctgaaagagaagcagaacacctgctctgtcagtgatgaaagccactcttctttataattgctgccacacggtgtcgctgttgaaacacagggaacatagccacccaggtatggtccctgctgtacagtattgttgctgagtaccaggccatgctgtggttggtgaatacaacagaggaatgctttaatgacccacaagcaccactgtcatccatctcttgtctgtggtagtttctccacagggataagaaatgtctccttggtagcactttcgactatgatacttttgtgccattgtaggcttggtccacccacaacttcagtcttataattaagacatgattcaagtttacatataaagccatttttataagatcccccggggcagctgaatttggagggattttcagtcttagccatgcaattgcccaggattacctctcgtccctcccaccttctttaatcatcccccacagtgaaagaacttcctctccatccctctgcctcaacagccatccatttttttcatccaagaaagagtaattaacgttcctttatggcaacacctgaccttgttgcaaacacaggctataatattaatgcctgaaagttctctactacctagagaattactctgcatggagtcaatcaccttggatggattaaagctgtgtattttggtttcatagacttggctgtgaactgggtgaagcatcctcagcagctgaatcccaagagaataatctacaaattccttcttaaaaaataattggtgtccttatcgtttgttatagagctaggggtgtgtgcaagtgaacaagaaatgatagttaaataaagtttccaattcagtaaaagatgtttctcatataatttcactctatagcaatgttctttctcagggaaatatttctgtatctgtaagtggagatttgagatgaagaatatacatgaaaaaaatgctaactgaacatggatttcaggatcatgaaatgaccaagctcttgacgaattgtccaatttgttctggacatacattaatatggacatatagtaaattctcaactaatcagagagagctgttcacaactaatccaaagtcagagtggaaataaactatgcatcatcttctggtgcttcccagctgacttcccaccagcctgtaagcagcccattctcaaggcttggttcttatttttctgaaaccaccacagcagctctggccctctgcaggagagggaaaggtgtcttagtgaatatcaatggcaacaagtgataagtacatactgcctaactcctgagccttgcttcatggttaccattaggaatctgactactctctcgcatggtcatgagatgtgcctgtatcctagtctccaagatcttccgggaagtagacttgcacatcctttcttcccaatcagttctagaggtaattagtcaagcaaataattttttgttagtacctattattaatttattaattttcctattaattaaaaaaagatttcctgagaagtcatttatttctaaaatggagggtattcagcaatcatttttttatatcagtcatggaacccctcccaaagcaaaaagaaaaagtttagaattatagaaaggtctaatagatcatcacattcaagcttttgagttttcttcatttacaggtaaggaagctcattgccttcaatatcaaccttcccatctgttaaatggagggctccagatgatttggcctcaattgtgcggttagttactcggtgtaaaaatagctaaaatctctgtctaaggcaccttatgctgcattagaactaatcagtcattttcttctaaaaccatttgtaccccagaaatcaatgccactctacattacaattccaggatacagcttttaaaatgcttggctgaagtaaaggaaggaaagttgctggcatcgtggctattctattgtggtttataggcaatccaaacatcagttgtgtgttgttatagttcaattctcaaagattgttatgggatcccacattatggtatgcttaaaataaaaacaaataaaaacacagagaccttgttttctaaggctatgggatgacatgcagttttgtgccacttcatcagaacttggtctttcaaccagagtgtttattacgaagtgcagtaaagcaaaacagaaccacaagacaaacattaaagctctctctccctttctgaaagatctgaggagaggattttccttcagaaataacatgtctgcctcagtgctcactgtgcccaacagctctgtctcagtgaaagaatttcccacggggttctacaaaaaaaaaaaaaaaaaaatacctgactatactgagaaccagagaaatgtacaatttaaagcctctttaattaaatgtccttccttctttggaatggaaacaattttatcaagttatctttggagtaggattgaggtgagcagagatgtattcagatttagttccaatgagctccaggtatggaacagattatgtaaattctgtatggaacagaattctgtatggaacagaatttacataatctcgagctcatggaacttctgttccatacctggagctcattaacataatctgttccatacctggagctcactgggactaaatccatttctgtaactgaaaatgtccaagggcaactggaaataataaattgagcaaggctaaaattttggagttagaaaaactaaaagaaatttagtgtgtgtagtataaattagcacgagaggacaagggttctagaagtctgtcaccagcttttcgatcagttcctgtcaccatcccaccgctttgggttcatcaaagccaactattcatttctgtccttctgtgatcctgagatggtttaagaagcacttttttaactcttattttcccttattaaaaaaaattaagttggctggaacttgtattacattgttgcttgaggcagttttgcagctggaaggttgcgaactaaatcaaagcagactgtgctcttgtatttctgaattattaaacatttacatgcgactggttacacagtgtctttttaagaaaatgtatacacccttgatttagcagcagagtttagggtcagtactttggaggatacctcgttctatcagaaggcatattttaggccaattcagctaaattttgctgatggaacaggaaacttaagtgcaagggtgaattttttaaaaacttaaacccatagagtacataaacactctaaaccagcaaggcaaagaaaacgatgtttttatcattctgattactgaacttcaccagcccagttcaagatacattaaaaagtcgcttagattgtcaatggatcttgtttcagttgttaagcttttccctttgttttcctaaggtcagagcaccaattctgtagaaagaggctagaaaatctgaaaaataactattgggtattaagcttcaaacctaaaacaaacgttaaaaaaaaaaaagaaaatctgaataaggttgtaaagtgctccaagaatgccagcgtagtttttactccttcaggattctaaagtcatatccttttgcaatgaaaaaagttaatgacgctttcaacaatgacagatatgtaacaaaaacagaaattgagtatgtatcctctagtttctatgtgagttgtaggtgatacaattaagaggacaacagaaaaccaaggtaaactctaaaaatctgccctggagggaaaatcatttatctactttcttgttgccactttccgaaaaaatttttgtgaatcttccacaatttgcatactttgcacattgggaaatatagtggttatccacaatagttaatgagaacagcccaagatttccattttttccatagtgtttcataacctctaggctaagtcatcctctctttgacgtatctttaaacattacacctagtatcaaattattccattgcatggcattttgttaaaatatattgaaataaatatgtaatatgatatttcctgtggtacaagcaccttgaaaatattcccaccagtgatggctcatagtcacattatatttgagtggtgattgagggcatgtctaataattatcttttccatcctttcaaatagtcagcacttcccaggctctgattaatggccacttttaactagatttcccttaaatgataagataaaagagacaggaatcaccactgagttttgtgagttgtcagttcataagaactgcatagctttatccccctgtattgatctgggacattgatacagttaactgtgatagaaataattattttgttcttcctcttctctctatgctcaaagactagtctggttcaatattggcctcaagaatgtgcttaggctccagaaatcctagattacaatgtttcagactctcaccacaacctcctgaccttcctcttctcagaggattttctttcctctgaccttgactttacccccagagccatcccctcctggactcctcatctccccccaccccactgtatgtgccctctcaccagtagctttacaacctacctgaacctgatgattgatctgtctcccttctcaccagtacctcagtttacctacatcttatcctgctgccacacactcactgcgaatattatctgatctttggacaaaagactagaaacaatccaacttttcctactgaaaaggaactgagagctgctggagaaagttaagtgaccctgcaaattgatgaaactaaacttctgagtttctgttcctcacagagccgtgggtacctcctattggcacatttttttggctgtttaaaaaatagatttagggggtgcaagtgaagtttttttaccaggatatattgtgtagctcccacttataaatgagaacatatagtatttgactgtttctgagttatttcacttaggatatggccttcagttccatctgtgttgctgcaaaacacatgatttcatcccttttttataactgcgtagtattccatggtatagaatgcatagataatacattttctttatcctatcaaacattgatggacatgtgattgatttcatgagtttactgtgtgaatagtgctgcaataaacaaacgagtgcagatatcttttttatacaatgatatatttttatttgggttgatactcagtagtgggattactgaattaaatggctgttctattttcagttctttgagaaatctctatagcgttttccatagaggttgtacatccaaccaatagtgcataagcattccctttcttcttcatccttgccctctgttatttttgactttttcatagtagccattctgactgctgtaaaaatggcatctcattgtggttttaattgcatttctttgattattagtgatgttgagcatttttgtatttttttttggccacttgtatgtcttcttttgaaaactgggtggggacacagcaaaaccatatcaaagaatgtgtgaaagagaccctacctatagaaataagaatagaaataacaaaatagtgtgttttggaaaccaagagcatatcaatttttaaaaagaaagggggccagtcatggcctttgctcatgtcctttgctcacttttatttgcccatggtaaaatttcccttttattccatgcaatgactcttctaaatctagaccagcccttcccttccattaaattcacaatccagctgggtgtggtggctcacacctgtaatcccaacactttgggaggccaaggcaggcagatcacttgaggccaggagttcgagaccagcctggccaacatggtgaaacccatctctactaaaaatacaaaaattaccgaggcatggtggcacacatctgtagtcccagatacttaggcagagtttgcaccactgcactccagcctaggtgacagagagagattctgtctcgaaaaaaaaaaattcaaaatccaacccagtctcctactttcctgttctcacacattttttcaatcttaacctctctctagattttgcttaaagtgttcagtggttcatttgtgtgtgtgtgtgtgtgtgtgtgtgtgtgtttaattctgaactgtccatccaaaaatgtatttaccaccacccatgtttaccttttttcctctggtctaacagtgacagccaaccacccagccctgagccccatgcacaaccttcagtcatccactatctcccttacatattcaatctcttcttgcctacctcctcccttacttatactcccacaccaaaacagaaataaggacgaataccttcccttgaatttcatactctgagagctactttttaatctcacaagttcagattaatcaggaagaagagataaacccagactaccttatctggtgtttgcccttcatctgctgaattctggctcccattctcagcatgctgttgaaattgctctattggggtccatcataacattacagccaaatttaatagtcatttttagtttatatcttagtggatctctctactttatatgacattgtctatcacccccccccacccgccgctttttaagagacaggatcttgctctgtaaaccaggctggagtgcagtggcaccatcacagttcactgcagcctcaaactctttggctctaagtgatcctcttgcctcagcctgctgcatagttgggactacagacatacaccaccatgcacagctagtttcttaaattttttgtagagatggggtctttctatgttgcccatactggtctcaaactgctgtctttaagcaatcctcccacattagcctcccaaaatgctgggattacaggtgtgagccactacaactggcctccctttctttttaaaatttgatatgctcttggtttccaaaacacactattttaatatttctattctgatttctgtaagtggggtctctttcacatattccttgatatggttttgctgtgtccccacccaaatctcatcttgaattatagctttcacaattctcatgtgtcatgggaggaacccggtggaaggtaattgaaacatggggtaggtctttcccatgcttttctcgtgatagtgaacaagtctcacaaaatctgatggttttataagggggagtttccctgcgcaaattctctcttgcctgccaccatgtaagacatgtcttttgccttctgccatgattgtgaggcctccccagccacatggaaatgtgagtccattaaacctctttttccttataaattcctcagtctcaggtatgtctttatcagcaacatgaaaatggactaatatattctttaattttggattattttctcaactctctgccttgatacacatgaagaacaagtaaaattaatttatgtcagtttcagctaacatcagtgtgcttttgacttcagaactttttttttcatctcaattccttccccttcttgagatgtggacaaaatctttaccagctggctgaacccgattattacttcttgagaagttcccaaatccagtatttcttaaatgaaagtcttcccactactgtgcatccttttcctaatcccttctgtatacccagtatcaactggctatatcgatatccacctttgttaacccacgcttgaaatccgaagtcaccttgtagctcccttctccttcactgtttacatcataccgttaacatagtcattgattatatctcaaacattctagtacctgaaagcctcttctacatctgcactataaatgctagggttcatgctgcctttgtaacttgcatgaagatacaaaagactcctaaatacttcttcatgttctttctccacaaagcttacaatccaccattctttgttttttgatgaagtctgattttatcatgttcatgcttaatacccttcagtgactgcctacagaataatatttgggcaggttattgtgacactacttcttcataatataatcctcacctcccctttagctataaatgtcacaaactccagcctctggctgctgaagcatcatgaaatccatggtatttcccaaattttaaaaatcatttctcagcagggcatggcggctcatgcctgtaatcacagcactttgggaggctgaggtggacagatggcttgagcccaggagtatgagaccagcctgggcaacatggcaaaacctcatctctacaaaaaaatatgaaaactcatctggacatcatggcacatacctctagtcccaactacccaggagggtgaggtgggaggatctcctgagcccatggagatcgaggctacagtgagcgatgatcgtgccattacactccagcctgggcaaccgtgagactctgtcaaaaaaaaaaagaaggaaataattatttctctcctggctgtctttgctcttaacaatgacatttttaaatggatgctttaaaaggaaaataggcagtagaaattgtggaagctttccagaacaattgggagttagaggtaaatctctgataacatttccattttttgtcctggtttcaattacatgatagctttctgttattttttacctataaaatgaagttatttcagtaaaaacttacacaccactgttgtcagagaataatttcccctagtaaatataaatgttatgcataacattaatatcagatctaataaggattgaaaatttatcatcttgttctgagatgtccagtaaagtccaggtctgtcagtacttatgggaaggtgctaaaaatcacaagaagtagacttttttgtcctctagagacttccaaggaaaaacatccctgcactggaggtgaaaatagtggagtgtgtgccactagttacttccacatatcctaatggtggcccacatcctcacgatcatgttgtgaatggctagtgttggatagactctgaaattaggagccaattccaaaagtgtcaatgagaagaggtgaagtgatatttgaataacctggtctaatcaggtctaaagtactgtgcagagctggtgcacctgaggctcatttggatatgttattgtccttatgaggtcaggtaattgcaggcagaaacttcctttgctttaagattcccctgtgtctcacagggaccatgactgaaaggataacattttttgcctgaaatttcctatctcatattctgattcaggtgccactagtaccttccttagaccttctgggtctcacctttgatttcagctacagctgtggcaaatagttccatgaagcctttgtctcatgtgatactaatataacctcaagtgctcatgctgtctgctcagggcttcatactgctgcagcataagacatagaagatcactccacgtgcatgcatttgcagcccagaatttcaggggcattagaaacccacaggtgaacccttgatcagtggggggggtcaggaattgatggataattgcttctctctgttgatccttagaagaatgatcctgagagacacactacactttccttagagatccagccctagtaactcacagatatgactaatgcaggtgattttttcaggtgattacaataaaaacaactgattacagtaaaaacaaaatatgtccacaaggttggcagggaaacgcaaataaagatgagcacacaaccagtaatcacaatacatttgcagaaaaaactataaagtaatagaggcttcaaaataacggaagaactacctctggaacaaatcatgctaacagagaaaactgaatgaaactttagaaaatgtctaaaagaattcctctccttcccatccccagagaagttcagaaagattttgtattcagtaaagactccaatagaaatctacaaaattcaaaaactaattatgaaatttaaaaggtagaggtgggataaacagtaaaatgaacaaagccgaaaaacaaattagtgagctgaaagattaagctaaggaattctacctaaatgaatccccaaagaaccaagaaatagaaaacatgataagagaaatagaaaacaggatgagagaactagcatggatatccagaagtttcagaggcagttttggaggaagagagcatagagagcaaagggaggaggcagtaaaatcaaagaagaaaatgtcctagaactgaaaaaggcttggtgtaagattgtaagagcctatttaagtgctaagcagagtagattaaaaagaaatcacatataaagatccaactttgaccccctttttttgtctctgttgagttttagtatcaggatgttcctggcctcatagaatgagttagggaggagtccctcctcctctatttcttggaacagtttttctatgaatggtaccagctcttccatgtacatctggtagaattcaggtgtgaatccgtctggtcctaggctttttttttttttttttggttgagggaattggtaagctacttattactgattcaatttcagaccttgttattgatctgttcacagattcaatttcttcctggcccagtcttgggagggtgtgtgtgtccaggaatttattcacaaaagtgttcataatagtctctgatggttatttgtatttctgtgcagtcagtggtcatatcctctctgtcatttgtaattctgtttatttgaatcttctctcttttcttcactattagtctagcttgcagtctatgcaaaaatcctcaacaaaatactggcaaactgaatcctgcattacatcaaaatcttatccaccacaatcaagtaggtcttatccctagattgcaggattggttcaacatacgcaaataaatagatgtgattcatcacataaacagaactaaagacaaaacccacatgattatctcaacagttgcagaaaaggctttcaataaaattcaatacatcttcaagttaaaaaaactctcaataaaccaggtattgaaggaacatacctcaaaataataaaagccatctgtgacaaacccacagccaacatcacactgaatgggcaaaagccagacgcattccccttgaaatctggcacaagacaaggatgccctctgtcaccactcttattcaacatagtattggaagtcctggccagagcaatcaggcaagagaaagaaatgaaggacatctaaataggaagagaagaagtcaaactatccctatttgcagactacatgattttatatctagatatcctagtccaaaagctccttcagctgataaacaacttcagcaaagtctcaggattcaaaaatcaatgtgcagaaatcactagcattcctctacaccaacaagagccaagctggaggccaaatcaggaatgcaattctattcacaattgccacaaaaataataaaatatctaggaatacagctaaccagggaggtgagagatctctacaaggagaattacaaaagactgctcaaagaaatcagagatgacacaaaaaatggaaaacattccatgtcacaaggataggaaaaaccaatatttttaaaatggccatactgcccaaagccatcaatgctattcctaacaaactaccaatgacattcttcccagaactagaaaaaactattttaaagttaatatgtaaccaaaagcagcccaaatagccaaggcaatcctcagcaaaacaaacaaacctggaggcatcatcttacccaacttcaaaccatactacatggctatagtaaccaaaacagcatagtactggcacaaaactagacacatagaccaaaggaacagaacaaggaacccaaaaacaagaccatacacctaggaccatttgatcctcaacaaagtcgacaaaaacaagcaatggggaaatgactccctattcaataaattgtgctgggatgactgcaaagatatatgcagaagattgaaactggaccccttccttacaccatatacaaaaattaactcaagatgaattaaagacttaaatgcaaaacccagaactataaaaacccagggagacaacctaggcaataacattctagacacagaaacaggaaaagatttcatgacaaagacaccaaaagcaattgcaacaaaagcaaaaattgacaaatgtgatctaagtaaactaaagagcttctgtacagcaaaagaaactatcaacagagtaaacagacaacctcagaatgagagaaaatatttgcaaactatctatctgacaaaggtctaatatccagcatctataaggaacttaaacaaatttatgagaaaaacaaacaaccccataaaaaaggtaggcaaaggacaagaagagacacttttcaaaataagacatacatgtgggaaacaagcatataactaatgatattgaggcaaacctcaacatcactgatcattagagaaatgcaaatcaaaaccactataagataccatctcacaccagtcagaatggctactataaaaaatcaaaaaaatgacagatgctggcaaggttgcagagaaaaagaatgcttgtacactgctggtgggagtgtaaattagtccaatcgttgtggaaaacagtgtgacaattcctcaaagaccaaaagacagaattaccttttgacccagcaatcccattctgggtatatacccaagggaatataaatcattccatcataaaggcactagcatgtgtatgttcactgcagcactatttacaatagcaatgacatggaatcaacctaaatgcccatcaacgatagactagataaagaaaatgtggtacatatagaacatggaatactatgcaaccatgaaaaagaatgagatcatgtcctttgcaggaacatggatggagctgaaggccattatcctcagcaaactaaagcagaaacagaaaaccaaatacttcatgatctcacttatatgtggaagttaaataatgaggacccatggacacaaagagggaaacaacatacactggggtctgctggagagtggaggttgggaggagggagagaatcagaagaaataagtaatgagtactaggcttaatacccgggtaataaaataatctgtacaacatactaccatgacagtttacctatacaatacacctgcacatgtacccctgaacttaaaagtttttttaaaaataaaaaatgaagttcttaacatgttttttaaaaaagaaagctccaactttagtatgcacaaagtaaaatatcaaaacatcaaggaaaaattataaaacgtagaacgtatttctaaatgagaacaaaattctaaaaggaagaacatatttctcataaaataataagtattaattttcctagctatagtaagagaattgtagctaatggaagattttccttattctttggagatgtatgctgaataattaggggtgaattctcatgagggctgcaacttattttcaaatggttacacaaaagaaaatacacacacataaaaagagaaataccaagcaaatacagctaaaggcttacctaggtgggaggtacatgggtgttccctgtaccattttttcaactttcctacttatttgaacactttcctactataaagttcggcaaaatttctcaagttcctgtttactggcaactaacaaccataaattatttatataatttgtgccagagggaaatgagatatctcattagaaggtaatggagtggaatcttctaagttctgagaaaaatatcttttatctttctcagcaaaacaatctattatttaaatgtaaaggcaacctaagtgattaaacatcatacaatttaccagtcactgactgcatttaagagaatgactatggaatatattccaataaaattaaaattagcgaaagcaagagggagccaaattacatgataaatatatggagtcagtcaactatgcatctaatctccctccaaaaatactctaaaaagaacattaaagagaaaataagatctaaactgacaaatacaggggaacatgggaatggggacagcaacagcaaagcaagttcaatcgatttgtagaaaacagaacatatatggatttaataaggtaaggaagtcatgctcacaaaggcaggcatgaagaatgacagttcacacaccaggactgggagggacttgggactaggggacactaagtgcagaggaaagtgatgatgaggcacagggcaaaactgaatttctgtaggcagcacaaaaattgtatacaattaactcctcctgcctccttgcatgccacatgcatggaaggctggtagctaagctcctccccgtctcccatccaaggcaagagattggcagtttcttctctgagtaacttcatgactgttgggatatacctctgccaccttattttgttggaacaagaacagccagtgaatgaggagccctcaagctaaaccagacacagcttccaatctgcttttcagagcgtccttatgaaatgttaatgatatgagacatttgaggaaaacctcccacaggaaaaaaaaataccagaataaccaggaaaaaaaaaaaacaaaaaacactgagagttttttgaggttttcttcaaaactgttatcttgaattaatatcctcagaacaatcagagaagatgttatatctataaaacaagaacagggtggtatgaaaaatgaatacttgtgaaacaaaaaagagcttttagaaaggtaactttaaagatcattacaggaattaaaagagaaaaaaattaaataaatctcacaaaaagcatgaccaaaagacaaagataggtgggaaaatgtgataggaaagataatcaattcaaggggttcactatcttattaatgaaaagttcataaaaagtaagaaaaaagaaaggcaagaaattatgtcaaagataatgcagtcaaatttcccacagtaaattccaagatcaaagtggcctagaaagtggccaccatgactatcatggtggactatcatttatgtttgatactcaaccagtattttagttaatataaaggaataatattaaccacattcattaggcaaatttgaatcactctttgcagtatgtctgcgtctcaaatttgaggattatggcatttcagctcttgaaaatcaaaacatggccaaaaaagtatctaacagagttggtaaacaacccataggtcaaatccagcttgcagcctgttttgttttacagcctgggggctagggagggtttttaacttttaaagagttataaacaaaacgaagaacatgtgacagaaaccatatgtggcccacaaagaccaaagtatttactatctaggtttgctgacctatactaagcataaaaatgaaagttacgtgctgttactcaatatccaattccagagcattaaagcggccctaaaaagacttcttcataaagaaactaggaaatgggggttatttcaaatacacagaatatctggactactcttgccagttggtattttatgccacagagtcccaactcaaatgatttggggctgagttggttacttacattaacccaagaagttacccagagttgtaagatgccaaggagcagtgggaggggctggtagggaactagagggcacatgcctgaagacattcacattctgaacacaaaagatgttcacattcacattcaaaacacaaaaaagtgctatgctaatcaatcaacacatctagtttgcacaaatttgtgtgatttatactgaaaccattgccatatggacgaatgtcattttctatgtctacttctgcgacttgattttatcatttccacctaagaacctcaatttttcttataataagacaatttcctttatcttcttacatttgtgaatttcttagtttagtagatttcaggccaaaggagttcatgggttatggcagaaaacaaagacatcttaaggctgaaagaaaaggggcatgaggattgaagtctataaaggcccacttccaagatggcacgttatagtctgcatctcctagtatccacacccttgagtaataccctcacctttactgtgggctggagctggtgacttctaatgcatagaaaacttcctttagttaagttacaaaaaattataagactttggttttgctagcaaactgtcttgctagctttaaagacttacctgagcagcccacatggcaagaaactgggggcaacctctggccaagagaggaactaaggccatcgctacaacagcaagagaggaactgaatcctgccagcaaccactgaataagcagaccctgcccgagatgaacctcaaagtggctgcagccaataccttcattgcagcgttgtaaaaaaccctgaaacagaggacctaactgggtccagattcctgatccacagagactatgaaataataaatgtgtgctgttttaagccttcaaatgttggtacaatttgttacacagcaattgataactaatacaaattattataggagagaaatattttgcatgttgttctggggcctgtttgtgatcctgctagcatttgaaatggtgaatattctacagtgcttttgagagactattcctgcaccaagtgcttacctcagtttaatgccatgcagggccaatgcacctggacatttcctcttctttgacatccatatttctcattaccacaacaaaatacattttttaaaaaatagtcatggcctggcgcagtggctcacacctgtaatccaagcactttgggaggccgaggcaggcagatcacctgaggttgggagttcaagaccagcctgaccaacatggagaaacctcgtctctactaaaaatacaacattagctgggcgtggtggcacacgcctttagtcccagctactcggaaaggctgaggcaggagaatcgcttgaacccaggaggcggaggttgcagtgagccaagatagcaccattgcactccagcctgggcaacagagcaaaactccatctcaaaaaaaaaaaaataataatatatatatatatacacatatatatatacatacatatatacacatatatatacatatatacatatatatacatatatacatatatatacatatatatacatatatacatatatatatacacatatatatacatatatacatatatacatatatatacacatatatatacatatatacatatatatacatatatatacatatatacacatatatatacatatatacatatatatacgtatatacatatatatacatatatatacacatatatatagtaatctctacttggtgattcatttgtctttttgagaaatgtgaattagtaccttgccagatacttcttaccaaataacagaaagaatgataactggaaacatttattttagaatattttgttactttttaaataaataagtagattgtgttttcaagtaatgttcattgaaaacatattaatattgaaaaaattcaatttttattatttctccaatcatatatttgaaagctgaataataaacatttacataattttaagttttacttcaaatatgagatcattattgttttttcttttattttagaagataaatgtttaccatatgagatttttcaagtttttcttctttagatcacatttatgtaagactcatatcctttcaaacagatttatattgtgatactttaccttatttaataggatcaaagtttatttgaaatgttattttattataagatgtctgcagtttgcttgaaaagtatgtgtgtgggcagaggaaaggaagaatgggttaagaaaacacattttaaaagaccagccatgagtcgatgcttgttaaaattgacgatgagttcattgtagtattctttctagttttgtatacaaatgtaattttccatcctatgtatataaacacctcgtctcttctaaggatcctattgcagtatttcacatataattttttaaataaaatcacttgctactttcaagtttcttgccacatcaatcagcaaaacaaatatgtgtaacattttctattttcagtaggattattcacttcaaaagagacatgctgcagaggcagtttcaattataacaactttgaatactgaataaattttactggagatttgcaatggagcagaccaccttatgctgtgttccttatatgcgtcatctcaatctaatcctcacacagttagttttattccaacagtaaaaggtgacttggtactttcctccataatttacctgaataagttatttatataacttatacatgataaacttatgtaataagtatgaatcataatctctatgaaagccaaatataaattctaaaggactatataatatgccgtggcattattttctactattgtaatgcttctctaggaagttatttgacgtcataccagtttgacatcttcccttcaaatacttcatatactgtctgcaacaaaatacatcctgacacagattatgacagatgtttatatttaatctttgaagggcaaataacataaacaagcaagtaactttttaattagaagatcttgcttggagtgatattagaaaagtatacagctgaatggtttgatttcatatttgttaagttagagtcaaaataagaggccactaaattcaaaagagttttaaaattttaaagagtaagaagatagttgatatgagtatctggagaattcaaaacagtgagccagctattgagagaagctggagaatatttaaagtcccattatacttactttacatgctgtcatcaaaaaatttactttgtttttaaaaaaattgttctatggcttgcttttgcataattaaaaaccatgagacaatatttattttatttgtttttgtgcgaaattgtgtttattcattatgtgtttgctatagttaattaaactcactcatcacccttgtagagtcaaccagtctgtgacttcactgatcttgctataatcaacaatcaccaatacgaaagcagtgtagattttctagaaatcagcataagcatttgtgagacgtttctttcttgcatcagctgtggaaaattttatttgtaaaatacaaatgaattctcaacctttcatctccattttgttatgaagttcattgtctagtaaattatctgggtttagagcctggcccacagtttaccctatgaccatgggaaagcctcctttttctgtttcctcatcagtaaatggacacccctgtcccgctttcaagacagttatattgtatagtagcataacattcatggtaagtgttcaaaaagagcatttcttcccttcatgtgagatgacttatttttccttttctttttttttttttttttttttgagacacagtctccctttgttgtccaggctggagtgcagtggcatgatcatagctcaccgccaccttgaactcctggtctcatggatccccccatctcagccttctgagtagctgggactacaggcatgtgccaccatgcccaggtaagtttttaatattttttgtagagacagggagttggccatcttgcccaggctggtcccgaatgataacatactgttttataagtggttacttgtaatctcacttaattaaagatgctaattgcacaagtgtgcaattcatcatgatgatgatatagaacctgaggcacggaaaaattcagaattgagaagctgaaaactcgtcttcaaactcagaaaaaaaattaagatatcagcaggacactttttactttaaaaatgtgtttagttaagggagtagttattgttaaatacatgttgtagtatttgtaaattgtcagctctcttattttctttctcagaaatatttccccatggtgtctcaaagtttccaaacttgcctgatcatgaagttcttctgagaaactctttaaaatggacgttcagagcccctcccctggagaggctgatgcatctgggtgggggaagaaattcatatatctaactgtttccccaggtggttcttatgatcaggcaggaataggaaaaagcgcatcagctgatctgcccattttgctgattgggggaatgtgtattcatgcaagtcaaccaccaaaattacattttgtctaagtcacagcgtgctcaaattcagtaattgttccctcagacttagcagtgggttgaagcctgcagggctgaaaagttaattacagtgaaggttgagaaggtaacttggccacacagccctttgtggcaggattatatttcacagagttaatctctgtgttttcagagtaattccttccctcactgtttctcactcatgcactgaggggctcttttcttccctcccacactcttccctccttccttccctccatccagccaacaccaaagcagaaacaaagactgaaagaagcttcggcttcagtgtcagacaatagggctggaagatatacttgccaagatagggtcggcctagaaggaagtaagtaaggagaaaacagaaactaaagggagataagaggacagagtggcaggcgaggggccacagaataggaagggaggggagaacttctatctcaggactaggaagtggggattcagcactgatctggagtataggtactctgctgacctgctgtctaatagtccttccacttaggaggagagatgactcaacactttgtgcagagatgacactgtgatggaaggacatcacccttgatttgcatggcctgttgagaaccgatctttgagaactgaagtgtacagttgaaacataagctcagaaaactaaatccttaccttttggcaaaaattttttagcccctttgataatatcttcatcattattgagtcaagctcatttctctcttctttctacactaaggccagaccataaaagcacatataagtatgtccaaagcttttgaatttgtcaattcttatttctaatgaaaaataataaatgtcattctcatgccccagttacattagtgaagacaggcaaactcctaacaatcccaaagtttctgtggcttgacccaataaaggtttacttcttgattgctaggttctagccactagacctggagatttttctattacattgatcaagtaacccttttataaggtatgcatatattttattcctagggtccttgaaattaataagccactgccaaatatcttgtgtaaaaatatctcattgccacttcatcctggcagcccattatggtcaatgctctccctttctctttgccaactaagcatttccacttcacttctgcttcgataatgcagtggagactgcattatctccagacatcaggaagtgcatctcaatgatagtatctcctactgtcgcatccacccataatgaagcagtaaggttaagactggtgctcctggctgggtgtggtggctcacgcctgtaatctcaacactttgggaggcagaggtgggtggatcacctgaggtcaggagttcgagcccagcctggccaacacggtgaaatcccatctcccttaaaaatacaaaaaaattaagcagaacatggtggtgcacatctgtggtcccagctgctcaggaggctgagtcaggagaatcacttgaattcaggaagcagagttctcagtgagccaagatcgcaccactgcactccagtttgggcaacagagcaagactccgtctcaaaaaaaaaaaaaaaaattgttgctcctctcatcaataaaattttcaatggcttagtgaagagagtatcctctaggccctcttggaagatagggtagaggaatgggtacatatcctgcacacaatgaattcacccccacatttctatattcctaaacttttggattccttccttctgccagggcagttctggcatctcaacctcattgaaagtcagccaatgctgagcccaaggttcatgttgactgttggagctactctgcctgcacaggttcacacattcaattcagaatgtctggtaaatgtacccatagcaataagtatagacatcgtcagtgttatattcttttcctccatggtcccacacgtatatccaagattgctgctaacgtaaattaccaaagtcttatcattcttttagaggctatttcttcctatgttcgacttgtaattggccccagaacatgattagataggactcaaattaagggtttacagataacaaggcgtgattggggtagggtttgaggaaaataaacttctacttgtaaggcagctgccccaggttaggctattaaatggtctaacagggagtctgctagaaccaggaaaacatagtatgcagagcttcatctctgcatgagaaaggagagtaaaaaaaggtgactttgaagctggagacaatagtttatgaactggccaatgattgaggccgtgaatctttcttccctagcttgtgggagccttttgaaagcagtactgcaccttgctctagcattttgaaaagtgacctcagtgtaaagaaattgtgatgtgctctctctgtaacagatgtatgtttttaaaactgaatctgtttgaccgggcatggtggctcacgcttgtaatcccagcactttgggaagccgaggctggtggagcacgaggtctcctggctagcacggtgaaaacctgtctctactaaaaatacaaaaaattaacctggcatggtggcgggcgcctgtagtcccagctactcaggaggctgaggcaggagaatggtgtgaacccgggaggcggagcagtgagccaagatcacgccactgcactccagcctggacgtcagagtcaaaaaaaaaaaattgaatttgtttttcttttttaatgtagaaatcattttggaagagaaaaggtcatgttagttctggaccaacaccctaatgtctgtgtgtttgtgggacaaatagtttgcaattgaataggaaacaatgggaagttgtcctgagtctgacagatatgaatgaggtaaagaatctgactactgtactccagaatcttcagccaggccccatcctaccttcaccgcctgtttcacattttcatgaatctttctcatactctcctggtcaaaatcaatatattcctcccctctattcaataacatggtgtatgctctccttgtcctgtatcagtaacatgtatacataaatgtcatgtgtgtgtctcaccaaaataatagaaagttataggtaattttattgacccagctactccacaggaatgacagactgggccctttgtagcttaacgccgtgtcctctgatgctacctttgccatactcagtcatctgagccttccaatatcctatttcttcttctcaggacttgctacttttactggtggcaccatgactccttatctttcaaaagactgagtttaaatgtcatttcctctagggtgcttttccttactgccccctagacacaccctacccatgtcctcaccccaggtgggttacgtgttctcactatgtgggctcattaaaccatttactcatcttctactcttattacagcattcattatcttttatttatttgcttttttggctgttgttcctgctagtccatatgacatgacatcactcacagaggaggaatgcaattggtatttaaaagacaattgtcaaataaatgttaaaaaatgaatgaaggccgggcacggtggctcacgcctgtaatcccagcactttgggaggccgaggtggacagatcacctgaggtcgggagtttgagatcagcctgatccacacggagaaaccccatctctactaaaaatacaaaattagccgggcttggtggtgcatgcctataatcccagccacttgggaaggctgaggcaggagaatccgcttgaacctgggtggtggaggttgtggtgagccgagacatgccattgcatcccagcctgggcaagaagagcagaactctgtctcaaaaaaataaataaataaaaataaaaataaaaaataaatgaaaatctagatttgatgtttgatttgtcatttcagtctggcgtgtaaagaaagctgccttataggcagatccttataaaagagctagatgagataagggaataatattttgaaatcaaacagatgattaacttaaaatgagatagaatcagtaacaaaataaccaccactccatgaagtcaaatcagtgttatggaggacaatcttgaaaagttctccagaatgtactgagacaaaagtaaaaatatgagaaaattataggacggaaaatgcaatttgaaaaatagtatgatatcaatatattgcatatgaccaaagaaacagaaaaaaattaattcctttggggagaacagaatattaggtgagtttataaatgaataaatgattttttaaaaattttacatgcctctgttatacagaatccagaaagaacaaaaacaagcatgagtaaattaatgatatatgtaagaatatcacccagaacgtaatatggagatacaacaggatggaaaacagagagaaattcagaaatatggaagatataatgatgatataaaacatatgtctgaaagaagagatgaaatagaataagggaaagacaatgtttcaaaaggcaataattcaaaagaactttccaaaatttaggaaaaactgtaaatcatcagattgaaaaatttatcaagtcttagacagattaaatttctacaatatacatgtggcatataattttataactataaagtcttaaatccagaaagtaaatggtatagtgtctacaaatatatcacaattagactgaaagcagatgttttgtcagcaacaataaataaaagcaggctctcaaaataaatgaatgaacaaatgaaaatagaagctgtgaatatacctcaataaagacaaaagaaaactcaaacctatggagaaaaaagtagtgtgtgtaaaattgataaaatattttagaaaatttaattatgtattgcatataaaaattaaaacatcattattaactttacttatgagacctcagtggtattatggtatggcttattcctgaagaggaacagtaactgaaaaactgcagcctttattagaaaataatgaaagctaaatatttgtattaaatttaccattaaaagctacaattataaaaattaaagcataaaaataaatgaattaaattctaaattgtaaaagctggagaaagaaagactaataaagcaaaccaaaacaaagcagttggaaggatatgtaaatacaaaagtggaaaatcataaattagaaaataggaaaacaacaggtataataaatctatatgctatgttttaacaaacaatagaaaatgactagataatctaatccagaaaaaaggagatagcacaaaagaatgaaagatagaggaaataaaaattagaagagaacattaaaatcatgagcaatttttacatctgggaagatagaatagatatactttttcctattcttcctactcagtccagctaaaaatcctagttatcatatataaagcaaacataggaagaatctggacagtggagagaagataaaatggctagggaccttgggacccaagcaacaacaaagtggtgcattccccaggttgcgtttgcttcatatatccgagattttgagctggagaaattggcaacgaagaaatgccaaggagtgtgaagagaaaaagtactaacaaaacctgctctctctagccagaggactagggacaacttagcctagacagaaaaccttagacaataaccattctaccttaaccaaatactacagaaaacaactgtggtcccacctttgccagttgtattagtctgtttgcattgctatacaagaatacctgagactgggtaatttataaagaaaagaggtttatttggcttatggttctgcaggctgaagaagcatggcaccatcatcttctcagcttctggtgaggccgcaggaagcttacaatgattggaggggtgaaggggcagtagatatgtcacatggtgagagagggagcaaaacagagaggaggaggtgtcagtctccttttaacaactagctctcacaagaactcatagagtgagaactcattcatcaccaaggggaaggcaccaaaccatctgcctacatgacctgaacacctcccactagaccccaccttcaatactggggattgcgttttaacatgagatttggaggagatacacatccaaatcacattaccagcaaaggcagtgataggggtgtagattttcacccacatcaggcactcacaaggcattcctaacactccatggggtgctgtcagagaaggccaagaagggagctgaaattttcatttctgaagagtggtcatgggactcccttccttgaggtatcagtggaaaccatgtgggaaacccagacacccacccagcaggcactaacaaagtgccattcccactctatgctgcagcagtgtcagagaagggctagtggggagtcaggactgccaccatcacccaacagtagagaagccaccctctaccaccactcctgtggtgtcagtggaagacatatgatagcagaaattaggcactcctactccatccagccataaaggttttaatggaaacctagtgaggagccagaaatcccatccccagccacccagctgtaataaggagtcattccctcaggtgtcaaaggagagtgaatggagaacctggacgtccaccatctatctggaagtagtgaggtagcaccttcctgccttattctgctaagttactcagctaaaacagaagatttaaataagatgtagattctcagaacataatacacaagatgtccaggttctgatttttaaaatcacaacaaccaggaagatatcaaactgagtgaaaaagaaaatcaatagatgccacacaagatgacagagatgttacagttatttgacaaagattttaaacaaaaatcccttaataggcaattattagcacatttgaaataaaatgaaatttgaaatttaaaaaatggaaagaaatgaaagataaaaatgagaactaaaaggaaatttcagaactgaaaaacgtaataactaaaatttaaaaaatcaataaatgggctcaataaccattcattctgaacaacagagaaaagagactgaggcggaaaaaagaacagagcctttaggaagctatgggattataataaaaggtcttaaacgttgctatgattagagtcctgaaagaaaagaagaagtaagcagagctgaaaaagtactcaaagaaacaacagctggaagcatcacataaatatgtacaattattatgtgtcaattaaaatcaaatagaaagtttaaaaaattttaacttaaaacaagtacttttttcattaaaaaaggaaataatcgctgaaaactttcaaaatttggcaaaactataactctacagattccagtgctgagtgaacctcagaggatgaactaaaagaaattcatgccaagatatactgtagtcaaacttctgaaaattaaagacaaagtcttaaaagcagtaagagataaatgacaacttacctaaagaaaaagcaattcaaatgacagcagatttccatcagaaaccatggaggccaagagaaagagacacaacatttttcaagagctgaaagaaaagagctctcaacctagatatctccatccagtgacaatatccccttcaggaatgaagcaaaaattaagacattgccatatgaaggtaagctaagagatgttgttgtcagccgagttatcctaactccccactagcccttctctcacatgaactcatggagtgagaacccattcatcaccaagggaaggcaccaaagcatttgtaaaggatctgccccatggatcctttgaaggagtaactttgaaacaccaggaaagaagaaagaccacagtaagtaaaaatataaatacattaagttttcttaacaatgtttgatggtggaatcaagcatgataacactgatgtggttttaaatgtatgcaaaggaaatatttaaggcaattttgtgataaataagggagggtaaacatatgtaaagagaattgacttctatacttcactcaatgtggttaaaaatgacatcaatagattatgatatgcatataaaatgtaatacttggatcaaccactataaaactgtacaaagagatatactaaacagcaatatagataaatgtcttaatccatatgtgatactatacaaaataccatagattaagtggtttataaacaatagaaatttacttcttaccgttctggagactagaaagtccaagatcaagtcactggcagatttggtgtgtagtgagggccaacctcctcataacttctcagcaaggaaggaacagagggtatctcttgaatctcttttagaagaacactagtactattcatgagggctccagacttatgacttagttatctcccaaagatgtcactccctaatgccattgtcttcaagtgaggatttcaatacatgaatttggccaagggacataaacattcagaccatagaaataaataaaaattaaattcttaaaaattttcaagtaacccacaagaagtcagaaaaaaaagaaaacaagaaatactaaacaaaaagaacaaaaaaaaaccaaaaaaatataaaatgtcacactgaagctctcatacaccaataattacattaaatgcaaatgatccaaatatgtcaattgaaaaatggaggttggcagggtggactgaaaaacatgtcccaactgtttgctgtctacaagaaattcatttcaagtgtaagaatataggcatgctgaaagtaaaagcacagaaaaagatgttgtgcaaatgttaattaaagaaaaagcagagttagctgtattaatgttagataaagtagacttcaaagcaaagaaaattgccagagacagagaagaacatttcaaaatgatagaagggtcagtccaccaagaagacatagcaatcctaaatgtaggtacatcaaaacaaataaacaagcaaacagaaaaaaaactgatagcgctgaaatgagaaatagatgactccacaataattatttgaaacttcagcactcatctcttaaaaattgaaaagtaaataaataaatgaagctagcagggatatagaataacaccatcatccaaaagtatgtaatcaacatttatagaaaattgcacccaacaacattagcatacacattctattcaagtgcagaaggcacatttatcaaaatagactatattccagactataagacgaacctcaataaatttaaaagaattaagatcatacagagtgttttctctgaccacgttaaaaataaaactagaaattaataacagaaagataataggaaaatctccaaagccttggaaactaaataacacacttcaaaacaattcatgaataaaagaggaattctcaaaggaaatttttaaaatgcattaaaataaatgaaaatgaaaatgcaccatatcaaaaattgtgggacacagctaatgtagtactgaggaggaaatgtataggttaattgcttatgttagaaaaatttcaaatcaacaatctaagttcccaattcaggaacctacattaagagcaaaaaaggaagagcaaaataaacccaggtcaagcaaaaggaaggaaataataaggacaagagcagaatccaatgaaattgaaaacaggaaagcaataggaaacatagaaagcaatagaaaacatctttacgtaggttgtattcataacagcttttaattggaaacaactcagatgtcctccaatgggtaaatggttaaacaaactagggtacatccatatcatagaatattacttagcaatagaaaggaatcaactcgatacataacaatagcttaatgaatctgaagagacttatgctgagttttcatcgaacaggagagtcaatattgttaatatatcaattctccccaaattactctgtagatccaatgcattcctaaacataaccctagcaggctttttgttgttgtttgaacttaacaagatattatgtcatttatgtggaaatgcaaacaatgtagaataaacaaaacaattttgaaaaagaataacaaatttaaatattcacaccttctaatttcaaggctacagtaactcagacactgtgatttgtatgaagatatacatatagatcaatggagcaaaacagagatccaaaaagagatccacacacaaatagcaaattgatttttgacaaagacgccaaaacaattcaatgtggaaagaataatccttttaataaatggtactggatatttgaatatccatactcaaataaaagaatctcaatctataaaaaccttattgatctaaggttaagcaaagattttttaaatagaaatacaaaatgcacaaacaataaaagaaaaagattaagtacaatttatgaaactacaaatttgggctctttaaaaattggtcttaagaaagtgaaaaataaaccacagaataggagaaattattttcaaaacctatatttgacaaatgttctatatccaaaatacgtaaaaagtcttacaaatcaataataactactcaaccaactcaattaaaacgggtaacgatttacatagacacgtaagcaaagaagatccagggatggctaatgagcacctaaaaagaagttcaacatccttagtaactgggaaaatgaaaattaaaactgcagtgggatatgactacagcatattatgacggctcaaatttttaaaatctaacaagaccgagtgaagtgagaatgctaagcaactggaagttccatagattgctggtgagaatgcaaaactgtacaggcattctgaaaaaatctggctgtttcttataaagttataaatatgcttactatataatctagcaacccactctaggcattcacccaagaaaaatgaaaatttgtattcacacaaaaaaatctgcacacaaatgttcatagcaactttaatagtcatccaaattggaaactacacaagtacaccaaacaaacttttgtacatccctacagtggaataccactcagcaataaaaaggaaggcaaacaacagctcagtgaaacaacagggactcatgttaaaagcattgtgttaagtgaaagaagccaaaccgaaatagcgtggacagtatcatgtcatttatacgaaattctaaaaaagaaaacactatcgtagtagaaatcaaatcagtgtttgccaggggccaagggaaggggtaagggattgactgccaaggacataaagcaacctttttggcgtgacggaaatgttctgtattatgaagatgaatatatttatttcagtcatcaaatttgcatttaaaatttatgaattttactttaggtaaattatacctcaataaagcgaactctctctaaaacaaaacatataagccaaattattcagttttgatcagataaccacagaggagagatataattatttcaagtaattttgtaacacactctgactgcatgtatttagtgttatttataaagacaaaaaatctgcaaagaaatattgaactttagtccatatacttattgttagcagtactattggtactgtaattttgaaattattttaggcatattgtagaataaagcaaataaatatttaatattattaagaaccaacattattccagtgtcatagaaaaaatagtccaagataaaatgaaagaagttgaggaaaaacccatgcaatgttaagtttgaaatggagatatcaatatgaggtcctatttttaaaaaatattactattagctgtaacccatgaaaaagcctaaaaagaataatactgcaacagcaattagcactcctaatattcagatcttagtttttaaatacagttccccacttacaaggaaccagtacttggagaaatggctcctctagatctttggatagaaaagagcaagatgagcctgggacaacttgtgataaaaagcaagaaaaggctcaatggttaggggggtcatatttaaaaagacacagtgaccacactgatgtggctcctaaaggtcacatttgggacaacttaaacatcaaaaaaatatatataaaggctgtaagtgattagaacacttaaaataattttttagtcaaacagttcatactaatactctaaaagaatacaaaaaagaaaaatagaaaaagagaagggagatgtcgtctttacaaaaatatcacctaacaaatgtaaatagaatggtaaaatttaaaaattaccattttgcaaccccaagtacaattattcatacacattttatttatatgtcttataaaaccattaagggacaagtcatcaaggaacagaatatgacaaatattaccctatcatttactaattagaaaaaaaaatatatcttaaaattgagagatctgtaaaccagttccttaacaaggtgatcaaacttagcataagtcactaatagttgctaagagtattacactttgacataattggccctctgatgtgactacaatgggactgaaaatatcatctatgaagtactattgccaaaaatgtttactttgaatcttatcaaaaagcctctagacccaaccaacaatttacagaaaatagacggaacaaatagtcaagctgttagcgaaagaaaaaataaataaagtcattcttggacaattggtggtaatttaaatatggattatgtattagatattacagaattatttataatcttttaggtgttccaacatagactgactatgtaggaaaattcccttattcttagtagctgcatgctgaagtgtttagggtaaatctcaggctgtctgcaactttctttcatatgattcatggggggagatacatacacacacactcacacacttgcacacacacactaagtgtgtgagagtgtatgagagaaagaatatgtggcaatatgttaaccagtgagatctggatgcaggttaatatagatgttcattattgtattatttgtttaacttttctgtaagtttgtttttaaaaaataaaaagtgattaaaaattgttccaagggaaagctatacagataatttttttcaattgtaatgctgaaaaaaaacagtttttattgcaaaatgactagcttgattatatgttctttctttgacaacagggaaaaggagttaatccatttctttctgacagtatgtacttcctagcttccccataactatcaacaatatcactaattttctttctacaaatgtgaaaattggttattgtttataaaatagaaatgcaaaatatacttactattttataattgttctttaaacagaattaatatgttttcataaactccattgtaagaatgctataattctccacattttaaaaaatgtaatgacagccactaaaagaatagaaatacaatctatagatttgaaattaataaagtgggggccgggcacagtggctcccgtctgtaatcccagcactttgggagtctgaggcaggaggatcacttgaggtcaggagttcgagaccagcctggccaacatggtgaaaccctgtctgtcctaaaaatacaaaaattagctaggcctggtggtgtgtgcctgtaataccagttacctgggaggctgaggcaggagaatcatttgaacctgggaggcagactttgcagtgagcccagatcgtgccaccgcactccagcctgggcaacagaactagactccatctcaaaaaaaaaaaaaaaaaaagaaagaaagaaaaaagaaaaaaggaaagtgttacagaattttttatcagtccaatgcagggaaagatataaaaagacatagctaaacttaaaaataatataaacactctccgaaccagaaactgaaagaaaattaaaagtggccaccagtgctaaacccacaggccttctgagctctggcgtggaagcagggtctgagggtgccaattacctgaggcaaagaggccagaaagagaaccattcaagacaaggaatcagagagtcagactcaagacttaatgcctggaattagggtagggctgccctggccatgaaagggaatggggctaggggaagagtgatgaggaatacccaacaaactgtgaccaaaaagcatgtggttacagcttttaggaagctacgggcataaggaaattggaggacacagaagtagcctcctaaacaaaaatggaaaccaaccacccgctggctcacacctgaatctgcattgtctctatcacagaagaaattaagagctcactatattatgtaaacctagtgagagagagagagacctttccacccaaaatgagtctgcaaactaaattccaaaacataagaaagaaagagagtgaacaaagtcaataatcgtaattttttaatgaaagttttaaaatcagtgggtttcaaatgtacatgaaaaagtaatagcatttattagaaacaaacaaaaataatgaaacagttacatatgaaactgaaaacgacagttttgagatagaatgaaatatttcagaaatgcaatataaagtcaatgaagtaatgtaacatggtaaattagaaaaatggaagatggtactgaggaagttccacatgcagtacagaaataaaataataacatgttcaaatgaaagagcaattatgatacatacagaagagactgagaagttccaatacatacatagtaggtgttgaaaagattgaacggagcagtagagataagttacatattttaaagtttgcaatattcagtagagataaatggatacatcatagaataataaaataaagaatctattaagactataggccggactcggtggctcacgcctgtaatcccagcactttgggaggccgaggcgggtggatcatgaggtcaggagatcaagaccatcctggctaacacggtgaaactccgtctctactaaaaaaaaaaaaaaatatatatatatatatacacaaaaatatacatatatacacaaatatatatatatacaaaaaaatatatatatatatacaaaaaattagccaggcgtggtggccggcgcctgtagtcccagctactccggaggctgaggcaggagaatggagaggctgaggcaggagaatggcgtgaacttgggaggcggagcttgcagtgagccaagatcgcgccactgcactccagcctgggtgacagagcgagactccgtctcaaaaaaaaaaaaaaaaaagactctataaattgtatgtaactacaaaccaacaaaattgcttcaaagaaaatatacaaattgctaataagcacataaaaagatgttcaacatcattagtcattagagaaatacaaaacaaaaccacaagaaataatttcgcactcatcaggatagctatttttaaaaaaaatgaaaaataacaaaagttggcaagtatgtagagaaattgaaaccttgtgcattgctagtgggtatgcaaaatggtacagctgttgtggaagtttggcagttcctcaaaaagctaaacgtagattgtgcacccatgtacatagcagcattattcacagtagccaacaggtagatgccaacccaagtgttcattgaaggattaatggataaacaaaacgctgtatgtacatacaatggaatattcaaccatgaaaagaaataaagaattaaaacaagctacagtgtgtgtgaacctcaaaaacattaggctaaaggaaacaagcctgtcaccagaggatagacactcatcatttcacttatattaggtacctagagtagtcaaattcacagagacataaagtagaatgatgatttgcagggactagtgggaggggagatgagaagttattgtttaatgctacaaaatttcagttttgcaagattaatcattctgtggataaatggtgagatggtagcacaacaatgcaaatttacttgatgccactgacctgtacatttaaaaaggcttaagatgataaattttatgtgtattatattaaaatgtttaaaaagctagcacagaaataccatataagccatcaatttgactccaaggtatgtacccaaaagaattgaaggcaggaactaaaaacgatacttgtatgccaatgatcatagcagcacaactcacaataaccaaaagatggaaacagtccaactgttcctcaaaagattaatgaataaacaaaatgtggtatgtgcacacaatggaatattattcaaccattaaaaacgaagttctgatagatgctacaacatgaatgaaccttgaagacattatactaaataaaataagccaggcacaaaggataaatatttataattccacttacctaaggcacctagattaggcaaattgatagagacagatagtagattagaaagtaacagagaccagaaggaggaagaatgaggaggttttacttaatggttacagagtttctatttggggcaataaaaatgttttggaaatagggttacacatcatcatgcacataattaatgccactgaattgtacacttagaaatagctaaaatggtaaatcttatgttatgcatcccttattacaataaatttatatatagcaaaaatgggcagagatatagagaaataatacatattcagaattatggtgggaaatttttacctgcatctatcaaaaaacattagtggacaaaaaaattttaaaggatatagtacatttaaacaataaaaccaaactgcttgataggatggatggatgtggtgtatataaacagtgcccccaacaaatacatgaaatataagccttttttttttcttctttttttttttttaaagacagaatctcactctgctggccaggcttgagtgcaatggcatgatcatagctcaccacagccttgaactcctggacttgagcattcctcatactgcagcctcctaagcagctgggactacaggaatgtgccactacgctcagctaattttttaagcttttgtagagatagtgtctgactgtgctgcccaggctgttttcaaattcctggcctgaagcaatcctcccacctcagcctcccaaagtattgggattacaggtgtaacccaaaacaccggctgtgaaatatattcttttaatgtgcacatagattattcagaaaagttgaaatgcattgaatattctttgctgatatctggtcaaagaattaatagcatgtaaattgtgacctctgactataatacaatgctattagaaataaacactaaagattatttaaaaggaaaatttcccttaagcttcaatatttgaaacctttaaaatgtaatgaggctattacaatagaatagtcataaattaacacttataaaagtactatatatcaaaatgtatgagatgcagctaagtggcatttagaggtaaatttattagaatcgaatggatatattaaaaactaaatgactgaaaattaaatctttaaatcaagatataaaataacaagaatattctgaagaaaaaaataagcaataaagattagaataaaaatcaatgcaatagaaaataaaagaaacagcagagggcattcacagttgctttttaacactgatattctaatcaaaacaataaaataagaaaaataaatatatgacacaagaattgggaaagaatggatgaaactgtttatattttcatattccattattgtctacagtagtccttccttatcagcaggggatacggtccaagatccccagtggatgcttgaaaccacagatagtacctaactttatatatcatatgtttgtttctgtacatacttacctagaataaagtttagtttacaaattaggcacaattatgaattaatctgggtggccagattccccagtttcaactacccaccatcaatcaaggtccaaaataggtgagtacagtataataagatattctgagagagagagagagagagagagagagagagagagaaagatttcattcacaaactttttattacagtatattcttataattgtattattattagttattgttaatctcttattgtgcaaatcattctaatgatcttttacaaagaacagcaaaaaaacaatactgaagcttagaaaaaagaagacataaattaatgggaaaattaccaactccaaagattggaaaactctatatgaaagagtctgtaattatctttaaataaatctacaaattaaatataaacacaaagtcttacctgacaatttcattgaagttgacaaaagactaagaatttcaaagacaaatttgaagaggaacaagaaggggagggggcatattatataaagcaatagtatttaagactgtctggtattagctcagggtattagctcaagcaagtagaagtgatagctcaaaagtagatctactcacatatggaaaccatatatgacagatgtgtgagaataaacacaccattcaatacagagggctggggaggggaggacatggagcaagatggccaaatacaaccctccagcagtagtctcccactcccctgaaggaacaccaaattgaacaactgtccacacaagaaagcaccttcatgagacccaactctcaagtgtgtgaacacagtaccttgttttaacatcacgacatttaacatcataacaagaaaagaggcactgaagagggtaggtaaaacagtctcgaattgttgtcaccacccctccttcattccctggcggtgactttgtggcaccaagagagaatctgtatgcttgagggagagagaacaaaataattgtggacttttgcattagaactcagtgctggcctgtcacaacagaaggcaagatagggcagaattcagctggcatccaaaaagggagcatttagccagcccaagcaagagaggaatcattcatcccagcagttggaacctgaatttgggctagccccactactgcgggctgtagggcaatgggctcctaaataaatttgaaaggcattctaggccataaggacttcaatttccaggcaattcttggtgctatgctgggctcagagccagtagtcttggggtacacatgacttagtgagataccagctggggcagccaaggcggtgcttgcatcaccactcccccaaccccaggcatcaccacccacagctctgagagagactccttccttctgtttgaagaaaggaaagggaagagtagagagaattttgttttgcaacttggacaccaggtcggccacagtataataaagcactaaacagagtcctaaagcccagaattcaggccctagttcccagatgacagaagggaacccactgccctgaatggaaagacccagtgatggcaggattcatcacttgctgactaaaaagcccttagactttgcagaaacttcagcagtagacaggcagtagttgccacagcccctgagagagacccattagtgtactggctttgggtgtaactctctacattcccagctatggtgaccatgaggagagactccttattttcgaggaaaagagagggaagagtaaaaaggattttgtcttgtggcttgggtcccagctcagccacagtaaaacaaagcaccagttagattcctaggatttccaatacgagggcctagctcctggatggcatttctagacccaccctgggccaaaagggactctgtttccctgaagggaaagatccaggcctggcaggattcaccaacctgctgagtaaagagcccttgggacttgaataaacatcagtggtaaccaggcaacagtcactacaggtcttgggcaaaaccaagtactgtgctggtttcaggcatgacccagcacaatcccagcagtggtggccatgaaagttcttgtgtcacacctccctcaagtccactcagtatagcatggggagatagactctgtttgtttggacgaaagtaagggaagagaataagacactctgccttttaatccagggaatttttctagatcttacccaagatcaccaatgtggtaccactacaagtctgcaacagccacagtgatactgagcttggggtgtcctctaatgcagatatagctacagtgaccaaagacttagatgacaacactcaatttcatttgaatacctgaaaagtattctcaagaaggatgggtacaaataagctaagactgcaaacattagaatacatacataactgttcaacgcccagacacaaacatccacaagcatcaggaccacccaggaaaacataacctcatcaaacaaactaaataaagcaccagtgacctatccaggagcgacagagatatgtgaccttgcagacagagaattcaaaatagctgttttgaggaaactcaatgaacttcaagataacacagaggaggaactcaaaatctatcagataaattcaccaaagagattcaaataattttttaaaatcaagcaaaaattctagagctaaacaattcaattgagaaactgaggaatgcattggatatctcaatagcagaattgatcaagcagaggaaagaatcagtgagcttgaagacaggttgtttgaaaatacacagtcagagaaaacaaaagaataaaaaataaaaaagaatgaagcatgccttcaagatctaaaaaatagcctgaaaagggcaaatctaagagttattacctcaaggaagaggtagcgagagatataagggtagaaagtttattcacagagataagagaaactttacaaacctaaagaaatataccaatatttaagtaccaggaggttatagaacaacaagcagatttaacccaaataagactaccccaagacatttaacaatcaaactccccaaggtcaagaatgaagaaaggatactaaaagcagcaagaggaaaggaacaaataacatacaaaggagctcaaatacatctggcagcagacttctcagtggaaaccatacaagccaggagagagtcgcatgacatattcgaagtgctaaaaggaaaaaaaacttttattctagaatattatatctggcaaaaatattcttccaatataatggagaaataaagacatacccagacaaacaaaagctgagggacttcatcaacagcagacatgtcctacaagaaatgctaaaggaagttcttcagtctgaaagaagagggcattaatgagcaaaacaaaaataaaaacaaaaacaaaaaccctgaaggtatgaaactcactagcaaaactaagtacacaaacacagaatattataacactgtaattgtgatgtgtaaactattcttaccttaagcagaagtacaaatagatgaatctatgaatccataaaaataataactatacaacttttaaagacatggagtaataagatataaatagaaacaacaaaaagtttaaaagtaaaggggatgaagttaaagtgtagagtttttattcattttctctttgcattttttttgcaatgagggctaagttgtcatcagtttaaaataatgatttatttgatgtaatgtgcaaacctcatggtaaccccaaataaaaaaaacctatagcacacacacacacacacacacacacgtgcacacacacacacacaaaagcaagaaattaaaatataccaccagagaaaatcaccttcactaaaagaaagataggaaggaaaaaagaaagaagaaggaaggaaggaaggatggaaggaagaaggaaggaaggcagaaaggaaggatgggaggaaggaaggaaggaaaagagaaggggaagggaagggagggaaggaaggaagggaaggaaggaaagcaaggaaaggaaacgagggaaaagaaggagggaaaaacataaagcaaccataccacaaatagcaaaataagtccgtccttaccaataataacattgaatgtaagtggactaaattctccagtcaaaaaatcaagtgactgaatgcatttttttttaaaaaagacccaactatctgctgcctacaagaaacacatagaaattaaaacagagcaggacaggagcagctatacttttatcagataaaatatatttcaagacaaaaactgtaaaaagagggaaactgaatcattatttactaacaaaggggtcaattcaacaagaagatataacagtggtaaatttatatgcctccaacactggagcacccaggtatgtaaataaaatattattagagctaaagagagaggtaaatcccaatacaataatagttggagacttcaatagcccactatcagtattggacagatcattcagacaaaaaaaatcaacaaagaaacatcagacataatctacactgtagaccaaatggacctaatagatatttacagaacatttcatccagaatatacattcagcagaatatacattcttctcctcagcatatggatcattctgaaggatagactgtatgttaggctacaaaacaagtattaaaatattcaaaaaaactgaaatcacatcaagtatcttcactgacctcaatggaatacaagtagaaatcaataacaagagaaactttggaaactatacaaacacacagaaattaaacactatgttcctgaatgacagttgggtcaatacaaaaattaagaaggaaattgaaaaatttcttgaagcaaatgaaaatgggaatacaacatatcaaaatgtaagagatacagcgaaagcagtactaagagggaagtttatagcaataagtgccacatcaaaaagtgtaaaaacttcaagtaaacaacctattgacatatcttaaagaactagaaaagcaagagcaaaccaagcccaaaattagtagaagaaataataaagatcacagcagcaataaatgaaattgcaacaaaaaagaatagaaaagatcaacaaaatggaaagttgttttttaaagataaataaagttgacaaaagttgagacagactaagaaaaaaagagagaagacccaaataaataaaatcagattgaaaaattagacatcacaagtgatacaccagaaattcaaaggatcattatagacttactatgagtagctatgtgccaataaattggaaaacctggaagaaatggataaattcctagatacatgcaatgtaccaagtttgaaccaggaaaaaaaatttcaaaacctgaatagaccaataattagtaacaagacggacaccataataaaatgtctcctagcaaagaagagtccaggaactgatggcttcactgttaaattttaccgaacatttcaataaccgataccaatcctactcaaactattctgaaaaatagaagagaagggaatgcttccaaactcattctatgatacaaatattacactgatggcaaaactagacaaaggcacataataaagaaactataggccaatatctctgatataaaactggtcattcatcatgaccaagtgagatttatcccgcttgcagaggggaccagcctgtctcccatgggtcccacaccctaccccaaccctacaactatgtgtcactggacaaggaacccctggcttgcttgggctcacagcacagaccctccaattctgggctgattgcactgactaattgctgacacacatctctctggagtagagcccccagtaaacaagcaaagtggtggggcagcaagccagctgatacggagcccagagggttgggtgcaggatcatggccagggacagccatccctctaagcttgacttgctcccataagagactttagctttaagggacctgttgaacctgacctctgcagggtggtcttgcatatcagatggagctggtcggacctgagcactccttggtctgctgtcctctcttggggccccagcctggccatgcatgtttatagggcagtcttgggtaccctggaggccctcctcatagcttctgccctggtgaactgtgactgactggaggagggctccagtgaggtggctcctacagccacacacccgtcctcacatttcctccccatactatagcttccccaagcccacatcaattccccacatcactttgctgacacatgtctgcaggggcaggttttgttttacttgcccagccagcacacgggagtgcaataggcccctccactcctgctaactgccactgcagacaaagccttggtggacacagagccagcaagccctgtccccaccagcacccctcccttgtgctacactgcagaaagaacaggggatcctctcacaccctgagagatcactcctgctcgcaaggcacagagaaggcacccagacctccaatggccagcaccccaccccaagccaacaccaactccagggcaataatgcaaacaggattatgtaaagagactgaatctacaactgattgttctacttgaaagagatggggaaaatgaaaccaacttggaaaacatatttcaggatatcatccatgtgaacttacccaacctagctagagaggtcaacgttcaaattcaggaaattcagagaaccccactaagacacctcacaagaaaatcatccccaagacaaatgaccatcagattctccaaggtcaaaatgaaaaaaacaaagttaaaggaaggcagctagagagaaagttcagttcaccttcaaatggaaggccatcagactaacagtggatctctcagctaaaaccctacaagccagaagagactggaggccaatattcaacattcttaaaggaaagaaattccaacaccgaatgtcatattggccaaactaagcttcataagcaaaggagaaataagatcctttccagacaagcaaatgctgagagaatttgttaccaccagacctccctttcaagagcttctgaaggaagcactaaatgtggaaaggaaagaccattaccagccactacaaaaacacactaaaatacacagaccagtgacactataaagcaatcacataaacaagtctgcaaaataaatagctaacatcatgatgacaggatcaaatccatacatatcaatactaatcttaaatgtatatgagttaaacattttaattaaaagacatacagtggcaagttggataaagaaaacattggtatgctgtcttcaagaagcccatctcacatgcagtgacacacataggctcaaaataaaggaatggagaaaaatctaccacaaaaatggaaaacagaaaaaagcaggggttgcaattctagtttctgacaaaacagactctaaatcaacaaagatcaaaaaagacaaagaagggcattatataatggtagagggttcaattaaacaaggagatctaactatcctaaatctatatgtacccaaaacaggagcacccagattaataaaacaagttcttagaggccttcaaagagacttagactcccacataataatagtgggagaatttaacacctcactgacaatattagacagatcactgagacagaaaattaacaaagatattcagaacctgaattcagcactggatcaaatgcatctgatagacctacagaactctccacccccaaacagcagaatatacattcttctcatcaccacatggcacatactttaaagtcgatcacataatcagaagtaaaacatgcctcagcaaatacaaaaaactgaaattatagcaaatagtttctcagaccatggcacaatcaaattagaaatcaagactgggaaattcactcaaaataattaaattacatggaaattgaataacctgctgctgaatgacttttgagtaaataattaaattaaggcagaaatcaagaagttccttgaaattaatgagaacaaagacacaacatataagaatctctaggatacagctaaagcaatgttaagagacacatttatagcactaaatgcccacatcaaaaaattaaaaagatctcaagttaacaacctaacatcacaaataaaacaactagagacccaagagcaaaaaaatttcaaagctagcagaagacaagaaataatcaaaagcagatttaatctgaaagagagagacacatgaaaaatctttcaaaagatcaacaaacccagaagctggttttttgaaaaaaattaataaaatagatagattgctagatagactaataaggaagaaaaagagaagattcaaataaacacaatcataaatcataaggcagatattaccactgaccccacagaaatgtaaacaaccatcagagaatattatgaactctcctatgcacataagctagaaaatctagaagagataaactacttcctggacacatacaccctcccaagactgaaccaggaagaaattgaatccctgaacagaccaataacaagctctgaaactgaagcagtaataaatagactaccaacttaaaaaagcttggcaccagatggattcacagctgaattctaccagatgtacaaagaagagctgattccattcctactgaaactaatccaaaaaaatgagggggagggacacctcgtaactcattctatgagttcagtatcatactgtcatcaaaacctggcagagatacaacaaaaaaagaaaacttcaggactatgtccttgataaacattgatgcaaaaatcctcaacaaaatactggtaaaccaaatccagcagcacatgagaaagcatacccactacgatcaagtagtctttatccctggaatgcgaggctggttcaacatactcaaatctataaatgtgattcatcacataaacagaactgaagacaaaacctacaggattatctcaatagatgcagaaaagtctttcagtgaaattcaacatccattcatgtttaaaaattctcaataaactaggtattgaggaacatacctctaaataataagagccatatatgccaaacccacagccaacatcatactgaatgggcaaaagctggaagcattccccgtgaaaaccagcacaagacaaggatgctttttctcaccactcctattcaacacagtattggaagtcctggccaggataatcaggcaagagaaagacataaagggcatccaaataggaagaggggaagtgaaactatccctgtttgaagatgacatgatgctatatctagaaaaccctatagtctcagcacaaaagttccttaagcttataagtaactttaggaaactctcaggatacaaaatcaatgtgcagaaatcactagcgttcctataaaccaacaatagtcaagctgagagccaagtcaagaatgcaatcccattcacacttgccacaacaagaataagatgcctcggaatacagctaactagggagatgaaaaatctctacaaggaatacaataaagcactgctcaaaaaattagagacgacacaaacaaatgaaaaaacattctgtgctcatgaatacaaagaatcaatgttgttaaaatggccatattgctcaaagcaagttataaattcaatgctatgcctattaaacttgagattcttcacagaactagaaaaaactattttagaattcacatgaaaccaaaaacgagcctgaatagccaaagcaatcctaagcaaaaagaacaaagctggaggcatcatactacctgatttcaaactatactacagggctacggtaaccaaaacagcatgatactggtacaaaaacaaacatatagaccaatagaacagaatagagagccagaaataagaccacacacctacaactatctgatattcaacaaacctgacaaaaacaagcaatcggaaaatgactccctattcaataaatggagctgggataacaggctagccatatgcagaagattgaaactgacctcttccttacaccatatacaaaaattaactcaagatgaattaaagacttaaatgtaaaactgaaaactataaaaaccccctaaaagacaacctattctggacgtagaaatgggcaaagatttcatgacaaagactccataagcaatcacacagaagcaaaaataggcaaatgggatctagttaaactaaagagattctgcacatcaaaagaaactatcaataaacagacaacctacagaatgcaaactatgcatttgacaaaggtctaatatccagcatctataggaaacttaaacaaatttacaagagaataacaaccccataaaaaagtgagcaaaggacatgaacagatacttttcaaaagaagacatacatacagccaaaaagcatataaaaaaagctcaacatcactgatcattagagaaatgcaaatcaaaaccacaatgagataccatctcacaccaggcagaatggctaatattaaaaagtcagaaaataacagatgctggcaaggctgtagagaaaaaggaacacttatacattgttggtgggtgtgtaaattagttcaaccattgtggtagacagtgtggcaattcctcaagacctaaagacagaactaccatttgacccagcaatcccattactgggtatatacccaaaggaatattaattgttctattataaagacacatgcatgcatatgtttattgcagtactattaacaatagcaaagacacggaatcaacctaaatgcctatcaatggtacaatacataaagaaaatgtggtacatatacaccatggaatattatgcagccataaaaagaacaagattatgtcctttgcaggaacacgaatgaagctggaggccattatttttaggaaactaatgcaggaacagaaaaccaaataccttatgttctcgttgataagtggcagctaaatgataagaacacatggacacatagaggggaaaaacatgcactgaggactactagaggatggtggttgggaagagggagaggatcaggaaaaataactaatgggtgttcggcttaaaacctgggtgatgaaataatctttacaacaagccgccatgacaaaagtttacttatgtaacaaacctgcacgtgtacccctgaatttcaaataaaggtttaaaaaacctgcacatgtatccctgaaatttaaaaataaaagttaaaaaaaacatgttaatgctgcttgcttaactaaaggagaacagagatatacaactaaatgaaatcaggaaaacaacggatgaataaaatgaaaatatcaataaagagatggaaacattttaaaaaaacaaattctggagctgaagtgtacaatagctaaactttaaaaatttacagtaggtatttaatagtagaccaagtagaagaaagaatcagtaaacttgaagacagctcatttgaaattattaagttagggagtgaaaagaaaaaagaaagaagagaaatgaggagagactaagggtcttataggacaccatcaagccaaccaatatacacattatagtaattccagagggagaagagagagaaaagaggaagagagtctgtttgaagaaataataaccaaaaacttcccaaatttgaggaaataaatggacatacaaattcaagaagctcaaagaacttcaactaggataaaataaaaaagaattacaccaagacatactgtaatcaaactgtcacatcacaatgaaaaaatcctgaaagcagcaaaagagactaatcacttatgagggaaccaactctgtaagataatcagcagatttctcagcagaaaccttgcatgccagagggagtggggtgatatattcaaagcactaaaaaaaaaaaaagaaaataactgccaatcaaaaatactatccagtaaaactatttttcaaaaaattaagtgcaaattaagacttttctagataaataaaagttaagagaatttaacacctctagacatatcctacaagaaatgctaaaaggagtccttcaagttgaaatgaaaggacactacatcttaacttttaaaaaaattacaaagtctttacaaatttggagaaggaagctgggtgcggtggctcatacctgtaatcagcactttgagaggccaaggcaggtggatcacttaaggtcaggagttcaagatcagcctggccaacatggtgaaaccccatctctactaaaaatacacaaattagctaggtgtggtggcacaggcctatagtcccagctactcagggggcagaggcaggagaatcacttgaatctgggaggcagaggttgcaatgagctgatatcgtgccaccgtaccccagcctgggcatcagagcaagacctgtctcaaaaaagatttggagaaggagactttacttattgtaaagggttacagcatgcaaggtggccattcttcaggcagggaagcatggcctctgacagagacccagaaactggcacttcaaaggaataggggttggggtaggaggtttatgctgaatgagttggtgaaacatacatatttaacaggttataggaggagctatgaatattcatgaaggtggttctaatgcatgtgtattgaacacacatgcacgttacatggtcatacatagcccatgttcattttgggatggagccttaacatataaatgtattacagttaggccctaaatgtcaaaggatcttttcagaacacaaaggcactcaagtgcataacccctgtaaactggccagaaacagtacattgttggtggtcttcttttcaggggaaaataactaaaatcagtgtcttattcaatcaacactgtatttacagcttgaggaacagagggactcagttagtcagtgtttgttggttggtgagctgcaagtgcttcagcattgcttacctcaaggccagcgcttgtttagctgctagagaaagagaaaaaccttgtggcacttaaaacatagtttattatctaagtgtagaagtacatgacttaaaccattgcttgcatggccttagatcctatttataatttggtatcttatggccctagagagccagttctgtcagtcttataatctctattttaatattaattctggtcagtttttgtatctaaaccccaaaagggagggagtatgaatgaggcatatatgatctcccaccccatcatgaccaagaactcagtttttaaggtctttctggagtccccttggctgggagggagtccattcagtagtgaggggcttaggtttttatttttactttacaacagcaatataaaagcatatgaaaatgtaaagttttctgggaaaggtaaatatgtaaataaatatagaatcctctagtattgtaatcacttttattctggtatagaagttaaaagacaaaagcataaaaataactatacatctatgtcaacagatatacaatataaaaaatgtaatttgtgatatcaataacataaaatcagcaggggacagaaacgtagagtagttttatatgcaattgaagttgttagcagtttaaaatagattgttgtaaccttaagatgttttacatacttcccatcctaaccactaagaaaatttctatagaatatccacaaaaggaagtaagagaagaatcaaagcatgacactacaaaaatcaaccaaacacaaaaggaaggcagcaagagaggaaaagaggattaaaaaaaaatagcttcaagacatacagaaaactaggaacaaatggcaaaagtctttctatcagtaattactttaaatgtaaatggattaaaacaccaatcaagagatatatttggctgagtggattttttaaaaatccacttatatgctatctataagggactttagatctaaggacatacatagactgcaagtgaaagaatgtaaaactatattccacacaaatagtaaccaaaagaaagcaaaggtggtgtgttagttcattctgatattgctataaagaaatacctgaggccaggcacagtggctcacgcctgcaacactctggttgccaaggtggttggatcatgaagtcaggagattgagaccatcctggctaacacggtgaaaccctgtctctactaaaaattcaaaaaattagccaggcatggtggcgggagcctgtagtcccagctactggggaggctgaggcaggagaatggagtcaacctgggaggcggagcttgcagtaagccgagattgtgccactgcactccagcctaggcaacagagtgagactccatctccaaaaaaaaaaagaatacctgagactaggtaatttatcaagaaaagaggtttaaatggctcacagttctacaggctgtacagaaaacatgatgttgacatctgttcagcttctggggaagcctcaagaaacttacaaacatggcattaggcaaagggggacccaaattcttacatggcagaagcaagggcaaaagagatggaggcgggaggagctacacacttttaaacaaccagaccttgtgagaactcactcactatcacgagaacagcaccaagtggatagtgctaaacaattcatgagaaaccactcccacgatccaaccatctcccaacaggccccatctccaacactagagattacaattcaacatgagatttgggcagggacacagatccaagccatatcagggggctatacttacatcagacaaaatagactttagtcatttatgcctagtgttccattattggaatgctaagctgtaggagatctgtcatagtggtggtagaaactatagggaaaggagcaggccttctgaaaggttggaaggctctgcagagctttggggggaatagctgaaggcagctgttctctaatcctgagacagaggccaaagagtatgtgcaagggagtgaaggggaagttatcttgatcaggcttgtttgtttgaagttgtccaggaattgacctttgaacatccatgcacgtgatgttccctgaaaggggaatatatacatgttaattacccacagataatacacgttaattacgtgcacattgtgtttgctccaggctcttggcatgtgcctgcactgaataaaagcaagcagctccagcttctctaggcagcactttggccactagagccaggcagtctgctagctgttcttacacggcatacctgtgtctgagtactcatttcatccatcagccagggtctgtgggacagacttggcaggtggtgccccatctgaggaatgctgcaacggatcatgacagaatcctcaaaaacaaaggtgaagtgactgtgcagtaagtaattggtgcctgctcaggatttccaagttcaaggggattttcaagctagggtttcaccatgagacaacagttatcatctcaacagcaacagtatataaaagtattgaaacagctgcttaaagctattggatcctctgtctcagaggcctaattaagggacctaatgcgaactgttgtttcccataacccatggttctcagaagaaggcacgctagacttagagctctgggaacaagtgggaagaaatcttaaaagacatcatgcacaagggcaacgggtcctagtaacatctttaatgttatgggcgttaggtagggctgctttgtccctgctctatacagaagagcctaaaaagggaagggaagaggaaccatcacctaccttactgccccctcctcctccctcagccctgccgttatgggtataggtgccacagaagagacagagaattttcctgagccccctcccccaataaattggaaaaaagacaagggatacactacgggacgctctcttaggcaagtggcattagaaggggagctcttggcctgcccagtgatgcaagatcaacaaggcaattgggtacatgaacccactactttcaacacttataaagaaataagaaaaagcattagagaaaacggagctgctagcccatttacaaaaggattaattgaggccatagcagataacttccatatgaccccatgggactggtcatagctaaaacaactttagaggccagtcaatacctcctctggagggcagaatatgatgaattgtgcgaacaagaagtcaaccagaatcaattggccaggcaaaacataatggctgctatgctccaggggaggggtccctatgtcaatgtacaacaacaattaaattttgtcccccaagcctaagcacaagtgtccttgtgcaccctcaggttttgggactgaatccccaaagatggagttcaacagggatcttttgtaaatgtagaacaaaggcctcaggagcgatttgttgaatttataaatcagttaaccaaggcaattaagagacaaattagtcatgcccaggccactgatatcttattgttgcaacgggcttatgaaaatgctaatgtagactgcccgcagacaatgcaggtaatcagaggaaaggcagctacagtcggggaacttatatgagcatgtcagctggtggagactgaaacatacaaagccaaaatattggctatggcattaaagcctccttcccgctggcaaactactccagttcttatcttatattcctgtagttatacctacaaaggtagttcactaccccatatctaatgctttaacacttttcactgatggctctggtaaaaatggaaaagcagctatctggtgggaaccacataactccctcactcgatctgggtttactagtactcagagagctgaggttggagccctggaatattggccctggaatccttttccactcagcccatcaatattgttagtgactctgcttactccatttatttattgcaaaaccttgaaacagccctcattaagtccactcttgagcccaccttctgtgtcctttttcttcaacttcattgctggatcagcatacacatcctatttttattacacacattcaggcccacagctcactgcccagtccactagctcatggcaatgatcaagcagacctgcaggttatgacgtcactgcttgaacaagccacccagtcacatcaatttttccactaaaattggagaaatttaaataatttcagttaacccaaagactagtgaaacaaattatcctgcaatgccctgattgccagctcacaggcccatcccctccttcaacaggtgttataaccctagatgactagaacctaatgagttgtggcaaacagatgttacgcacgtccctgaatttggaaaactaagacatgtacatatatccgtagataccttttcccacctaattagtgcacatgctcttcctggagagtccacccgatatgtcattaaacatcttctcttaacttttgcgtttatgtggcagcccacaaaaattaaaactgataatggtctggcttacaccagttcacaatttcaacaattttgtcacacatggaatgtccaacattccatgggtatcccctataacccccaaggacaggccacagtagaacgtgcccactccacccttaaaaatatgctcagaaaataaaaaaggaggaatacgagtaaggaccctacaacactactagcacaagtcttattcacccttaatttcttaaattcagatagtaaattttaatcagccatataaaagcactttgctaaaacctcccaagatgtaaaacctttagttttatggaaagatgtaaatggtaatctatggtgcagtccaaatgatttattaacatggggaagaggatatgcttgtgttcacaccccctcaggtcctctttggattccagcatgacacatcaaaccataccacggcatggctgggacccaacctggtaccagaaatgaaggaaatgatcctgcaggacccacatccccagatgatgcagcttccttggacaacacaggccctggacattatgctgatggagacaactcagaaggctgagcaaatcctgctccagacacaaacactgttcactccagataatctgttccttgctattctctctgttggacattgcaactctcgtagggtattggtttttcttattctctcactctacctgcagcctgtacctgctacactctattaggtccatcttctagatcctcctttcttccactctgttactttggtggacacccccttcccagcttctaacaatgggactgcttggctaggagggattaatatacccctggtggggtttctcaacaacaaccctatagaacaatgtgcaaaaacacccctgctggatagacccccactcctgggggtcactctttaattggaaaaaaatattactgattatactcatgtttgccttatgttatctactggttctaggatgcaaagccagaacacaactgtaaccactgtgcctgtcaagcctgtcactgtgcacatctgtgtgctacttcaatcaacaaaacctgatgcaaaaaacagaaaagggggggatgtaggacatccattagagtgatgggagaaactatcgggaaaggagcaggccttctaaaagatcagaaggctctgcatagcttcaggggagaatagctgaaggcagctgttctctaaccctgaggcaaagggagaggagtatgtgcaaggaagtgaaggggtgatgttccctgaaaggaaaacaataaatgttaattactcgcagattgtgtttgctccaggctcttggcatgtgcctgcactgaataaaaagcaagcagctccagcttcttgaggctgcactttggccactagagccaggcagtcccctagctgctcttacactgcatacctgtgtctgagtactcatttcatccatcggtcagcgagggtctgtgggacagacctggcactaagcatgtgggagttatttatatcctactgctcaagatcatcgccaaggtctgattgcaaaaattcaaaaaattgcaacctcaggcataaatgagttaagtcagaaactgccctagaaacaaagaaggacactttataatgacaaaatgatcaattctccagagagctatcacaatcataagcaaatatactcaacatcagaggtcccaaatgtatgaggaaaatattgacataattgacaggagaaatagacaacaataaaaatagtagaaggcttcaatattctatttgtaatagtgaatagaataatcagacagaagatcaataaggaaacagagaacttgcaaaacactatagctcaatgggacctatagacatatacagaacactgtaccccaaacagcagaatatacatttttctcaagtgcacatggaaaaattctccaggacagaccatacgttaagtcacaaaacaagtcttaacaaatttaaaaagattgaaatcataccaagtatcatttacaaccacaatgtaataaaactagaaaacaatagcagaaggaaaactggaaagtttacaaatatgtggaaattaaacaccaaactcttaaacaaacaaggtcaaagaaaaaaatcatataggaatttagaaaatatcttgggaccaatgaaaatgaaaccacaatgtaccaaaactgataagatacaatgaaagcagtactaaaagggaggtttatagtgataaatgcatacattggaaaatatgaaaaatcccaaattaatgatctaaagttacacctcaacagaacagatgcaactgatgcaacagaaatgaaaaggattatatgagattgctatgaacaattatacaacaacaaaatagagaacctagaagaaatggatgaatagctagaaacataaaacctacaaagactgaatcataaagaaactaaaaatctgaacatatctataactagtaaggagatcaaattcattatcaaaaatcttctccccaaaaaagcccattattaaatggctttattgaagaattctaaaaaatatttaaaggacaatttataccaaaactcctcaaaatcttctaaaatattaaaaaagagggaacacttccaaactcggttcatgaagctgacattaccctgataagaaaagaaaacttactataagaaaagaaaaaattcaaaccaatatccataataaatattaatgcaaaaattataaacaaagtactagcaattcgaaatcaacagcacattaaaagaattatacaccataaccaagcaagatttattcctggaatgtaaagatggttcaagatatgaaaatcaatcaatgtaaaacataacattaacagagtgaaggattaaaagcacatgatcgtctcagtcaatgaagaaaaagcatttgacaaaatttaatacactttcatgataaaaacacacaataagcaaggaaaaaaaggaatgtacctcaatataattaaggccatatatgcaaagccttcagctaacatcatactcaatggtaaaaagctgagttttttcctctaagatcaggaatatggcaaggatgctcattctcaccacttctattcaacatagcactggaagtcctagaacaatgacacaagaaaaacatataaaaggcatccaaattggaaaggtaaatgtaaaattattcctgtttatagatgatgtggttttatattgtagaaaaccctaaaagttcaacaaaaaaagcctgccagaactgttaaacaaattcagcgaagttgcaggttacaataccaacacataaaattagttgcatttctataagctaacaacgaacaacccaaaaggaaatttaagaaaacaatttcatttacaaaaccataaaaacgatccttaggaataaatttaaccaacaaaaataaaaatatgtacactggaaactacaaaatattgctcaaggaaattgaaaaaacacaaataaataaataaaaacatatcctgtgttcataagtgagaaagcttaatattgttaaaatttccacactacccaaagcaatctacagattcaaggcaatctttataaaagtagcaatgtcacattctttgcaaaaatagcaaaaaccatcctaaaattcacacagaaaatcaagggacccccatatagccaaaatatcttgaaaaagaaaacagttggaggcctcacacttcctaatttcaaaacattataaagctacagtaataaaaactatggtaatggcataaagacaaatgttttgaccaatggaacataatatagaggccagaaataaacccttgtgcatatggtcaaatgatcttggtcaaaggtgtcaagaccatacaatgaggaaaggattatcttttcaacaaatggtgctgggaaaattggatatcaacatgcaacagaacaaagttgggcatttaagctacaccatagataaaaactaaatggattaaagatttaaacataagatccaaaactctgagactcctagaagaaattatagtggaaaagcttcataatattggatttagtaatgatctgtgtatagtgaatgagttcaccatgaatgaatattgattattatgatgttgtctgcttgtattatgtttcattttttaaaaagcaacttttatagatagcataattttatgaataaatttttatatcaatatcgtgcagccaaaagttaaaaattattaacagtgctttcatttgaattcttttttaacacaataatttgttaaattattttattatgacaccaaaagtgcaggaaaccaaagcaaaaatagacaaatgggactatatcaaacttaaaaacttatgtgcatcaaaggaaacaatttacagagtgaaaaggcaacctacagaatgagagaaaatattttcaaatcatatgtctgccaaagggctaataattgaatatataaaggactcctacaactcaacagcaaccaaaaaaatcccaagtaacttgattaaaaacctggcaaaggacttacatatatatttctccaaagaagatatacaaatggccaaaaagcatatgacaagatgctcaatatcattaaacattagagaaatgcacatcaaaaccacatagatatcacaaaaacaaacaaacaaaatataccaggaaataacaagcattgtcaagatatggagaattggaatccttgtgcactgctcacaggaatgtaaaattgtgtagctgccatggaaaacagtatgaagtttcttttaaaaattaaaaagacagttacatatgatccagcaatcttattttggatatatatccaaagaattgaaagcaggatcttgaagagctatttgcacgccagtgttcactgaagcattactcacaatagccaagaggtgagagcaacctcaaatgtcatttaaaggaagaatggattttttaaaaatgtggaatatatatgtgacgagaccagctcagtccgggagaccctaacccagtggcgctagaggaattaaagacacacacacagaaatatagaggtgtgaagtgggaaatcaagggtctcacagccttcagagctgagagccccaaacagagatttacccacatatttattaacagcaagccagtcattagcattgtttctatagatcttaaattaactgaaagtatcccttatgggaaaggaagggatgtgccgaattaaaggaataggttgggctagttaactgtagcaggagcattccttaaggcacagattgctcatgctattgtttgtggcttaagaatgcttttaagtggttttccaccctggacgggccaggtgttccttgctctcattctggtaaacccacaaccttccagcgtgggcgttatggccatcatgaacatgtcacagtgctgcagagattttgtttatgaccagttttgtggccagcttatggccagattttggggggcttgttcccaacatatatgcaatgttattcagccttaaaaaaaatctcatcacatggtacaacatggatgaaccttgaagacattatgctaactaaaataagtcaatcacaagcagatggtcttattgattccttttagatgcggcacctcaaatagttaaactaattgaaacagaaagtagaatgggggttggggaaaaggggaaagtgggtagtttttcaacaggtataaagagtttcagtttgtgagatgaaaaacttctagaaatcagttgtacaacaatgtgaatacagctaacactattgaactatgcacttaaaatggttaagacggtaaattttatattatgatgtggtgtgtgattttttggccacattaaaacaaaacaaaacaccctggcccagagccatcttacaaaagttcattaacattaacatcattcctgtctgactctctccccgacctctccttctcctccattctcacccctccagctccaacttcaattgggatcaaccatcactgtcagagagtgggcaaggatgctattagaaagacagaagaaacagacagcatccttttatccaggagcaagttgtccatatgtaaaggacctggctaagagaaaggggatggctttcctctgagaggagaatgaagtgctgatcaacataaaagactaggcattcgaatttctagtataggactatagtttacaacttagagtaaactaggaatgaacagaagagtcaatagacacacccagttttaatctgttggccaaaaaaaaaaaaaaaaaaaaaatcctacttagcttgtttaaggagacaataggaaacaaaaataaagatgttttaaaattatagcctgcatattttacctgttcaatatactggtttaaaatattaatgcatacaatgttaatacagacagaaagttggaaagactgtacctagatggttaacagttaacagtaatcatctttggggagggactggaaaagggtgtgtttgaaaggagattttcactctacactcaccacatatttatgcaagcagtatgtattcctatgtcacttatgtaagtgatgtggtatttttaaagtcaaaagttgaaattaacatattgtgcaggtttatttcatataggtaatgggtctaagtactgtctaactttgttataatcagatattagtgaacccctgtgaaacacaaactttttttgaaactgttagaacccagcattgataatagagccagatgagaaaactgtttttctagatttttcttttttctgtagctaaaagaggaagaaagaaaagaggaaggaaagaaggaaggaaggtccaatttccttttccctaaaattttaaacaggctaatttttaaaacaaacaaacaaaaagtacctcaataactctatcagtttctgattataggaagtgagttcaccacaaatgaatattgattattatattgttgtccgtttgtattatttttccttttcaaaaaagcaacttttatggatagcataattttacggagaaacttttatatcaatatcttgctggcaaaagttaagaattactagcaatggtttcatttgaattcttttttaaacacagaatcagcatcaggtttcacatgcttacaaaaagactaagaaaacccccaataactccaaaaggcaatgtggataacttcctttgaaaataattaatgataattgtaaacattgctttcctggatattctgccattatgttggcccttcctcacacgttaccactagaatctttaggagcatcttcttgccaacataaactgtgtgaaaactttacaaacacagctgggaagaatagaccaatgacctctgtatgacttcttggcagctttgcaagtcagaggcctaatttgaagtgtggaattggtggtttgaccagttttggctaacactgggtccacatgtcagagagatgcagcagctccctccccgggtcaccagctcagtcccatgcatggtgagtcacagtggcagagggtgcctccttcctggctgtcttgactcactcagtggagcaggagaggattttcatgggagttgtggtcctgtgttacatgacagaccgcagtgagctaaactgcttcaccaaaatgcaatcaaatacctcaaagaaggagagaacaggatggaaatgaccaaatttactgatggtttgggttggcaaagttctattaagttctaacattagctctgggctcataaatcatcattagttctgtctcccacttctgatagttaaattgctgcagttgaagttgacttttcaataagttctatagcaatttacatgcagtcaaggtcgaatggatggtagactcgcacgttgttccctccatttttctcctgtaatgcttgtctttctccgtcttccacttactgtcttactgctttatatcacttatatccttgaagattaaaattgcagctgatctatttcagtaaatattcccgtatttgtgtcattctgttaggatttctattctgtgttctcttaatttttgctccatatcacttattacttgatttaaagtctttatcacttcgcactcaaagcactatattttctagtcactccctatgtttcttctctcacctgagttcactgtgtccatgtttccttttggtctcttctgctccagcctactctaaataatgatattcccaagattcaaccttggttctctttccttctcaatctgtacactcactttgagcaatagcatctatacgcatgcacatgatgatgtctctcttgagctctccaggtttatcatctagttgccttctagacatccagatgaactacacctatctcagacatgaaatgttgaagaatgagtttatagccttcctcctgaattcctgatttaagttcatggcaaaattccttaaccaatcaccgtttacccacccctttattttcccaaataaagacaattgtcagcttttgtcaattccacgtctttaatagattacatatttaaaacttcttttccatctaccctaatgtgtattactgatttccattatcaatatatttcttgcaaaacttcaggatttcatcatgtctcatatggattcagtagaggcaacgtagagaatggatttgatagaagcattgtgtttacatgaaattataaactaatatgttcattgcatcatttattcaacaaatatttctaagccccagttctgaggcaaaaaacaaaaggtatacctaatttaaaatgcaaagtgggaggatgagtggcagatgaattggggatataatggtagaactttccctagtaatttcaatgttgacattgtcataatttaagtgaaaaattgcaaatatttcaagtaatttagatagttctttcatatttacagtagctatagatctccctactacctcagctccatgaaagtttgggaaggagataaaacctcttctgaacatatttcttttgatagtagttgagacattgacattgaattaatgttttttaattgagttgaaattcacataacataaacttaagcatttgaaagtgaaaaactcattagggtttacttagtatatttcaaatgtcgtacaactaccacttctgtctagtttcaaaatattttcatcacctcaaaggaaaaccccttatcccgtaagcactttctcccaccctccccctactcccaaaccctgataagcaccaatctgtattctgtctgtatggctttacctatgcttaatatttcatataaatggaatcgcacaatatgtaatcttttgtgtctgggttctttcattttgcataatgtattcaggtttatccacattgtagcatgtttcagcactttgttcctctttatgctaaataatattccattgtatgtatacatcacatttttttctgaccattaatctgttgatggatatttgggatgtttccaacttttggttcttgtgaatggtggtactattaacatatatatgtacatatacttgtttgagtacatgcttttaattcttctgggtatatacttaaaactgaaaatgatgagtcatatggtaaatctatgttttatttttgaagaacaaccaaaccgttttccacagcagcttccctattttacattctcaccagaagtgcacaagggttccaatttcttgtcattctagcggctgtgaaatcgtacctgtggttttgattttcatttccctattgactaatgattttgatcatgttttcatgtcttcttggtgatttatatatcttctttgaagaaatgtctattttgtttcttttcctattttttagttgtgttgtctttttattgttgagttgaggagttctctatatattctggatattagaaccttatcaattagatgatttgcaaatattttcttctattctgtagattgagttttcattttcttgataatgttctttgatgtaaagcccttttaatgttgatgagtacagttaatagcaaaatttttgttgttgatctttatgattttgttcggctatcaaggaatccactgccaaattcaaggacttgccaagatttactcctatgttttcctctaagagtttttggttttagctctgatatttagtctttggcctattctgagttgatttttgtaaatggagtgaggtaggggttctcatttcactcttttgcttatgtatttccagttgtaccaacaacatttgttggtgagattatcattttcttcatttggtgcccttgttcaaaatcaagtggaaatagttgtatgggtttatttctggactctcgatgatctatatgtctctatacaccagtgccatactttcttgattaccatagcttctttgtaagtttttaagtcagaatatatgaattctttaactttgttttgtttcaagattgttcggctattttaaaattattgttaaattcttgtagaatttaacaatgacaattctatatgaatttgaggattagtttttccctgtttgtaaaaaggctgtcgaaattttgacagagatttcactgaatctatagatgatattaacataaaaacttttgagaaattaaatttaacagcatttgagcaaagaatgattcatgaattaggcagcactcagaatagaagaggttcagagctccactttgcaatatgggcagtatttatagacagaacgtgatgtaaagtgcagaaatagctcgattgattagagctagacatttgactgacatggacatggtctgatcagttggctgcctgtgattggtaaagatcaggctatgtgttctaaaaatcagacccccaagttgtttctttatgtactaagttagattgtgatgcactatgaaggaactcaaagtatggagacagcatcaggtcaatggcctcctgtttatttaatttaacaatggcgatcagaaatattgccatcttaactatattgtcttcaattcttgaatacggtatgcaattccaattatttatgtattaaattgcttttagcaatgatttttagttttcagtatacgagtctttcattgtttaaatttatttctaggtattttaatttttgaatgcttatgtaaatgaaattttcttaatttacttttcagtttgttcattaatagtgcaaaaaatacaacttaaatttgtgtttatcttgtacctgcaactttgctaaattattagttttagttgtgtcattcttgttttttcagattccttggaattccctagatataagaccatgccatctctgaatagagagttttactttttcctctctaatttgtatgcattttatttcttttccttgcccaactgctctaactagaacttccagtacaatgttgaagagcagtagtagaagtgggcatccttgtcttgttcttgatcttagggggaaagctttctttatttcattattgagtatgatgttaggtaggtgtgggtttaggaatttcccttcttttcttagtttcctgagtgtttttatcaagaaacaatgttgatttttttcaaatgctctgtgtcaattgacatgatcacatggtttctttcattttattattatgatgtgttaagcaaactgattctcttttgttgaaccacccttccattactaggatataccccacttggtcacagtgtataaccttttaatatgcttttggattcaaatagctgatattttgttgaggattttgagtctatattcatataggaatattggtctctagttttcttatggtgtctttgtctggctttggtatgagaatactagtggcctcatagattcagttaggaagtgttcccacctcttcaattttttggaagagtttgagaaggattggtgttaattctttaaatgtccagtagaattcaccagtgaagccatctggtctttgacttttgttttttaaggttttgttgttgttgtttttaaaggactgattaaatctctttgttatagatctggttatagttcctattttttcttgagttagttttggtaatttctgtgtttctaggaacatgtccttttcattcaggttatttgtcagcacacaactgttcacagtcaaatcttacaatcctttttccatatataagtttgatataatgtcttcactttcatttctcattttatttaattgaatcttatctttctcttttcaaatttggggagttctgagacatttttctccgctaatgtagtttttctttttctctcttttccttgtgtgacttctgtaatatatatttcggtatccttgttgatatcccataggttccttaggctttgctcattttcctgttatttctttctgctcctaagactggataatttcagttttcctatcttaaagtttactgattcatccttcaacatgcgaaaatgtttcttgaaattctcaagtgaagttttcacttcacttatttgtacttgcaagcccaagattttctatttggttccttttgataatttctatctttttattgatattttccttttgtttatacatcattaccctagtttccttcaggttttatgttcttggttttgtgtctagaattggtgagtttcttggtctcgctgacttcatgaataaagctgcggaccctcacggtgagtgttacagttcttaaagatggtgtgtccagagtttgttccttctggagggttcatggtcttgctgacttcaggagtgaagccacagatcttcacagtaagtgttacagctctttaaggtggcatatccagagttgtttgtttctcccggtgggttcgtggtctcgctgacttcaggagtgaagctgcagaccttcgcagtgagtgttacaactcttaaagcagcgcatctggagttgttcattcctcctgttgggttcgtggtctccccggcttcaggagtgaagctgcagacatttgcggtgagtattacaactcataaaggtaatgcggacccaaagagtgagcagcagcaagatctattgcaaagagcgaaagaacaaagcttccacagtgtggaagtcgaggtgggttgctgctactggctcgggtggcctgcttctattcccttatttggccacactcacatcctgctgattggtccattttacagagcgctgattggtccatttacagagtgctgattggtccgtttttacagagtgctgactggtgcgtttacaaacctttagccagacacagagtgctgattggtgcatctacaatcctttagcttgacagaaaagttctccaagtccccacccgattagccagacacagagtgctaattggtgcatttacaaacctttagctagacacagagtgctgattggtgtgtttacaatcctttagctagacagaaaagttctccaagtccccacccaacctagaagcccagccggcttcatctctcagtttcctttagttctttgagcatatgtaagacagttgacttaaatcattatctaataagtccactatctgggcttccttaggaatggtttccatcaatttctttgagacttcagaggctacacatgagtgaatgcaattaaatccacaatgtgatgcctctacatattcaccagaatgtataacatttaaaaaggaaaagaaaaaggaagaacacaaaacacaaatgagtatagtaagtgttggcaaagatgcagagtaactgaaattttcattcacgactagggcatgtataaattagtaaaacctaaaaactatttggcagtgtctattaatgttgaatatattgaatatataccctgtgcatagtaacactacttccagggatcttccaaaatcaaatgtgtaactatgtgcatcataagacaggtacaagaatattcatagcagcgtcatttgtaattaccccaaactttaaataatctaatgtcaaacaacagtagaataggcaagtaaattttagaattatatacaaaaatgaaaatgaaactattatattcttgaatatggatcaatcttacaaatatagtattaagcaaaaagagccacataagagtgcgtattatgtatgactatttataaacattcagaagcaggcaaaactaattgggtggtaggattcagaattgtgcctatctgtgtgtaggggtataatgactaagactgagcatgaggaaagcttctaaattgctggtaaacatttaaaattttgctgtgaggcggtggttacacaagtttgttcacactgtcactaagacaagcacttatgattattacacttattttgtatatgtgttatgctttaaaaggttttcacatctatcagtttataaaatttttttaaattgtattttatcagtattggcgaggatacagggaaaaattgctcaaatactagcagtgggaatgtaagttaaaacaactactcaggggagcaaatcagtgaaatctattaaggatttacatcgtgcaaactctgtgatccagtacattctcttgttggtatctgcactctagagaaatacttggacctaagtacaaaaaggcatctacatatatatttatggtaccattgcttctcataataatattaataaacaaacgtgagggtgggggaatggtacattaattatgtatgtatatatatacacatattggttctgaggacatgcagcattttcagagaatgaggtagatttatatacagatatggaaagatttcaatgctaagtgtaaaaaagtaacatctacacttgcaaatgcacaggaactaggagtcatcatctacagactgggtttgtaattagggcctaaaagggatataagcataattgtaacgtttaagctttttttttttttcgcatggacaaaatcttacttgtgtaatttaaaattaataacggtacttagaatgactttggaaaaatatacaaataatgaaatggggatccaaagaatgttcactgtatacctctgtacttctaaaaatgtgaataagtgtagcatccgttgggagaaaagtttaattaaattttaaataaaacaataaaaggtgcctaacttcgtgtgaaaacagacatatagatataattaaatgtgactaccgcttagagatgttagttatgaactaggagcgctgagaaaaggtatcctaaataggtctgggggaagtgagagttagaagaggtgactcttgagctgagtaccgacatagaaatggtatgccctgtttttattcctggagggctcagcatgaggtgcccaagaggccctgaaacccatttccatgacattttcccacgagctggagcataaacccccaccgaataactgaagggaagcggaaggcgcagaaacgcggacgaagaggaagcgggcgcttgttaaaccgtgcgatgcacaatgcgggaaagtccaaccagctccgtgtttcaaagctggatgcccagatttcccacccattcctacaggcagaccggctcgccctctccctccttcccgcgtcgtttactggtcagtagaagattgacatgtcatctggccaataggttggctcctctatggaggcactcaggaaccagtcgggtctttggtccctcgagcgagatgcgagctgtgtgcgtcgacgtcagcgtgctgacgtcacgggccggaggtcccggggctgctgggtgcgggcggtgggctgcgcgttgtccgctggactgggtcccggtcacgccccgccaagccccgcccctcaggccggggcgcgaccgcggatccgcagttcccgggccagcctggggcggccggccaggaaccacccgttaaggtaggctgggtttctcgttcccctatttgacaggttggaaaactgagtctcctgggtcagatgacttacatgggggcgtacaggggacccgcggacggaggccatatcctggtcctgttctgtttcctgagtcctgcgcgagcctccaggggaggaggaggggcgaggcaggctgtgctcataatggacacaagagtgaagttgcagaatgctgagccccgctgctcccacggcgtgggccgggattcagggatggatataggtagcgggagtgtcctcattcctccagcctgcggaccctgaggagtccccggtggggtcggccccgggctggcgccatgggcccccaagaaggaccaagaattggtgactgggtgtaatgcgtgggttgtccagacacaggcggttgtgagtctcttctattcattgagaaaagtcgtgttcaaaaaaaaaaaaaagaaagaaagcacgaatcatgaatgttctccctgtggtttcagttaactgcttcacctactcgtagatatctcgccattgtttgaaatcttagttgcttgaatacttttgatttagggttagggatttttccccctctcttttagttcaaacatgggtggacattgtggaacttttctttgttcactgtgtcatttgtcttctatttcacagatggaatcactgaattcatcacttgacacagtactagtttggataagtttagcaaggtaaccaagtaacgggtctaattaaatctttactggaattagtccagtttgccacatttccttgttaggaagaattctgaaaggtaattcccgtctgtataccatatctacccatacgcctctttctagaagcaggatctcacaaaacgacttatggtatccttgttttattgatggattctgataaggtggtggattattcatgttcataaaatgaaaacatacaatatgttgtcgtgtagaagtcactgtctttaaaatctaactgtctcaaacattggtcttttaaaactgcattattgcattgcctaaaactgcatgaaagaaatgaaatgaaacagcctctgagggatattaccttacttatgttcacagaaggatggtgattaacatcatttggatttattcaatggacagtttgcctgagtgattgtctatgccactcattgttttaggttttagagattgagtagtgagcaatttagataaggcccataccctcaaagactttaacttttgttggagaatataataaacatgtaaatcaaagagacaagtttagataggaataaatgtcagaaaagatactactgggtagagagtttgagagtgactgggttgtatggagaaatgggatggtcagggaagacctccctaaggaggtaacacgaggtgacattttgggtgatagctgaatgtttagctgagtcagccatgagaaaatgggctggaagtttctaggcagatataaacagtgtaaaggagctaaaggaagaatgaacttggcatgttccagggacagagggaagcccgtgtggctggagctgagtgaacctaggggagggtgaggtgaggagacagtggtcagaggtgacactggagaggtgtacagggattggatcatcttgtatcccatgtgagccttacaggcaggcaagggaaagataatttgtgtactgcagagtcttgttttcttttagtgatactcataaactctagccaactttctgctttgttttggttatgaaatcattgcagtaatttattgtgtatatattttttctccagaggccctcttaatgaaaagatcttgtttccttcagcaccttatccgatgtagtttgtttcctttccattgttatatgcagaactcaaagtctttgctttttcttaagctccctgcttttaatcctttctacttccaaccgtgaatactctttcttattacctgtacctgccttccacttggaaagcagtggcagttggtccctgctcttctccaagccaaattctaggaagctgcattggcaagtggattattgttcttcattagagcttgtattactgaccaggaacataacgcttgcctttttttagtacctacgatatgccaggtatgttacatacattctattccttccaacttgtggcaaaggaaaatattaagcctttttgatagtgagggaaacttacacttcagctactgagctagtactgatggagcttgtatttgaactcccattaggtttacttcaaagcctaattcattctaccccacctcctgttaacctccaaccttgctaccctgagcagcaagtctctattacttaaaattatgttttatgatgtggcattttagagatcacatgattcacccctcttagtttagagctagggctgtggaggcccagagaaggtcagtgagttttaaaataatgcatctaatggccaaacttctatcaaattttcaccctgctcattttcaggctagtgttttttctgctttattttcttcatgaaagtcccctatcaatatatttctgtacatataaaaatataatatttcaacagcatgaatttattgtccataaacttgtaaaagttaattttaaagagatgagacattgcttcttcttgggctacaataatcatttgccttattttccttcccttttctgaacaatgaacaggtataaactttctggatgaatctagtctctgttaatagaaagctgtggtttaaaaatgacttttaaatttttgttttaattttagaaatgtttgaaaaggagtttaaaatgtgttactattttcctagccttaatcttacgcttagaagtatgggaatattgcctacagtttgctaactcatagtttctcttagcaagtagagtttcttcctgttattgaggaagcccttaggtcagtgatataacttctttttcttagtaatatgttatgtttaaaaataagtcaaaatcagtttataaattaatatgaataagaaagctgttaacagtggtcttaaaatttaaaaatgcccattatttatttctaaggtttgcatattttagtaattatgagtggaatatggtagatgaataataacagactaataaatagcttaatttactttctgtatgtctttttgactctgctgtaacttaatagaatttatctttttctttagaataattttaatggaattagtatcttcttttttaaatattggaaggtacttaagtttaagcaaaagagagtttttgctctttaggccaaaataccaaacctagacatcctggctatctctattctttaagatcgttcatgcaactaatgcccatattctgaagacccaggtcatcatgatttgaccaccatcttctgccatgagcctagtgccccaaattggactcctggtctttgcctcaggctttccagcttcagtgccattactagttctgcttggaatgccctctggatagacaactccagccagccaaaattctacctgtccctctaagtccactcaaatgctgctttatcaataaagcatttcccgtgtctctataacagaagccttcttttctcatagcacttttgggagcctctctttgacaccagttaccaatcctgatatctttagtattgtactattacatacacaggtgttaaaatatatgttgacttgagcttaaaaaacttgacaatttgtgttatatacgtgcacagttttttgcagattgtagagccctgttattttatttacacttttatcatcttatctttgagagacacactgttaggcttttctcagctttggttcacagaacctgttttctgttttagttaagggtctgccttctgcagttatcaaggggtcctttgagaggaactcatgtctttgggctataaatgttgaaggcacactgtcacaaataaaatcagtgttctctgtgtttatggtattggaaaatactaacaacgatttccactttttaatattatagatgagaaaactgaggcccagagagactagccctgtgttacttgcagtgctaggctaagaagcctggtcagtacccctggttcatggctgcagaggcttgtagcaggctgtcatcagttctgatgtcctgtgttggaactcctggcagcctcttacatgatgtatcagtacagctcaggcctttccagttgttttgcttgctttatttgtgagctgacctggatccggaagatacctcttgtggtgaatcaagattaaagctttaactctgaccaggaatccctgactctgagctatttaagcctggaggatcttcctgaacaggcatgggtatggaatcaagttcagtaggctctttagtttaaaacccttctcttcttcctctctagttacagttttcaaaatagtattgtgagactagcgagcatcctcagtgtattcaatctggagtttggaggaatctggcccaggacctttcatgttgcagtaatcataggtttctctgtcctatattttccaggacggtatacttttcaaatactgtgcattattgctcaccaaagtatattcttgtttgctttttgtttcaggaaaatatattctcagaattattttttaaaattaagcatttattaaattaatgatgtagaaactgaatttcaagtacctttttctattttaattgtatgttaaattcctcaaaggtaacacagaggacgttagacttttttctagcccagggaggaacaccagccaagacttgccttgggcattggtggtaataactgatgcatatagagggctttctttgtgccaggagttgttctaaatgctttatttcagggcctctgttcctcagcactgttgatattttaggctgggtaattctttgttggggactgttctgtgcattgtgggatgtttagcagcatctctggcccctacccactagaagctagtggtacctcctctagtccatgtcttttccattttatttcctgcatagcatttagcatagtgttttacttatgagagatgcttaataaatatgtccatttgtttgggttagatgggttcctactcatgtagtgatttctttctgtttctatatacttgtattcatttttgtagtgtgttgttagaatgacttcactaaatagcattcaaaatatattggaaagaaagattaccaatttagttaatttgggagagttgggaacatttttattaatttcattgtaaatgaaattaactggagattaaatattcttagcttatttaatatactgctgacccttgaataatacagaaacctgtctagttgtatgtgaattgttttaaataaaacagggacctgacctaaaatagttttcacagcatgtggaacccatgtatgcaggtggttctggaaccaattccctgcatataatataccaagggaggactgtaccatattgcaactccaaccatatgtgtaagtttgtctaactttagttagcaagtactcagatgactttgtgctttcatacaatgatagttgcaatttttaaactaattgaatacctaacacatgccaggcatatctttgggtgctaagaatatagaatgttctctaggagttttcagtatagtactgagaagaagacatgaacaatatgtgaaacatgtgaaagactggaggtgctcttaaaggtatatgggatatatattatacatacgtggtcagagaaagtttcatccaggaagtgatacctaagctaccttgaacaattaataggcttattcttgctgttaatatgatagtttggtggttcaaggaaaaggcattccaggcagagggagaactggggcaaaggcaggatggcgaaacttcctgtgtcagtccatatgtgtcgcttcctatagatactttaggctggataattttataaagaaaagaggtttaattggctcacagttctgcaggctgtacaggaagcatggctcggcttttggtgaggcctcaggaggcttacagtcatggcagaaaaaaaagctggagcagcatgtcacatggcaagagcgggagcaagagagagaagggagatgccacacatttttaaacaagcagatctcatgcaaactcagagtaagagctcactcatcaccaaggggatggtggcaaggggatggtgccaatatatagtatatgatatatactatatatagtatataaccgatatagtatataatatatactatatatataatatataacccatatagtatataatatatatataatatataacccatatagtatataacatataccattcttgaaaaacttgctctcaaataatgcaacaaaacaagcaataaagaaaattatgactatggaaatacatatatatataggcagcatatatactatatatatgtatttccatagtcataattttctttattgcttgttttgttgcattatttgagagcaagtttttcaagaatgctgctagtttcaaacttttattgagaactttatgaaattaaagagatcctactacttttgttgtattctctgcctctgtaacgtgctctgagtctgttcttattattagactgtaaagcacactttattttctgaatattttagcctgtagttgaattgagtcttgtgattagtggtctttgtgtgattctatttgctaaaacatgagttaggctgatgataaaggggatcacgaggttacttcggttgctgatcttcttgagggtctgattttctttatgactgcctaagaagtctttcagagaaaaggatactggtgatttttaaaacctaggcatcaagattttgagactgactttccctgtctgtcacatgcactaatctttggactacaaacctttatctgtggtatgattcataatttctttttggacctatgtgctgttcttgtatatcacatcataggagataacatatgtaacttctgcctgttgatagatacccctgggcatagatgtgaatggcacacctttcattaacctgctctattttgtgacatggggagttggtctcagctgtctcctggggcagttaaagtaacatcttccctagcattgctgttagtgtgccacttccaccaaccaagagccaccaaagggacagtgagtagaagatggctctgtcaactggagtgacattttcaggaacacttatctcccgcattcctgaggagttttatgttgttgaatgaaaagaaacctagcttgtctatgaatagctgtgctggctttgctgactacttatcagctggcccctgggaattcagcttctgttttctctgtatagaaagataggtctggggaggcgttgaagaatgtgtggtgaacaccttctttgggatgaaggatagttactaaaagaaggtacacttttagccacttgcctatgattcctgggagagcagtgagctcaccactgtggatactattgattttcagatctagattaataagatctcaagtcctgtgctgaaagttgacagcatttgtttgaaaattgcttgtagtaagtatcgaaggaatgacattatgtgatgcagagatgtcctcatatgcattggaaaatatttcaagttccttaattgagggaccttcacctgtctagatagtaatatgactcttgactcctccattgccaaggctggtgatacatctctaagaggaagtcgtaaatattcataggaatatttatatgtacactgaggagcaacacgactccttgagtgctggtctgctgatggttgacagaactaatgagtcaaaattggcaaaaataatggtaacttcgcactagccatcaggtattttataactgatgtattgtgtgattttttaggacggctaaaagtagattttgttatgagggaccaaggaaaagttctggaaaaagatagtcaacaactgaaaaatcagcagtattttgtacttgtggaagtgaccttattagtctcctaaaggaaaaattgggttacaaatagctctatgacctggaagattaaaacaaaggagtttctaggtgagctgtggagaaaatacagccatgtgctgcataacaacatttaggtcaacaatggactgcatatatgatggtggtcccataaaattataataccatatttttgctgtattgtttctgtttagatatgcaaatacttctcattgtgttacagttgcttatagtattcagcacagtaacatgctgtacaggtttatagcctagaagcaataggctgtaccatatagcctaggtgtacagtgggctctaccatctaggttgtgtcagttaacactgtgataatgaggaagtcacctaatgacgcatttctcaaaatgtatccctgtcattaagtgacacatggctgtatttaagtttaggagttagagccaaagctgagaaagggggaaaaaagctgcaaaatcaatttgaatgccaggagaaaccactgtgagaataaaaggttggagacaatagaagctggaggaaggtagctatagagaccccgttgtttcagttactttgggctacctgacagcagcttctaaaaaaaaaaaagagaaacaaatgaaagaacattcttaatcctcagggcccatcttgagagagacttgcgttgaacgagtggtgagacccagctccaacatgccagctggctgactcagcccatgctagtgaaataactgactaccaagttgttgacccctgcagggttgatgagctaacaagtatttcataccacccaacattactgggcagctgtgtggcatcttcccattttgccaacctgtagtctatggaacaacttatatacattgtcaaatgcctttcttctttctggcttgctcttctttgcctggaccaagcaacagtcctagtggtgtagttattgtcaataatatatacttgatttttttccctctcttcagtcattcccttgtattatttatatatcttccctattgactagatgtaggttctgctgagagcatgagaactcttgtattacctttgaatccttttaaatgcctgtgtggtgttacattttttcggtgctcaatgcttatggtttactaaaatgggaactcttagtggacttacatagggcccacttcataattgttttctgttctacaaatagatacaatttattagtttttttttcatttttatggcatagaagaacattcttatttctgcctatcttatgttttaaaatttcatctctatgctcccctgaattcctgattcatatccaactgcttactttatctcgacttggatattaataagcatctcatgctttatgtctaaactgaactggtattcttgctcaaaactgccccttgtctagcttcccgctttcactaaatagcacatccatccttccagtttctcaagctctaaattttgcagttctgttttagtcctcattttctcccataccccatggctaatctgtcgccaaatgctttgggctccttacttggaaccaatctattctcatcccctctactgccctcaccctattctatggagtcagtacgtcatctctctcctgaattattgctgctgtctcctaactggtttccccacttctttgcttctttcagcagagcctcttaaaacttaagctacattatttttctcttctactgaaaatcttccggtgtcttcccatctcattcagagtaagactttacagtggcccacacacaaggcccagccctttgttaactgatctgtcatcatctgaggtgcttcccctctctcacttggctgcagcttcgctggccacctggctgcactcctctgtgaccagctccacccctcctcagaacttttgcccctgttcttccctctatctgcagtacccttcctccttgtatctacctggcatttctcccttatctcctagtcgttgctcagatgctgcctcaatgaaataatctcgacccctcagtttaaaatgaccatgtttccagccctactttgtcttccatccccttcctgtagaaggtaaactctgtgaggatagatgttttgttcatcaccatgggagtgctcagaaggggacctgacacaattttagtgctcaaacatatttgtggagtgaatgaagtagatgtggtatattcttggcaaacttgaattttcaaacattatgaagtgcggttcttaaaccatgtagttcacatccagattcagcttctcaatgtatattttaggtttgtctcgtaaattatgaaaacattgatatgcatttacccagccatctttaaatcttaatatttatctctgcattacatgtcaaatgaaagtttagtaatatttttaatattcctataggaaatagatcacatagaaattgcgttgctttaaaaaacagtcggagttcgggagataaattaatgtctgccagaggagtgacttaaaagcaccatgacatgtatttttccccttaaatttttctaagtcattgatgttaatttctaaatcaatctgagtcttaaagcagattgttgaaaggttaagttctgttatgtgcacacaattacttttatctgctgatggtaatagaaatcattgaatgagacaagactacaaaacaatgaccaaactttaacaggcagccttggatgtgtgtgtgtgtgtgtgtgtctgggaaaagggcagaacacaaagcattcaagagtgagaagatttattaagatggaatgaaagcattaattacatcccaaatgaatataaataacactggaaaatatgatgcctagaaaataaagattaagaataacaccgtggaaataatatataaagatgttaccatggagttgggctgtcgaaattcataaagaaaagtaaggagaggagcagaaggaagtgcagttgaaatgtgcatccaagtgtaataagtcagccatgtgaattaaataacacatggtgtgtctgagccttggtaggtggtgctttgtaaaagatctgtctttccccaggggtccctgagttctagtgcagggaacaaatgaaggagcaacttggcttgtaaaagcttgtggtgtatgttgtacacgtttttactaaagacctgagcaaactttagaccccaaaccattggatgatgtgactccactatttcacatacaccttatagcagcaacaataataaaacaccattttcagttatataagtgacattggctcaaaatgcaaatagaatgacttctatctattagtcatgcatgctttagaagcctttaactacctccatttgtgtttaggtaatttgatagttgtattaagggcagaatgatttgggtatctggaattcttatatggcttttcctttaagtctatcagtgcaactcaaacttgtgtatctaggaatttttatacaaaggtacgtgtacaaaattcatatgcattctgttttatagcatgatttaagaggtttttgaggatgtttggtttgtctttgcctttaagtgtagcatacttaagagcaaagttggtctcatgatttttttgccatgaaaatttgcctttgctttctttgctatacaatagttacctcttatccatggacagtacatttcaagcccccccaggggatgcctgaaacaacagatagtaccaaacccctatgaatattttggttttacttatacaataatgggcagatagcatatgcagtgtggctattctggacaaaggggtgattcatgttctgggtgggatggagtgagatagtgggagatttcatcatgccactcatgatgacacacaatttaaaactcatgaacatttatttctggaattttctatgtagtatttttgtagttcaagtgcttcaggtaactgaaactggaaagtgaaacttcagataaggttggggagggggattatggcacatacatatgctacatgtgtgtatgtatactgtatgcatcttatgtttaaatgtattcatattgtgtgtatgtgtgtatatactgtgtatagataaacaggtacagacacagcagtgccatctcaaaacagccttatgcccttacgtttttccgaatgaatcagaaataagttgcatacatgatgacacttatccttcagtacttcagcgtgcatctcctaagaataagggcactctcctgcataaccattactaaactgtaatcaattctccaattgacttttgtggcttttgtttttaattcaagattcattctaggcttgtgcattgcatgtgatgctcgtgtctctttatgctcttttctatttgaagagtattcacaccactatcctttttatttttgtttttcaccacattgacttctctgaagagtccaggatagtcgcctttagaatgtcccatatactgtttattattgttatttttaatgactaaattcaagtaaaacttctggcaaggatttatcacaattgatgttatatagttcttgttgcaacgcatcagaaggcaggtaatgccagcttgctccagtattggtgatgctgtttgattacatggttcagatggtgactgccagatctctccactgtaaaagcatattatccccaatgaaattattaaataatctgagagatgctgctttgaaactacaatatcatatcccccaacaaccttttaataattgccagcatccataatggtccttgcctgaatctgttactacactgggagttgcaaaccactgatttttctaattttattattccttttacatttttatgtgacttttttctgtatagaagaactcttcccctgccatctgtcttttatttacaatattaccatggactcatggaatttttaaatttgtccaatgtaaattccaacattactgtcattattcatttttatgtttaagttgtcccaaatggaccagggggagccccttcatgacagcctacacaatttttttaatggttataactttttgtgtcttctttaagaaatctttgcaaaaaatattgcaaaaaaaattgtcctacacattcttctaaagctttgtatttttaatttttacgtttaggtctgtaaatcgtcttaaattattttttacctggtgtgagttagggtttgaagttcttttcagttttaatatctggttgttttcttcactgtttgcagaaaacagactttattttcaccattggattactttgacagctttgtcaaaattgaaatgaccatatatgtgtgggcctatttatatactctctattatgttctattgacctatttgtttattcttatgctagtaccatactgttttgattactgaagctttgtggagtctttaagctaggtaatgtgtcttctatttttgttcttttcccagattgctttggacaggcttatttctttgcattttgtatacattttagaattagcttgtcagtttctattaaaaaaaaaagcatggtgggattatgattgggattgagttgaatctgtagatcagtttgaggagaattgatatcttaacaatatgaattcttccaatccatgaacatggtatatctcacgatttattttcaactacttccatttctctcagcagtattatgtagctttcagttttgcaatattgcatatcttttattaaatttattccttagtgttttgtttttgatgctattttaaatggctgccttgcctttctttttttgctttctctttctctttctgtgtctagtcttttcccactcccctggattgaaggaattggtaaatatatgaatcacaaaatcataaaagtgagctcttgttaacaaagttttgttgttgttgtttgtttcttgcttttttaaatggaaggcaaaagtatgcggcatgatagatgtaattatagaggtctgtgtacactcttctttgataggggcagagagggttagaagagtaagaggaaacaaaggtttccctgagaaaatgggctttgaattaaggcttatcaagtgggtcagaactttacagataaggagagtggcactcaaggtgctactggagagaaaaatgcaagcagaggtttgtgagaacataatgtctttagggaactgcttgtgattttttaccatgatgaagtggctatggagaagtaggccagtgttaggttaggcaaaattaaagagtttgagctctacctgaatgaaggtcccaagaaaccatttaataaataatctcataaatttaatttgcttctctaaaaaatcggctgctgtcaactaagtgcttttttaaaaaaatgaactaatgcttaatatttggaaaatttcctgttacaattcagatttctggcatccactgataaatataagtctgccctctctttccacacatatagcccctgaagatcgggcgcacactcctctcctgtttgttctccttgtctcctgaggccaactgtcagtttccaattttctttcagcttacattgttgttggtttttttttatgtcagggatgtgtttctccctggctctttccaaaatccttccctctctatgtgtttctctgtgtctctttcagaataagagacttagccacattttaagagagtgaaacagatatccacttggaaatgaagagttgtcctacaaaatttgaaattatgcaagttccccctgccacctgcctccaattaaaaaccaatcaaaatgtacataatttcaaagcttttggcctaaatgaattgtaagttgtgttcgtgcatgcttttgaaatgcagtgaaacgttttaatgagtaaacagaaatgtctgtcctcctattaggattagttttttgttgttgttgttgttgttgttgttgttattttgagatggagtctcgctctgtcgctcaggctggagtgtagtggtgcgatctcggctcactacaatctctgcctcctgggttcacgccatcctcctgcctcagactcccgagtagcagggactacaggcgcccaccaccacgcccggctaattttttgtatttttagtagagacggggtttcactgtgttagccaggatgttcttgatctcctgacctcatgatccacccgccttggcctcccagagtgctgggattacaggcgtgagccactgcgcccagccaggattagtttttatctatatgtgttttgaattatgtgaggttttaggaataagctctgatatgtttgtctgacttgtgggagcggttgtgaggtttaaatgacataatgtatcttaagtactcagcattgtgcctgacacagtaagtcccagtgtgaggaagctctattcattttgttattgttaatatatgatatacaatgttatgtaatatataattatgttatattaatatgtgtggttagtttatacttttgtcctgtagtatgttgcaatctttaatattcttgtgttgttacatgttcttgttcagataatgtcagtattatcctagctttatttaataataggatagatttcctttttaacattctgaatcaatatgtaggattttgtcttttatttcaaatattgaaatgcccataaaactgtctgactccagtccctttgctaggtaattatttttcactattctttttttggaatggtttattctattcaggtcatttgctgcttcttagtgtaatttatatatttccagagtattgactttagttatggttttcaaatggaattaaaatattacttatactttgaaagtgacctcttctatagtggtacttgtattcctttattagtactccctttattagtactttacatttgcccttttaaaggactgatcattggatttatctatatattttaaatttgtttatgaagtgttcatcaggcacaaaagtagagtttttgttataaagagtcacatttttcccactccccaggttgcaacagttatcatcatcctccttttggatttactaattgtattcattgtttttcttttttcttttctatccttttccatatagaatagttgcagctttctaaccttattatttaaatgccgaattatttaattttattctttattttaaaagtagtaaattactttaaggtagtgattttgatagtaagcccaagtttacagctttccattgtttttactgtcatttttttccaatagtttgttttactttttaaatatttttatctcaatgttattttagtaaatagtactacgttatggaagtctattttatgcactgctcattctctatagagttccttattgcaagatttattacgtgttttttggtggtctagttttgtgatcaattttataaatatggcttacctcctcaacatagtatatagtctatgactgtaaagttaaaaaataattatctgtcttaaaaattttaattatagtattgaaataatctgtattcgtatcattaaaatatcaaataggctaaaaaagtaaatgtcaaaacctttcattgtgattataatcttccatttacatagcatttgccttttttttgtttttaaaacattttgtatctctgttctttctgataaagcatacactgatactgagtggtgaatattaagcctaattttatatatatatttggactgagtcttgctctgtagaccaggctggagtgcagtggcacagtctcggctcactgcaacctctgcctccctgttcaagtgattctcctgcctcagcctcctgagtcgctgggagtacaggcgcacgtcaccatgcttggctaatttttatatttttattagagacgggttttaccatgttggccaggctggtctcgaactcctgaccccatgtgatccacttgcctcggcctttcacaatgatgagattacaagcgtgagccactgcccctggccacacttatcagtttttaaaaatcccagtgttagccatacttgctgagttgaaagaatatgtgtcagaatttgcagagcttaattatgcaccttgagttattgtggacttattaaaagcctttgtgtgagctgtgaacctcctctgacttttattggtgtgaattagtaatcatacccaaatacttgcaagtcagaataaacaaattattgtatagtcaagttcagtgattctagctttgctttgagcttgctaactgtagtccacttaataattccagttaaggaaaattattgataattacctgtaagtttataaagagatactgggggaatatctgagtgatgatacaacctttctataattctttttttggaattaccacttgcataccatgtacagaatgtgcgagtattttgtaatagctatccatcatttagactgtgtctgaatgatatctctagaagttcccaaagagtagtttgtagctgatggtgccaatgtaggtcattagaaatatctagactccatctcccaagaaactactccgtattatcacattggtgacattattcgtgtttgaacccagcccttctccttgttaactgagaaacctgattagtcagcagcttaaagagcccacttgcaagtgctttgccttgcatgagtaggctcatgtctcagtgtctgcagtgaacaccttaactgccatgtggactgaatgtttacttcaacctgaccagcctgttgtttccttacgtaaaatgttacatcttaatcagaaacatggaattagaaaaaggatgtgggaggcatgcagaggattattaaattaaattgttgtcaattaattataggaatcacttggccaatggatgggagatagttgatgcagtgtcacattggatcatgacactccttttcctgtgttttcctggctgacccatcctctttctgatgggcacattccctcttctcctctttagacttgagcatgtgcctgtcagcttgttctcattgcttggcttgtgagctattttgtttctttgaggatatagcacatctactgtgattcattatgtgtttttttaatagtgtaactctcagtattcctttgtttcaaaattattccccattgtagacctgatgatatatatctatggaatgctttgtagagtttcatacataaacttctttttctctgtttctttttttaaaatttcactcgttttcacttggcacgttaggaatttgctgacaaaatttgattctttgactccaaaaatattttttaatttgaagtaataccaaataactggccgagtgagtttatttaaatgccttatagaatttttcacataatattttgagatgactggtttttacccagatttctctatatagtagctttctattgcctcagctattaatttggatgtaatttatgaaataaatttttagaaaaaatatttctaaaattgggactactggatttaaattttaaacccctgtttttttctggacattgtatttaatatggatcatatagggcacacaggaaaacaaggctgctttgaaatgtcaacgtaattgtaatgggcagttcgccaaagaaagatttgtttgcttttggctttatgaaacttttcctgtagagcttcgtggtgaagcttctcagactcaggaggttggagtgtcacacacatgcatcagctccctaaccttgcccactgccagtcctttccctgtgaatttctgatcctgtgagatagcattaccttttttctttctttctttctttctttctttctttctttctttctttctttctttctttctttttctctctctctctttccctctctctttctttctttcattttttttttctttcagggccttgctctgtctcccaagctagagtgcagtggcgtaatcttagctcactgcaggctggaacttctgggctcaggtgatcctcctgcctcagcctcccgagtagctaagactacaagtctacactgccatacccagctaatttttaaatattttgaagagatgaggactcactgtgttgcccaggcagctctcaaactacttagcctcccaaagtgccaggattatatttgtgagccactgtgcccagccacttgtttctttttttaagaatagcttatctacaaaccatctttgaggtgttttcaaaatgtagacagcctcatgtaggcagacattaagcagaactttttattttatctaagtttgaattactggttgaatttgacatatcagttttccaggtcttgttagcatgccataatgttcctcatgtcacatgggtgcctttagaatatgacggtgacgctgtcttgctgtgttttagtactctggattagcttccttcccacatctctcttctctaagcatgcttatttttaaagcatctgtgttttttcaggcctctttctcatactagcaaggtaagtttataaatgtcaggttattccctcactgttcccatttcctacttctagctgcttcacctcggaaggtgagggctctaaacaggacttttgtgtcattaaccaggtctcataacagtggggggccttgcaagacagccagctcaggctgcttcctgcttccaggggcacccagtcccaggatacagtggtcacagccatggcagtctgtcctttgggactctcaaatcccatgactgtatttcgcacaccatgtgaacacttcttgatgtgtctcctactttcttctgtgaatctggggtaaggcaggacgatagagaggaaagagccaagttttaatcctaactatacactatcttgaaatatctcttagatggatccatgtaggccccaccgtttttgcctgtaaaaagagtcagaaagatcaggctggcaaagtcaattgcctccaggctaggtgaagattgaggccaactggagagtgcgtgccccactgaaagtggtcagcagcttggctttattatcatggtaagagaatgcagacctggtgattctatatcttttgacttttcaagagaagctggaaatctgggtaaaaaataattaattaaaatgttagcagttaagtcagtatcttaagaaacactgtacaagaccaagaaaacatgtctctaagccaaatcatctccaaagacctttagctaagatgatgactaaggcctttctaaattaaatatttttaatgtctattattccaacattcttttggaggaaaacatacagtgtcctggctgctgccataagtagtgctgagaaggctgggtggttgggttgagagacttggcttggctgtcaacaggaggtgcacagtctctctcttctcctcctaggaaggctgagagattgtggggctcctgtaaaatgcaagtagtggtagctcctgctccatagcagctgctgtccaccatctgggtagtgtcacttctgtgtggaagcagatggagctgatgttttgacccggctctgtacccatcatgaggtgcagcctagatcaggtgaaattcaggcaacgtacagacctgtgagcttgagaataaatgtataggttactttaagccattgagtttttagtgatttgttaatgtagcataaatagaaatagctgactgataatgtagtatagaggaggatagttacacattggtataaaacaagacatcaatctctttttcagaaaacaaccaaaggggattctcatcttctcacccaaatgtttttctttattttctaattcttcactcccatacttcccacacagttgggataaattctgaattgcagatttagcttcctgtgtatacagccaatcaatacttagcaccctctttagagaggtatggctttccttaagccaaccccagagaggatctcagtaccccggattgaatatttaatacttctgaaatgacatctggaaaaatacccaagcttttcctcagaaacaaaaacaaacagttgtaatctcctgaattcaacagagattgctgagagcctactctctgctagtatatgtgctagatgctagatagaatttatgcagttgatatttgttctgttcctgctgtctgtcgtgtgctgtggtcaaattcagagcctttaaggaatatactagttagtgggagaggcagtgaagtggataattaaggcctagtgtggtaagcagtatcattaagtggcacatccacagacttaggggagcttgggggaaatgcatctgactgcctggaggttggaatatggggagcattcagaaaagtctctctgaaggaactcaccctgtacttcagctttctgaaggatatggttaggatgaaatccaataaccagacagtagaaagtggctgtaaggaatgatccttctctttactcattaaaaggaagggctctttctcaatgagtgtcagaatcacatggttcaggtattggggattaaccaagagccacatgtgatattggtgcatatgcacaccaaaaatttataacttgattgtgtatgaaaattccatgacactttttctgcactttctcagactctcttggcattgcctcaagaacctgcagccacgggctttgctgggcaggcagctctaatctagtctgtggggttccagcacctaggctagccagtcccacacacagtttttgtatcttccctcaagactcgaatgaaatgccatcccagaaatgtgtaatctggctttaagagaggctaccttaggcagatgaagcaactagaaatgtagtagagttaactcactgtcaggaggaatttgacaggtggaaataggcaacaagaagcagctgggtagatgtagtcctccccactgttcccctcaaagcccccaccccagactgctctgaggcatggtttctccatttcacccatctggaaatgtatcacctggctgaatgtacctgtctgcccttaacctgctgtgtcgcttcaaggctggtgaagaagctagtgcagtgcttctcgttcttccctgttccactatttttaattctcatttaacctatatattttttaaggaactcaggctaaacgttctatgtgttaagcctgagttcttaaaaacatttagaagtgtatctagtatattaactcaaatacatttgtatttagaatgttttaactcaacaatgaaatgagtcacagaaaaagaagccagtcttattttaagggctaataatgcagaaatcaagagtttcctacagagcataaattagctgatatttccttagtatttttcaccagtgcttcccaaatttcccagtttacagtctgctttgtaggagtaagaaagattcttgagctctcccttcccactagtccacaggcccttaccgatcccccaaatagattatcaatcagcagtaattgtttttttggggggatggggagtagagcctgtcaactttgttgacctgctgttgtgtgctgcaagaggccatatgtgactgttagtttcaccagcagtaagggagatagaagacaaagatggccaaatgtttctgagtttgaatagtatgtttctaacatgagtccctcaaactaatttttcttcttctctaatttttctgtttttaagtaaaagtttcactcaaaaaattaattctagaagtctgaaccatatgttttcataacctaacagagattaaccttgtcattggttacatctagaccaattaattcactggattaagtaggtaaactataaagaaaaagaaaagcaagctcactctcctttttacaacttccctttttcccagagaaagatcagtttgattagagccaatctgctcagagatgtctctgctttgtgtaactttttttattgaggtgaaagtatctataaattcttgctaattagcagttacacatatacatatgaaaaataatgtaatgattctcatttcccaagccatgtatttccattgtgtatttaatgtctttttttattttgaaatatatttcacatttctgagattgatacgtttcttaatctttcttattcacaagaagtgggtttgtggaaggaaaaaggagtgaaactaagaaaatgatttaatttccttgaaaatgatcttcctcctaaaatcagtccttggtttgaattttgaattcgttcaattttctgtacatattagtgaatttaataatttaaattaattttaaaatatagctgctaattattagactggcttagaattatttgagttgctttttcataatgtaggatatattgttgcaaaaatatgtctgtattcattcatccagatttctttttttttgtttgttttgttttgagacagggtcttactctgttgcccaggctggagtgcagtggcaccatctcagctcactggagcgtctgcctccaggttcaagtgattctcctgcctcagcatcccaagtagctgggactacaggtgtgcactaccactcctgtctaatgtttgtattttttggtagagacagggtttccctatgttggccagtctggtcttgaactgctggcctcaagtgatctgcccgcctcggcctcctaaagtgctgggattacaggtatgtgccactgcacccggcctcagctattttcttaaacttaaaatatgtgtttcatcacaaaagatgtattaattacattcatatttacttactgtttcagaattaactcctagaattctgacaggcggtagtgctttgcaagctttgtgttaagagctgctactggggaatatgttgttgctgtaccttccactagggtggcattgatctcattaagacagaaattatgtaagaatgcttttaatttgggagcttattattttctttccttttactaaatgcttaagtggcttcttactgagtttttcaaaatgctttgctgatttgctgactctgaggaaacaaattgaatgacagagacacattacctaatgttgcctatattggcagaaaagaaagggaaaggctgcttagggttctgaggacatctgtacagaaccccagcaaagtgatgtttgaatttagtgcctctcattgtaaacatataacaagtgcaaaaagtgtgaaaaaggccaaaggagggggaaaatataatctcattagtccgagagaatcattggtaatatctgatatatttctttttttttaacatttttatttttttatattttatttttattatactttaagttttaggatacatatgcacaacgtgcaggttagttacatatgtatacatgtgccatgttggtgtgctgcacccattaactcatcatttacattaggtatatctcctaatgctatccctcccccctccccccaccccacaacaggccctggtgtgtgatgttccccttcctgtgtccaagtgttctcattgttcaattcccacctatgagtgagaacatgcggtgtttggttttttgtccttgtgatagtttgctgagaatgatggtttccagcttcatccatgtccctacaaaggacatgaactcatcattttttatggctgcatagtattccatggtgtatatgtgccacattttcttaatccagtctatcattgttgaacattggggttgattccaaatctttgctattgtgaatagtgctgcaataaacatacatgtgcaagttggaaaacactctgcaggatattatccaggagaacttccccaatctagcaagtcaggccaacattcaaattcaggaaatacagagaatgccacaaagatactcctcgagaagagcaattccaagacacataattgtcagattcaccgaagttgaaatgaaggaaaaagtgttaagggcagccagagagaaaggtcgggttacccacaaagggaagcccatcagactaacagctgatctctcggcagaaactctacaagccagaagagagtgggggccaatattcaacattcttaaagaattttcaacccagaatttcatatctagccaaactaagcttcataagtgaaggagaaataaaatactttacagataagcaaatgctgagagattttgtcaccaccaggcctgccctacaagagctcctgaaggaagcactaaacatggaaaggaacaaccgataccagccactgcaaaaacatgccaaattgtaaagaccatcgaggctagaaagaaactgcatcaactaacgagcaaaataaccagctaacatcataatgacaggatcaaattcacacataacaatattaaccttaaatgtaaatgggctaaatgctccaattaaaagacacagactggcaaattggataaagagttaagacccatcagtgtgctgtattcaggaaacccgtctcacgtgcagagacacacataggctcaaaataaagggatggaggaagatcaaccaagcaaatggaaaacaaaaaaaggcaggggttgcaatcttaggctctcataaaacagactttaaaccaagaaagatcaaaagagacaaagaaggccattacataatggtaaagggatcaattcaacaagaagagctaactatcctaaatatatatgcacccaatacaggagcacccagattcataaacataaagcaagtccttagagacctacaaagagacttagactcccacacaataataatgggagattttaacaccccactgtcaacattagacagatcaacgagacagaaagttaacaaggatatccaggaattgaactcagctctgcaccaagcaaacctaatagacgtctacagaactctccaccccaaatcaacagaatatacattcttctcagcaccacactgcacttattccaaaattgaccacatagttggaagtaaagcactcctcagcaaatgtaaaagaagagaaattataacaaactgtctctcagaccactgtgcaatcaaactagaactcaggatgaagaaactcactcaaaaccgctcaactacatggaaactgaacaacctgctcctgaatgactactgggtacataacaaaatgaaggcagaaataaagatgctctttgaaaccaacaaaaacaaagacacaacataccagaatctctgggacacatttaaagcagtgtgtagagggaaatttatagtactaaatgcccacaagagaaagcaggaaagatctaaaattgacaccctaacatcacaattaaaagaactagagaagcaagagcaaacacattcaaaagctagcagaaggcaagaaataactaagatcagagcagaactggaggaggtagagacacaaaaaacccttcaaaaaatcaatgaatccaggagctggttttttgaaaagatcaacaaaattgatagaccgctagcaagactaataaagaagaaaagagagaagaatcaaatagatgcaataaaaaatgataaaggggatatcaccaccgatcccacagaaatacaaactaccatcagagaatactataaacacctctacgcaaataaactagaaaatctagaagaaatggataaattcctcgacacatacaccctcccaagactaaaccaggaagaagttgaatctctgaatagaccaataacagactctgaaattgaggcaataattaatagcttaccaaccaaaaaaagtccaggactagacggattcacagccgaattgtaccagaggtacaaggaggagctggtaccattccttctgaaactattccaatcaatagaaaaagagggaatcctccctaactaattttatgaggccagcatcatcctgataccaaagcctggcagagacacaacaaaaaaagagaattttagaccaatatccctggtgaacatcaatgcaaaaatcctcaataaaatactggcaaaccgaatccagcaacacatcaaaaagcttatccaccatgatcaattgggcttcatccctgggatgcaaggctggttcaatatctgatatatttcataggtaccttcttataagaattcggtttaggtttattttacagagttctgaacatactgtgtctgtgtgtattccatttagtatttgatttttaatttagttatcataacccaggcattttttctaagtcattataaatgcttcataaacatttattttagtgactatactgtggctataccatgatttatctaattattctaattagttatttaggttgttttctaattgatactattatagataccttatgataaagtcttttaatatggatttttattgaaatataatatacactattcagttgtgtatacatgtatatactatatagcattttgaatttttcatgagccaacacatgactaaaactactgtgtacatcaataaattatcactaaatgaacacaactatgttaccactactcaggtaaagaaatagaactttaccaagtcccctaaatatgccctctaccctctgccttctaatcactgtttctttcctctttcttgaagataatcactaacctgacctttaaggccatagatcagtttttgctttgaaggtctgtagtttgattaatttcatttagatttagggttacaagatcaggaagtatggaggttttaaagtatcttatttcacataatcaaattgccttcataaatgctgtgccattttaccaccacattgttaaaaagtatgagaaagacttttgttcctgagtgtggaaaggaagagaaatcagggtcaagtgtaaagagacgaagttctggacagtgaataataggaccaaatgggatcatattgctttagggaaatctcagctgtctgtttctaaattctattttatggctttgaaaatcctcttctttacctagacattgccagtcattgtggcagaaagaaaggagagtgtggtgagccacatactggcgattcatgtaccagctctggacacaagtggcatatgaacttctgcccacgttacatgccacgttcatggctaaagaacagataggagttcagtagagccaggagtatataatcccacagggagaggtcctacaggaaaggaaactaggctgcttgacaatcataccatccaccacacttcgtttaatgtctttgtcccatccataagcagatcagattatttggattactcatttttaatttttattataaaagtgccctctggtcttgaggggcctgcatctctgtataggactatatcttctgtaattattggtcaggtggtttgcatagtgctaaactttttgtttagtgtgtgcacttcttttccaagaagaggcctagaaacatgcttgttcattaagaggatggggaaatgctaactaactttagtttataaggtacttttgatggaaagaaattcctcctcaggaagtaaggatatttgtgtgatttttgtttttcgtttgaggcagtgtcttgctctgttacccaggctggagtccagtggcatgatcatagctcactataacctcaactcctgggctcaagcgatcctcctatgcagctcctgagtagttaggactataggcatgtgctgccatgcgcagctgatttttcttttttcttttttgtacagacaggaccttgctatattgcccaggcttggaaataagcttttttatagctaatttacacattctgcttacatgctccaggaaagcattcagtagatgattttctagcccatgcacagttatacttacaggactgtggaggttttctccctgtcacagcaaggtaactgagtcgttcaccaagaggtttggtccaggtcatcaggaacacctttcagttgtagctaacatcctgccttcaccctttcctacagtcagtttgcttcttctctcttgccattctttgctaaaacagctattttgtagtattgctctaaaacattatgtgttgcttctcatttctctttctctttatgtcttcatgaaaacataaatcagtcaaggtactctgttgttcagttagagaaatagttgcacagtggagagggttgcacagttatatttgatcagcttggatttaacatggtgtctcttttttatttcccaaaggtgtcttctctttagggatggtgaggttggaaaaaggctcctgtaaccctcctccaggatgaaccacctgccagaagacatggagaacgctctcaccgggagccagagctcccatgcttctctgcgcaatatccattccatcaaccccacacaactcatggccaggattgagtcctatgaaggaagggaaaagaaaggcatatctgatgtcaggaggactttctgtttgtttgtcacctttgacctcttattcgtaacattactgtggataatagagttaaatgtaagttggtggttctttcataactttttaagaagtgtttccagagacaacagggtttttttgttcgtttctcttatcatttgtttcatttagtaatttccatctttttccaaatgaagccattgcttttctcctcctgatttggacctttcttgttctttaatattattgtttaaggcaaatgtgatcagtttaaaactcatgttgtctggggttttgaaatttgaattcctggtattttgctctgtaacaggagttgacaaactataggctgtaagacaaattcagtaggcctgttttaataaagttttattggaacgtggccaggcctgtctgtttacatattgtttatggctggcttttgcactgagtagttgcagttgaatagttgtgacagagaccctctgacccacaaaggcaaaaatatttgttctctagtctttttcagaaaaagtttacccatccttcctccagaaaatgtagaatgcttttggaatatgttttagatgtttcatgtacttttctagttcctaggtttaagattttgcacatgtttgttctttactttcttgcaaagagattacttatttatatttcatcggaaaagttgtcctggaggcatttggaggtttatgcagttattctgtattaccaactaattgtttagaccagtactgtccaatagaaatataatgcaaactattaaatatgtaatttaaaattctctagttgccacattaataaaaatcaaacagatgaaactcattttaataatattttttatttaacccaatatatgtgttttcttcccaaagcctttggtctgattgtttacatttcttaccaaccaataggtgagctcctccaggaggttttcctcacaagcaaaaagtgtctgctttcctattttcagcagttcatttatttccaggaaatgtttgctaagacctaggtagtaatcattattccctgttgtttatttttagggggttactctttgctaggcacagtgctagatgttttatgagaatttattataatacaaaaatatgaaaagatgctgagattcctgtttgaaaattatttaaaattttgccttttaacagcaagaagcagcatcttaatctaatttttgattagtattctaattcatagcataatttcaattctaaactctattctcttaataattagggtcactgaatctcatttaatttcatcatgaatcctaatagaggaactaaactcgttatgaaagcagacagttacattagaaaataatatttgtcccataatcacagtgacatggaacatgagtccactgttaagtttctgtttacagatttttcttctgttaattttgcactgtgggattgttaagttttgtttataatcagacagcccagtgatatgacatagtaatttagagtctctttttgctatgtgttccacatatgcacattaaagaaaatattttaattaatgtatattttaaaggagtaatatgatttcaaaactgtagctatgtaatgagagatgaaaaggaaatgcgtctttttttttttcttttttgagacagagtcttgctctgtcactcaggctggagtgcagtgacacgatcttggctcacgcaactgccacctcctgggttcaagcaaatctcttgcctcagcctccagagtagctgggactacagggcgcacaccatcacgccttgctaatttttttgtatttttagtagagacagggtttcaccgtgttggccacactgttctctatctcctgacttcatgatctgcctgccttgccctcccaaagtgctgggattataggtgtgagccatcgcgcctggccggaaatgcatcttttaacaggaaacacatcagtagttttaagggggcacactttaaatttattttaacgtcaacagcaagtccgggcattcattgctttggctgcttatatcactgtatgcctttaaatgaggaaagtcatggggtagaactgtggtggggttcatgggatcacacttctcatttctctcctttctgttttgtccagggaagtggaaatgaagtaggctgccccctgttcttgttcacagacaagttatctgtttacatctgcatgcaacgtgttataaatgaaaaatcaccaggcctagcaatttagaaatgtgtttttatcctcacttttccaccaactactagtttccccacctgtaaaattaaaagattggaaaagggtatatgatcaagcaagaacatcaggactttttttagtatgattgtttttcgatgcccaatttctagttctacttgttttgaattgtcagtcttgacctggtgttttcactacacgcagtaccattcattttgctttgttgtctctctgtaactctctaatcattcaaatccatttttttaaacatgtctttacatttaccaaatgccagagaacaggcttctaattcaggtgttgcaagctctaccaaaaaaaactatatgggatttagagtttagctgaataaatatggcacataatcttatactgccttgtgatgtagtctttaaaagaagaaagaaaatgtcataaagggtgcttagagctttagaatatggagaaccagctgttctttgcaattataacaataaccaaactactttgccttcatgtatgacttccaccttagccaccttccctccttgccacagggacctgactggcaccatcccagcctcaaatgcagggctcggtgagccagagaagcctaacaccaccttagttcattttccttctagaagatcttagggctgctgatctcttttcggtcaatcaaaaggatggttttgattctatccaaggcctcttggtccacctttgagtagactgatttcccaagttggatctggaattaattatggcttgcgttccctgaggactcttttccctctgcagactctctcctacactctgtagacagtgtgaacagggatcaaagtagtgacagttgaaaggaatttggttttctttttagcttttgatacttgattgagactatggttcaaaaaaagcctttatcaatgcttagtgacttttttcttactattttctaactggcgttctagaaaatgtcataacagtcctaatttgacttagagctgtcgtgaccaggtctttggccttgggcaagctgtttaataagttctctgggccttttgatcaatttaataaactaatactggtcttgccttcctcatgggtccatgtgaagatcaaatggaaagatgtatacagcagcccctttgaagatacaaaggtctgcatgattatagttcatgtaatttattaataactaaaataaatttaacccagaaagaagaaaaaaatgcaggttactgttttctcactattgttacatttaagtttcaggtacttattaccctgctaattctgattctattacctcattcctactatgctctataaatggtgatgaccaagtataatagaaattcagatgaggtagatcagtggcttggactgtttgagggagtgaatggaagagatggactgtgaattggatttggaaggataggtggcagttaagatgggaggatgatctgggaaggatgatccttcagtgtgggagcttggggagagggtttggagatcacggcgcatggaagtactgaggcaggagtgagtgcttatgtgtggggagtacgtgctcaagtgcttgtatttggagggaacagggacagaggctaagaaaatactagcttggttagaaagtaaggtgcctattggaaatgaaattgaataggtaggctggtgctagattattcaagttattaaaaggtatatagaaggatttgtatttactgcaatggtgagctgttacagattctggagcagattggacaacatgattttgagattttccagaagtcagtgactcacagtctacatcacagcctccttgacctgtccagttggatgtctgacttaacatgtttcccccaatgcatacacacacctgctttccccctttttcatcagtaagaaaatgcagagacttaggccaaacatgaaaacgcattttgatttgcttgttttgtatttttcatgcttcatatccagtctaaaagtaagtcctgtcaaatctgcctctaaaatatattcaaaatgtgaccacttctcttcttttccactgtttctccttttccactgtttcccttcttttccactgtttccctttcttttccactgtttccagcttcaaccaagccacattatcactcatccaaactgcactcctggctggtcgcctgcttcctctcaccctgcaatccattcttctcacagtagccagggtaacctgtgaaaaacaaaagtcagatcatgtcactttctgttacagctcttcactggcaggccatgcttttagaataaaatccaaatgtcgtactttggcttgcagaggccccagaagcctctcagacttcctccccaccctctgttcctggctcacggtagatgagcacacttgccttcttctgttctcagaaaggaataagctcctttctatcttgggacccttctactagttgtttcttctatatgaaatgattaatttcctttatctttttatagaattcaacttcttattttgctagtatcagtttaaatgtcttcattattctgtcacactgtcctgcttctgttgtctgtgtagcatttgttttcttatttgctatctctctcaccttgccagaatataatctccatgaagacatattattttgtttactgaagtatttcctatatttagaacagtgcctggtgcgtagtagatgctcagcaaatatttggtgaatggataaagatcattgtggcagtggtgagcaggtgggacagattggcagtaagaacatgaattcggaagctgttgcaggaatgtcatggaaggcggtgggaataggaaggaaagaactaacctgagagtcactaaaggaaggagtatgagaagacttgttgataggccgattttatcatccccagtatgcaaagatgactctaaagtttccagtgatgaactctagaagagtagtaccagaactgactgggaagggattttgtgtgaaactaaagatagtttatttaagacatcttgaggtagagacaaaaattttgaaatgaggatttagagtataagttagggatagagatatacattttagataatgtctgtttaaagccaactccaaatcagagcattttaaagtatgcagataccagagaaaagctatgggctatttattgcaaaactctatgggctgctttgattcctgttctcccaggaatagcaaggggaggtctctatgtggtagagaactcctgtttgctgtaggccgcttggaataatcattcttataatattctggatgttgacaagtttccttagtccggagagacagtaatgagactaaatggttgggtgtctttcaatcattattcctccttcctcccaggttttcaattctattcatttgtagaggtctgtagccaagcaggtctacagaggatccatactaattacaaagaaatgtagacctccttaagggattttcgggcacaggatagtatttatggtatgctttcatttttgcataacaaatacaaatatgtgaaatgatacctaagctaggaatacccttccctatggcaactttcattcgaatttgaacctggcaaaggtgttccttaatgttttccctcttatccaggtctctggttaactgtccttccattggtcctcttttaaaccctctgcatttgtttgctccctctgatcaggctaatccaggggctctgacagttaccctgcttgggtgctgcattagctgccgacacatgtccccttacttgattttttaaaagtattatgctccatagtttcatttgtcgaattttgagctcgataatacaagatttattttgacagtagcattgggagaggacagaaagttgtatcaggtttgagtctagtactgtccttatttcattatctattcatgttaaaaatatatttaaattgataaaagtgcagaatctttaaatgccaggagaaataaaaatgagaaaccacagagaatgtttacacttctatcctgtgtcatgctaatggccatcattgacgtttgcccggatgtcggggagtcttggccttccaagacctaagacagtggagcgtgatcagaaagtaaggtagtcctggataaaggtgaattgccttctttaaaaatatacttttgtatgatggaagactttatcttagaagggaaaaaataattttcttaacattttaattttcccaactatgaactacagaagccattatttttcactatacatttatatctgttgagtgaatgaattcagagttgaggaattggagagtgccatctagcccttttctattaaaattatgagagttcttttcttcgcactttagcatttctgggttctgagaagataggcaggaaagttggataggaaatcttaccttgttttatttccacacataaacctctccttgtttttgcttcttactctcctttctaggtgaatggaggcattgagaacacattagagaaggaggtgatgcagtatgactactattcttcatattttgatatatttgtaagtattttttatgtttcatttcagatgtgataaaactgacccaaaaggcagatttcctctaaatagacttcaaattccatgcccttttttcctcttttgaacactgaccatattttccttttcttttaattccccacccattcaatgttctctctctctaaataaggaattgtgtcatcatctcaaggaaataaaagattaatgacagataagggagggcaacagaaggagccattcctattttcttgttggagagcctttattctttcaaatggctcaaatagaacccattgacatatctagtcactgaaaggaaaattcacctatttgtataataagatgatgaaaatgacatcttttttttcttgccttgttttttctttcataatgggagattaatgtgagacctaatttgctattacattaagttgtagagcagggattcccaaatgctggtctacagaccagtgccagtccctggtagtctccagctaaatcacagtaatgaagacagtctggtgagtttttcataaagctgtgtcatttttgtatatattttttaaaacatccctttattttcttactttcagcttctggcagtttttcgatttaaagtgttaatacttgcatatgctgtgtgcagactgcgccattggtgggcaatagcggtgagtatgccctgcatgagtgggtcatctcctccagtgctggtggccaagtcctgctctcaacaggcctgggctgggagaagatacagttctaatgcaggtggaatcccaccagctttcctgagtcccgtttcctccatacttaagtaggtttaatactccagggcttctttccaatgttaatgagtaactagatttgtctcttggtgctgagccaaatgaggaatctagaagcccaacagtgattattggccaagcaccaagccaccctctacctcattttgcaaataagagatgagaggagacctctgtcacagagatatttggaaaatgtcttatttggttgaaactgcttagtgattgttttcatgacatggtctgtacttatttaggtaattgccttaccccctcctttcttccccacaaccccctgtcttggagggaaaagctctcagtctctctgttgttgccttggacttctcaaggacaaggacttttttactcctctgtttcctggcatctagcacagagagctttggtattcttaataagtatttagagattgatagaattactagcagttctgcctgacagatgtctgaatatttgccttttgtaaagctttaataagtcagttctatgggaagaaaatgtggagctcctcagactagagagagctgctcagaaataacctgcagttctgcaattagagggtgagagctcgggtctgggtggcccaggcctgggtttctccagctgggaataggacttgtgctgccctcctgagtccactagggggcgatgtctgtctgggccatgtcttctgagcattctcagaatcacggggcagcggtcagaccatctgttaatccggaagctctcatttcatggatataggctgacagtcttggccagacttgactccctttcctgaatactcttttgctgatatcatcatagcttttgatgattgtaccctcccatttttctgcattttctacaacagatccctttgggatgttgtattcctgagtccccatatgtatgctagtatttgtcagactatccctctcaatgtttgttttagaaaagtgtttgacatatagatattcagtgagagctgtaagacagtatcttcaatatctgctttcagattatctgaagaataagtctaatttagcaaatcattttattgcttctgattcttgttttaaaaaacatttgcagagaagagtctagaagctggaaggaggagaagtcagctggtatttaaagagtgcttagtgtgagcctgtaaagttaattagtgtcagaatataaaatgctaaactgcctcctctcccaagcagctctgtgtgtgtgtgtgtgtgtgtgtgtgagtgtgtgtgtgtgtgtgtctgcaactttgttaatacttattgagcaagatacttggtgttccctgtcctccttctgtcagtcaagctactattggtattcattttggtcaggtttcaccatgctaaaaatattagttgaaggaacagtgacaaggctcaggtattatggtatctctggacttcacaacccctggcgagagccctacctatgcactttaccagtctcttcatgtgcttgtagaggctttggaattgtaccttctggtggatcaaacttagttacctagcacaccagcctgctgaaatgtgggagaataaaccacacacagtcatttagggattgtgtcacatgtagaagcccattttgccccagtgtgggtctaggggagagagactgagtgatatgggaaggagccaggctaggcacaggtttttcaggccttgcctgctcctggctcagacgggtctcttgtgaagagggaggtaccttcacagtgtgagatgcctagtgtgaacagtgctggattatgtgtcttgcagttgacaacggcagtgaccagtgcctttttactagcaaaagtgatcctttcgaaggtatggcctaccactttttctatacagttaccatcttcagtgatgaagcctcgtttttcagtgtgagtttgtggtaactgcatttccctttcctggtcgtattttccagcttttctctcaaggggcttttggctatgtgctgcccatcatttcattcatccttgcctggattgagacgtggttcctggatttcaaagtgttacctcaagaagcagaagaagaaaacagtaagttcctctcaaagtcagcctcctgaggcggactggataccaagctgggaggaagagatgtggtttcttggtgtgaatggggctgcaaatgggtagagttaggcagtggtggggtcttcattctttagtggctacagcagaaatcgagagaagggttgggtggatgaaagggtaagtaacagaaagcagctcctctctccagctatcaggccaggcttcccctggaagaaaatgtgaacactggtgaaaagggcattcaagcaataacaaaaaatagccagcacttttttctccccagacaggttgttcttttctccctgttagcaatagacaggacagtaagcattttgtgcatgtaaacagaactgtgctgtttagggtcagagaaaataaaaccaattttaagtgagtggaagcaactattctaaatacaagccagtgattctccaaagtctcccattgtgatccatacagcagttggtggcttcagatgggcctctgttagaacagttaaatgcctagggctggggaccattggtgggtttaggatgaagattattcacaggaggatgacagcaagccagagcgacgctcagcctttcaccatcctctgagtagctgagtcatagctaacaaggtgtactcatgaatcctgccaaagctgctataatctcatcatggctttcaatatcccagaatattcactaggaaggccaaatgattgattaagctttatggtaaattaccaagctgaaattcttctccacataatgtccttaatggaagcccacatgccccacccacccatcttaaaggtgaaacgatcaaagctcatttcagacacccatgcagtttcaagacatgctgtttttatgcctctgctggccatctggctcaatttgccctgcctcataggaaaaaaaaagtatcttatagaaagttaagcatgattataacttcaaaaaacagcaggatgcaaaataatcttgcaagtggttttattttggaaaatctcatttacatagaagaaatatataagaaaaggataattcaagagtagattttaaaaacccattaatcagactgagttgtaccttctatcctgtgccgtctattcctttgtgaaagtgtatcttggagaagttataagtaaagctaatgaaagtcttttttaattgtatataaatataaaactgaactttgttgaaaacatatgaactattactatgactgaggcttgaatggttataggattaaaccacattcaaagtgactaataaagcagaacacacaattaatgaaaattttaaattagcacttattttcattgtcagtagcatgtatgacacacatacctggtatctgctatttggcctggtgcttcctccgactttatcctgaggttaactcagctttcagtcaaaagaacttaagtgttggtggccttgcgtgtgttagtgttcctcagctgtccacgtcctgctttcttaccttttctttgcttttttaagacactttttttcttttgaaaccttcttgttgcataaatatttgtcatcttgattgttctttatatatttataaaaggccatccctgtattgcactttacatctggcatctctctaaccagatgtagccagcagaccgtttgtaggaactgaccatgttttttattttactttttgttttggttttgatactgtgcttttttgtaggaaggcaggtactcacaagggaaagatgtaaatactgaattatttattctgagacagggcctcactttgtgaagtgcagtggcacaatcatggctcactgcagctttggcttactgggctcaagcaatcctcccaccttaacctccccagtagctgggactacaggcatgcactaccacactcggctaatttttaaattttttatagagacagggtcttgctatgttgcccaggctggtctcaaactcctgggctcaagcgatcctccatccttggcctcccagagtgctatgatgacaggtgtgaggcaccatgcccagtctcatgaggcacttatttaagctgcttagttatctgtctttacagtattgtttgtcatttgttaatgaaacttattgtttggttgaaacatttttaaagtacctctttttctaaaggtatttcattgtaataataataccattttattttacttaatcttgccaaaaagctaccagaaaggtgacctcattcccaacatctgaatttcttctcttccaggactcctgatagttcaggatgcttcagagagggcagcacttatacctggtggtctttctgatggtcagttttattcccctcctgaatccgaagcaggtaaaaaacttgattattatttgtgcttgtatctctcattcaaaggctctgctcttccttcctttccctaccccctctgtttctcaatatacttagctaacatctaacatgccaggcattagggatatgaaaataggtgagacacggtctcacatgaaaccagtggtaagacacagagttgtaaaaataaatgtcatggaggagtgattagacaccatgatttgtgatatgtatcttagaagacacacagacaaggggaagcgtctcagtgctctcattattgcggttcatcaccaaaccaacctccctctaggactcccatatctgagaatggcagcactgtccagccagttgcccagctcaaacaccagagcctcactgttggcttcaccccgttcttatggctcacatctcatcattcacaaagctgtttccatcctctctcccttatttctacctccattttctcattcaaatcctgccacttcttatcagctccaacctcatttcagcattactttctgcagtttctgcaagagcctttgtctccctgcctccagttttgtctttcactaaccagcaaccagagtgctctgttaaaaataacaattacactcagcaacaaaaataaacaacctgattaaaaaatatgcaagggttttgatagacatttctccaaagaagataaacaaatggccaataagcacataaaagatgcttaacatcactaatcattaggaaaatgcaaatcagaaccacaacaagataccgcttcataccgattaggatgactgttacaaaaagcaaaaccaaacaaaaagacagaaaataagtattggtgagaatatggagaaattggaccccttgtgcattacgggtgagaatgtaaaatggtatagccccagtagaaaacagtatggtgtttccgtaaaagattaaacatagagttaccatatgattcaacacttctacccctgggtatgtacccaaaggaaatgaaagcagagaccacagcagatatgtgtatacccatgctcatagcagcattattcacagtagctaaatggtggaaacaaatcaaacagctgtcagcagatgggtggataaacgacatgtatgtacatccaatggaatattattctccattaaaaaggaatggaaagctgggcacagtggctcatgcctataatcccagcactttgggaggccaaggtaggaggatcgcttgagcccaggagctcaagaccagcctgggcaacatagggagaccttgtctctattaaaaaagaaaagaaaagaaaagaaaagaaaagaatagaattctgacacatactataacatgtatgaactgtgaacacattatgctaagtgaaataagccagacacaaaaggactgtcgtatgatttcacttagatgagatacctagagaagtcaaattttcagaatggtgatgatggctgcacaacagcatagatgaactgaatgcactggatggcatgcttaaaaatggttaaagtggtaaattttatgttaaatatatttttctatggtaaaaaacccactatttttaaaattgctaacacttttttaagtgtcaggtgctgttctaagctttattaatattcactcatttactcctcccttgtctgcttatcttctgagatacagatcacaaaccatagtgtctaatcactcctccattacatccattttttataagtctgtgtcttaccactaatctcttgtaagattgtgtctaacctattttcatattcttaatgcctggcatattagatgtttgctaagtgcctccactctgtgatgtaaaactcgtattatccctaatgtagagatgagcaaatgtggcacagagaagtgaagcaatttacccaatatcacactaataataagtggtgtagctgggatttgaagctggggtccagtgctagagttcatgcttataactgctaaagtatattagcctcttggtgtttatgaaaatatagacttggtcatgccagtcccctgctcaaaagccttcagtagcataaaggataaagaaatcagtagatcttagcctggctggaagtgcccctgtgggcactgtcaccagttgtctagcttctcaccttgtgactgccttctggtgtgctgttcatagctcttctgaaaatgttgtgctctagggccctccagccattgtccaccttgctgtttccattctgagcatgatctcctctgcaatcctagtgtttgctcacatgttcccatgttcttcccagccatgcctacccttcccatcgctcccggcagtcttagaacatccttagcatgttctttggaacctcttccacagccctgtcatcctgtgttgtctgcactgccttcagcgctgacctggtctgtttctactgcgggttgtaaacttgagttagagactacatcattgtattccctacattaggcctagttaatattttcacacacacacacacacacacacacacacacacacacacacacagagtggtaaaagggattccagacagaaagagccatgaatgattgaagattacagccatgtgaaatatcagtgtactggaggaactccaagtaacttgagattctggactattggtgttggatctgaaagcagcatacaacacagaaacatagagctagatgaaatacagatatggatttgtagaaaatctgtttctaaaacagtaaaaactagaatttagtattaaattgtttattacctcataaggattatttcattgagatgttttgtgtcataggactttactctttgaaaaaaggaaattcatattagagttcatgcatctctacttctttttctaagactaatacaggttctcagtactaatgtattttcttaactagagttcagaacatagaatagtagtgatacgaggaacacggtctcaagcatgcctcatcaaactttctagttctgggatccatctgcatttcacctttatcatttaccaccacctagtggtaccttggagcattaccatttccttgagtcaggaaggtaaacaaaaacaaaacattttcatggtgttccactgtgtagctgctttgtttgacaaaagacaggttactaatgggcagagaaggagtggtcagagtggactaccttattatatttgcattgtctgaatgttcaatttaggaaagaattaaaaatgaaaactgttactggaattaatatgcctagaaaaaaaagactactctagagcaaagcttttcccttatgccaatagctaaaaattgaagcctttcagtagcttgaggttctaagctgctgttgccctgctacagcactgacttccctggtacacatgagggcgtccgaaaaaggcctgacgtgcctttttttgtctttttttcctccaccacctaatacagtacctggcttatattagacttacaactgttgaagaaagggatgaaaagaaaagggaaagaaataggaggcaccataaacaaaaatgttagcatttttccttgtaaaggagcagcctgaattttagtaccacagggatagcacggtttattagatatacttgtaaaggatataaaaatagtttgtttgcaggcttgcttgttgatcagaccgcatcctgcatccctttgtattaaatggaaagaattaggaagcatgatcctctctcagatgactgggttgaaattatgtgtggtcagagagcttaagtgaaccagttatgaagctgaagaaagggtaatttttcacttcctaaaccatggaaagattaacttaaaatgaggaattgctcaattgcataatatagcctgtcctgtgcaagtctagataaggcattcattacaattctaagttgccacctccccagagtagccatgcatcctggtttgcctgcagcagccttgccttcttctggttgccccatatagttattattagaagcccttgtatctctcagcagtgttcttgtttagatgatcatttctatgatcaccctatgtgtcgtgaatagattcgaaacacagctttttccttttaatcaaaattttgaaaattattgaaaagtcattgccagggatactgaattatattgactttttaaaaaagcttgattgaggtgtaatttgcatataataaaactcatccattgtaaatgtataattgcatgatttttagtaaatttataaatttttaatcaatattacagtgtaattttggaagtttcattacttgaaaaacttctttcatgctcatttgcagttaatccccacttctacctctaatcctaagtaaccactgatcttctttgtatcttgacaaatttacctttcctgggcatttaatgtaaatgtagtgatatgatacatggctttttgcatccagcctcttgcttagcataaggtttgaggaccaaccatgttgtagcatatatcagtgttttgctcctttttgtggctgggtattattccattatatggatatacaacatattgtctgtatccacaagttgatggacatttagattgtttccaccttttggttattataagtatatccagctatgaacattcatgtacatgcctctgtgtggatgtttatttttgtaattcttgaacagatttctaagagaggatttgctgtgtcatgtggcaagtttctgtttaactttttttaaaattgtcaaactgttcttgatcgtggctgttttattttacgttccctccaataatgtacagtagtcctttcttatccacagtttcacttacctgaggtcaattgaggtctgaaaatattaaatggaaaattccagaaataaacagtccataagtttttaattgtgtgccgttctgagtagcatgatgaaatcccacactctcctgcttcgtcctgtccagaacgtgaatcatccctctgtccagcagatccacactgtatgcactgcccacctggtagtcacttaggagccatccaggttatcagattgaccatcccagtatcacagtgcttgtgttcaagtaatccttatttcacttaacaatggcaaagtagtaattctggcaattcatatatgccaaagagaaaccataaagtgcttcctttaagtgaaaaggtgacagttctcaacttaataagaaaagaaaaaaaaacatatgctgaactttatcatgttcgtcttatggcaaactttttcataggtatgtatgtataagaaaaaacataatactgataggatacagtactatctgtggtttcaggtatccagggataagggagattactgtgtatgcatttcagtttctccatatattcaccaatgcttagtatggggtctttttgatcatatcccggctagcagatttaaagtggtatctcattgtggttttaatttgtatgtttgtagtgatactgagatatttttcatgtttctattatatgtaattcataagtcttatttagagaaaaatctatctcaagtcttttgccatatttttaattgtgttttctttttattattgagttgtaagaattc

SEQ ID NO: 86 - DNA, 156250 bp, Homo sapiens
gaattccatcttttcattcacctatttcttgaaaagttcatgttctcaggctctgtatttccttaacaatcttcttccctttgcttttatgtatgcatcaggtgagaggtgaggtctgttgaggactcactcaggcgctcaggtcattctccctgtggaccaccatggtcaggaatcatggcggacaggatgcgggactccagattctgagtctgcacctggaaaggggctgacctgccatggaggctcctggtattccctcattgggctttcaatagcatttctcctcttatcctatcaggatggtacaagctgattctcagaagggagaatggagaaaaaatacgttgcaattacttcaaggactgtaagtagactgcatgtatggcaatatgctgtcagatatccatagtactaaaggtataaataggagaaaatctttgaaactccggatttttcatcattaatttgttgtttgaaagtttcaaagaagtgagagaggacttttacagttttacagttttatattttgtttcattattttttgaaagttcccaaccacccaatgattaatcatggaataaacataaaataattgtcaatcattatttcttatttattaatttctgaggggtattattatggttatttcctttaccgatgcaggaagcatgtattatctttcttcttaactatctaatcctattttactcaggatttttagttttctttgcagaaccctgaaagacaagatctccaaagcatagcccccatcctgagatcccccactgtgcctaggagctgggttccactgcacagtgcttgttttgtcccagcactgagccctgagtgtgaagtgagctgcatgctcttcctctaggacacaggatttatactttcatctctcatataccccaaacaggtgattgtttacttacagatctacttacttgtccctagatttcttcaggatggcctcaggtgcgaataaaaagcacacagttactatgtttgacagatcactctaactttgaaaacctccaatgctcatgaaccaaatgggaaaataatgataacagcagggaatatctatgtaaaatatatactgcttcctactttcattctgaaccagttactagaaatctctacgtagcgaattactagacagatgaattttgctctaagccacccactctgtattttcagagttcccagatatcctaatgttgtaggaaatagtgtcaaaatgtccctaatttggatcctaattgctgacactgatatgggattgggggagggaagtgcagggaaaggaaggacgtggtccctgtcgagggccccactcccaggcctgtgcccacggacctaggtgaggacaggcactcctgcctccacgcccaaatgttgcatttcccaagaccaccctggcccgccacgcctccatcttgtgcctataaaacccctgagaccctagtgggcacacacacaagtggctggacatcgagaggaacactaatgtggaaaagcacacctacagagactggcgggctgcaggccatcgactggcagaacaaagcagagtttggcgagactggcgggctgcaggccatcgactggcagaacaaagcagagtttggcggggtggttggaggaaagcctggccgctgagcagtcaactccaggggaaaaccaccttcccactccatctcccgtctggctcccccatctgctaagagctacttccactcaataaaaccttgcactcggccaggcgcggtggctcacacctgtaatcccagcactttgggaggccgaggtgggcagatcacgaggtcaggagttcgagacaatcctggctaacacggtgaaaccccgtctctactaaaaatacaaaaaattagccaggcatggtggggggcgcctgtagtcccagctactcgggagactgcccaggagaatggcgtgaacccgggaggcggagcttgcgtgagccgagattgcgccactgcactccagcccaggcgacaaagcgagactccgtctcaaaacaaaaacaaaaataaaaaacttgcactcattctccaagcccacatgttatccaattctttcagtacaccaaggcaagaaacccagggatacagaaagccctccgtccttgcaataaggcagggggtctaattgagctggctaaagcaagtcacctatggacagccaaactaaaaggacaccttgtaacacaggcccactggggcctcaggagttataagcattcacccctagacactgctgtggggtcggagccccacaacctgcacgtgtgcatgctccccctagaggtttgaggagaggggcaccaagaagggagccacatccttatcgcacgccctgagagggaacaagaaaacttttcccgtttggacaccatgaatcaccaatgtgattctgcacaccaagggagcagaatctaagatgtcttcctgcaacattccagaagagctgcagggagggcaggctccggctgggcacccagctgagcaaaccgctgtggttgcccacatggagaaggatgtggacaggcacagactcggagatagtttctgtgtaggttatcttgacaactctaacactgtggtgcctaatccagcaggcacagtggtacaccacctcatcttctttctctaagaactttattttcaaagtggaagtggaagtgtgagcatttttacttacctcaagtttcttagtcttcccacctgagcaatcttgagcagagattgtcaagaagacatgtaataaatattctaagcctttgtttggtttctgccagtaccagtgtatgattttactgctaaagccttggatggatgccttccaagatatgtgggcactcttatttgctggtctggaaatagatatttcaggttgttccaactgcccaagtgcaattgcaagtgaagagaaattcccataagccaacgatacgtgaagaggtaataatacagaatgacttcaatctcttctgtagactgaaatgattagggggcaactcacaaacccagagggagaagaagataacagctactaccagtggcatgctttctgccagtctggttccccagggagaaggtaaccctgttcactggaggtctcaagtcagtggcagaaggcggggctgttgaggtctctcagaagtactagatgaggtggttccttagggttcttcatgagctgctacagttatgagcagttccagggtttcctgcatcccatgagtgctgggcagatcgggtaagtgggttaactatctggaaagaaatacctagtatgaatgtgtacctctaggggtggggcagggatgttctcttgcccactctcccattccccagcagtaccatattgcagaaatatggctttgaaaatgtgaagataaacctgcagtgttctgtcccaatgactatctttctgtaattagctgttaattcagaactgcagtaagaaacttgacaagcatctaatatccatttacaacttgctacttgtctagatgttttcttatattattttacttgatcctctcaacagtcctgtgcagtaagttttatgattatctccatgtgtcaaatgaggacaacggcaaacagagtttgagtgactcattcaaaaacacagagctggtaaacataagaactcaggtgagtagcagtcatccgttaaggaaaatctgagtaaaatgagatataaaaattgacaacaaaaggcacccatcatttacttttcctttgaatttttctcaacatatttatggttggaaatagaatagcttggtattgttcattgcagcactattcacggtagcaaagacatggtattaacccaaatgcccatcaatgatagattggataaagaaattatggtacatatataccatggagtactatgcagccataaaatggaaggagatcatgtccttcacaggaaaacggatgagctgaaagccattatcctcagcaaactaatgcaggaacagaaagccaaacactgcatgtccgcatttataagtgggagcttaatgatgagaacacatggacacagggagagaaacaacacacactggggcctattggcgggcagggtgtggggaaggatagcattaggaaaaatagctaatgcatgctgggctcagtacctaggtgatgggttgataggtgcaacaaaccacacagcacacgtttacctatgtaacaaacatgcacatcctgcacatgtacctcagaacttaaaagttaaaaatttttaaaaaagaaatagaatggcttggtattatttatacatatgatatatgtatatatttcggtgggatttacatatttggctttatactctcttattttggttactttattatcatgagcaatactgcaggtcttgagtctatgtgcacattatttttagtgaccgaatacaattaaacactcctataccacttaaccctatagaatgtgggctgagttatttaagctcttgggcctcagtttctacatgtgtaccttgcctacatatatatcttctagaggtactaaggggcttatattatcgtgttacacaatggtaatgcataaaatactcagatatcagtacctggcacagcatgagtccttaatgacgttatcgtgtcttagtattactaccaaacaagagaaaattactttgttaagtatatcttacaacaaagccttagtatctcacttaagaaaatatataaaaattagtaaaagtacatagaataatttaaataattattccctcgggaataattattctaaaattttggataatttctttctgtttttaaaaaattattctatcaacacagacatttatatttttaagaggttttgtacacttcaagaacttttctttacattgtattgtgaagatgtttgaattttattaataaatgcatacaatatcattttcacaggctgcatagtattctgtcatttgaatgcactatgaatctagtatctctttctctgtttctcaccatttagtctgatgcctgaaaggctgcaggagagctctgctctatgatctggacacagggatctggcagtggatacctcattgctgctctctgaggctgttttgagtagtagatgagacaaccacgagaagagggtgacacaagtatttccgcaagcctgtctatgcatccctgtctgaaaacagcttatcctctcagattcgctgtgtttttcctcagatcttactgtctactttagctaatattaaagttaacaagtaaaggcccatataggttcaagaaaccaagtgtggcccaccctgagggaatatgatggtcaggaattacacagacaggatgtggatcacaaaaggctgagtgcatcggggtgggaggataaaggatgacggattgtctgattccagccccaggtcagcctttcctggaaccccctttatttccttcagtagccttcctggctccttggaaaaggggatgatgaggatgaatatgttgtcctgaccttggaaattatcgaataagtaagacaacacgtggcacgaatgcaaggtggtatctatatttttccatgggggtgcctagtatgtactgctataggaaaagtacatggattaaaggtattcttcatttctttctcaattattttagagatggcatcataaaataatcgaatttgtatcactttatattttgaaaaaatggataatttattggtatttcacttattcaacaaggattcctaattgctcaaattctggtcacctgattcagttcaaaataataattgtgccagtaaatgttttacagaagttgtcagtattgtcttctccatgggagtaggaacaatgtacttctctttacccttctgtgactgaggagtacagactctggagccagactagctgggtccaatcctacactgccatgaaccagctgtgtgacctggatgagtggctaggacaaatagatctcacttacctgagtaaaatgcacttctgttcataacagaacagacctcagaggttgccagaggttaaaggagttaataaatgcaaagtatggctcatttaacagtccgatgcctggggctcttttctgatgatatcacactgtcacaccccttagtgtgaagtgaggaaccatcttcttctctacagaaaaaagacacttgctccaccccaaagtcacctcaaagagtctgttgtacaactgtgacttttagatattcaaggtggcctcatgatccagttttaaaaaacaaaaaacatgcacttctcaacttcgaccagtcattttgaacttgtaagctttaatttctttattaaaatgggcaaataatagttctgttgcagaggtgttgaaataattatatatgggattcctatacacaacgattctctcccttggcctaagccgtttgcagttaatagaattatctggatgctgacaggaatgggaccttagcctgtgtccactcattcccaggccaaaccttaattcattaggaagtagtgttcaatgaatatctgggaacgtcatgatcaggcatgcttcctgcttaaagcattaacccaagatggcttcccagaaagatccagaagtgccgcagagaaggcaaggctgagggtgggagcccagctaggagtccatagagtttgctcccatgggaaggatgtggttgggcagagacccaacagaggttgttgtgtgggacagtgtggcactgatgctgtgggtcctaagcagtgcagtagtaaatggcctcatcttcctttcctatgaagtttatggtaaagactgaagtagacatttgaaaatttgttcttgcctcaagtttcttgtttttctcacctaagcaaactcgaactggggcttgttattgaagtgatatttgtcagatggctcataatttagattcagtttctgctggtaccagtgtataactatatttacaaagtcttcagtggacaccacacaagatacctagacacttttatctgttgctctgttgacaaaaatgtagttgacattttttattgctttaaatttaacttaccaagttcaactgcaaacaaaaaagagaaatccccatgaacctgggacatagaaagaggaaatgataatgaaacactttcatctggccaggtgtggtggctcatgactgtaatcacagtactttgggaggccaaggagggcagatcacatgaggccaggagatcgagaccagcctgaccaacatggcaaaaccctgcctctactaaaaataaaaaaataagctaggcacagtggcgcatgcctgtaatcttagctactttggaggctgaagcacaagagagaattgcttgaacccaggaggcagaggttgaagtgagctgagatcacaccactgcactccagcctgggtgaaagaacgagactgtcttaaaataaaagaaaaaaagaatcactttcatctctcatctatgttgaaataattgaggagcaactcaccgctgcagagggagaaaaatatgaatattctcagcagggacatcctgctgtctgctgagccatatccccaggagaaggaccctggttgctggctggccccagtcagtggggagacagcatggcatgacttggtgagagagaaaaatgtggtgggtcaggtgccctctggggacttcatggcctactgaagagctgagcagttcccaggagcattacactgaccactgacggggtgtagggtgcattacctgacaagaatgtgtctgtggaaagggatgggagcagctctggagttgaactaattctgcttcaaacttagctgttctctccttgattttcagactgtacaatatttttccagatatataagcatataactttctttacctcacgtaaaaattgatccctctgttaatgttttggggatgcaggactcaggagtataaaacatggacagtattttacaattttaaaaaaggcaaactgaaattttacactagcattattcatacctcatttaaaaagctatagtcatttctgtttgaaatacagtaaagtatttggtttataattaattgggatgtcacaatgcagattataactcagagaaatccaatttcacttataaagagggtgcacctcaagaggaaacttgattgaaattgctggagggaccgacagggcagtctgtgggaactcaccttggacttcagaactatctcatgaacactatgtcacagagaggggtgtttttaaataaagttcatttttatgtgtaatcataagcctttaaaattaacgttatatcaaacatctattgtagacttgctaacattgttctaaacgttttcttccattacttccttcacacttctcaccagcgttgagaggcagtggtattattatctctctctgatagacaagaacagtgtggcacgcatgacgtcccagatcacaaagttggtaaacatgggagcttggataactacccaatcctcactgaagaaaacctgaccaaatgttgcaaaatgatgaaaatattttgagaagactctagtagaacattaattagttaattaaaataaagaaaataagagcaatcagaatttacttttaagcatgttctctacacatttgtagatagtaatatatttgtttggatcattacacaggatcacaggattaaattttttttttcttttagacagagtcttgctctgtcacccagactggagtacagtggcacgatctcggctcacagcaacctccacttcccggattcaagcaattctcctgcctcagcctcctgagtagctgggaccacaggcgtgcaccaccacacccggctaatttttgtatttttagtagaaacgtgttttactatattggccaggctggtttcaaactccttacctcgtgatccgcccaccctggcctcccaaagtgctgggatttcaggcgtgaaccactgcacccagccatgattaaacgttttttaatgggttttacatttacagttttatattctgatcttttaattttatatttaaaaatatatcaggtccttcaaaagctcatctgaatattactattaatgacctatgacaatatgcacccttctagactacttaccctatctaacatcagctgagttatttgaaatctttaggtctcagttctacatctataagtgcctaaatggcttccagagacttaagaaatttacatgatcacataataatgataatgaacatgaagtatagataacagtacctgtcacgtacctagatatggaaaacccaaatttcttatgtttttatattgaaaagtcaatcggtggccgggtgcagtggctcacgcctgtaatcccagcactttgggaggccaaggctggcggatcacgaagtcaagagatcgagacaatcctggctaacacagtgaaaccccgtctctactaaaaatacaaaaaattagctgggcgtggtggcgggcgccagtagtcccagctactcgggaggctgaggcaggagaatggggtcaacccgggaggcggagcttgcagtgagtggagatggcgccactgcactccagcctgggcgacagagcgagactcagtctcaaaaaaaaaaaaaaagaaagaaaagtcatttggtactttattggcattttacttgttctctgaatacacctaatcactggaaccctgggcacaagtttcagcacacggtagtaatgtgtgtcagttactgttccatgatggtcagttctgtctcctccatggggacaggaacaatgtgtcttttcttttatactcctgtgattcagaagcagtttagtgtcatattcaagaggaaccagattacctgggtccctccctaggctgtcctgccacctatcagctctgtgatttggacaagtgcatgaactaatactccacttatttcaggagttagatatgtttgatgagaacaacagagcagacactataggtagtgtgggttaaaggagctaatatatgcaaagaattgagaacactgtagagaacttacacacacacacacacacacacacacacacacacgatacaattctctcttcctttacaggtaagaccaaaggttattccaacatgaagggtctcatccaatggcccctgggatgacttggagctctattctgacgatctcatgcaggcaaattctcctccctacccctcccagaaaaaagggcacttactccttcccgaatttatcccagatatcctagcatttacttagagaattgcaatccttaaactgttcggtgtggtctcatagaccagctcaaagacatgacttgtctggcagatcatgcaacctcagttctctaagctttcatttctttcattgtaaactgggccagtgatagttatattgcaggggggttgtcttgactgtacgtaataaggatccctgtctcaactgcaccttgctacttactggaagtctctaggtggtgatatgatggacagtggcacgacctatgttctctcagtccccagacaagtctttaatgcattaagaaacagtgtcaaataaagattctggagcacaagtcctgggatcaggtgggaacgaaggtataacccataacagcttcctggaaagccccggaagagcctcagagaaggcgagcctgagtctgggagcccagctggggactggctgtggttgcccctgttgggaaggatgtggtgggcacagaccctgggaggggattttgtgcatgttgtttcaacagttctagtatggtgtaatcccacgcagcacagtagtaaacggccatgtcttctttctctacggacttgatggtaaggattgaagtgagagtttgagaattctttcttgcctccactttgttgcttgtcttacccatgctgcgtcgagctgcggattttgttgagacaatatagatcaggtgctccaaagcctgatttggtttctgccggtaccagtgaatgacatctgtttcaaaccttgtgctcgatatcttgcaaggtatgtcaatacttttcttgacttccgtggaaatggatagctggaactgctccacttttgataatccaagtccaactgtaagtaaaagaggagaatttccaatgaacatctgacagtagaagagggaaacattgaagaatgattttggtcacgcagctagactgaaatgttcggacagcaactcaggagcccaggaggagaaggcaaatgcttccagcagtgacatcctgtcttcggggcggtgtacccaaggagaaggcaggaaagtgcggacctggtggctagacgactctggtcaggttctggagggtgtggcctgaactggggagagaaagaaaatggttttttgggcccttcagtgcctcctgcaggctcagcactgagcccccctcctgctcaccctgcttatctcaaatcaggctagcaatctcgatggtgttctctgcacgaatgtgagggggccatgggggttgcttaatttctgtggaaatgagaaggatttctaattgcctaggagttgttcgtgaacacttttcctcagcataatattttaaattgttgcatatttaataaacattaacttttataatagcaaatacttattgagcattttctatttgctagccttttttttttctaaacgtttttcaccttctaatcttcacaatgatcacttaatatgggtacttggaattttcattttttggatgagggaatgaggcacagagtcatcaactccacagaagtcacacagctgataggtagaacatgctggtaacagtgctcattgaagaaactcagagcaatggggaaagataacaataaaaacatctacggtcatatcacaaaggcccactactattcacattatcatatgctcacttgtagatattttcattttggatacatgaatattaatatgattttatggactatagatatatttacatgtatagtgttctgtattctttcagttcagcttatattctgagcaacttcccatgtcattggagaattttttctttacatatattttttgagacaagatcttgttctgtcacccaccctggagtgcagtggcacactcatggctcactgcagcctcaacctctgaggctcaagcaatcctttcatccccagcctcttgagtaactgggaatacaggtgcacaccaccatgcctggctaattttgtattttttgtagagacggggtttcaccatgttgcccaggctggcctccgacttctgagctcaagcagtccacccacctcagcttcccaaagtgctgggattacaggcgtgagccactgcacccaaccaaaacatgttttaatgtctaactgttcatctttatcacataggggctgtctgaccctgtgcaaacttcttaatctctttgtgcctcaaatctctcatctgaaaatggatacaataataacactggtattaaaattttatgcagactaaatagctaagtacacctagtatagttcctgacatatagtaaattttcagtaattattagatattattactactactcctaccactacatttttatctcccctccacttcttatttttatttttgtagagatagggtcttgctatgttggccaggctggagtgcagtggtgtgatcatggctcactgcagccttgaattcctgggctcaagccaccctcctgcctcagcctcttgagtagctaggacaacaggcatgcaccacaatgcacagtttccctccacttccagccatttaatttccccaacagctttcattgttaaaatgctttgctgactgttttgaagtagtaacctggctaaatcaagggaaaacagtcaaatattgttagtacttcatttttccacattacagaacttctcttttcctccattcagctccattttatgatttccatgtggctttcttggagatcttctggtgcctcagggctcacttaaccttggacagtggttgtccctgtcacttttgtccagctctggctcgtgttttgtgggacaggtatgaactccgacagcttgggtcctccctaggagacaggagaggaagcagctggctcggatggctcctcctaaagcagttgccctgttcaccctcttttctgaaaaatactgtttttgagacactcaatgctggggagtcgaatattgaggaggtggaggtcagcagaccaatgggcctgtggctacaactagaaggactcactcttcccctgcacaggatgtgtcctgggaatgggaagtaagagagagcgcccatgctgcagattgagccagtctgcagggcccggcttagagccctggtgctgccacagccagggcagccacggccacgctggaactcactaggcaccctgcacactccatccctgccagacagttccttccagaccctgcaactccagcagccgtgtgtgtgtgtgtgtgtgtgtgtgtgtgtgtgtgtgtgtgtgtgtgtaatggaggggttgtgaggagtgtatctaattgctggagtccatagtctacctgactacctggaataaaggctgagaaaatgcatcaggcattcttcttttctgtagagggagatgaattcattcactcaccaaaacccatgaggtgaaaattccctaaacacaggaaagcgttactaggagtcaagaagaaagacaaatggacacttttaagacacttttttgtttggttttttatttgttttttcaaacaaataaagtgaacaaaggcagaatttatattattgaaaacattgtcagaaaacagatactcacttttcataatattaatagtttgcattaattgaaggcattgtctgtagcaggctctgtgctgcaagcaactttttccattatctattaagtgaggattcttattattgttcccattttctaggtgggaaaatagaagctttgacctagcaggcattttattcaagatcaaggcatttttacagagcaggcattttgttcaagtatgcactttgttctggcaggagttaagtgacaggacagtaatttgcgacagagggtctaactctagaacttgtgtgcttaatgaaaccttttatttctcccaaatatatcaattatacagatatatgtatacacaaacatatatatgtacataatgtacttgtgcatgaataaatttattcttcttttctgttgcagatataaatatttctgattgtgccattttgattacccaactaggaaaagagacagagagacagagaataacataggcttttgaatgaacacctgaaatatcaaaagagcacattaaattcttttttaaaagtttctcacataatttgagcaaagagaaaagcaatctcaatagctcagaggaaattgcagaagattgctggtaaccaggcatcttgtctacccagtctttgcctccgaggacaggccagaggcttcaggtcagtgtcaggtgtgtgtgattgttggtgttaggaaaggaggtaaatggttcaagcagggactgccattccatgccactcatgaggtttcagatatgtctggataacattagccaggctgcaacaacaacaaacccaccagttcatttataaataattagatagataaacaacaggaagatagagatagagacagagaagagatggaggtgaaggtggaggtggaggcggaggtagagataagtgtatctagtgaagattgcaatatcagcaatgtccctgagggaaagttttccttaattaattatccaaaccatttcacacaagggaatgtagacaaaagtgaaattaaataacaaatactggtaatgagtacttacttgagacctttctctactctaggtttgatgctcagcattttgtatttattatctcaactaatcctcacaagcgtcactggagtgggcactaccatctctgcaacacagagagtcaaagctgtgtcttcacagtcaaagctgaagatgctcaggttgactcaagccctctgactccagagtctgtgctccttgacttcacaccatggtgtcacttgtgcgaatgactttttttcatgacttttttttcatcagtttttctcaaggctctggaatgtaatgtctggtggctgaattcaaacattattttcattagttctttaatgattatttttgtgtaaactaattttgtgtttccatggggttaggaagcttcatagattcaatttatttaaattgaatctatcttgtctgtgtggttctatcacgaattacctcctaaacagcacccccactctgcagagcacaaataaggcttccttttactaattaacaaaaggcatgcccttaggcagaataattagacaaagacacctttctccagcatgtcacagcccaactccagagtgtgcagggggtgggtgtaagatgggatttttggctcccacgggcgcccctcacccaagtgactttgagcagggcacagccacccagctaactttgagcagggcacagtggtggaacacgcacacgctatcattcaacgcagaggggaaatgtacacaacctatacctgtcgtctcttgctcgttctgatattgtggggaggcactaaacttaccaacttaaaatagtttccaccaggttagagcagcctctttcagacgggctcggtctctttgtggtgcctgcttaggcttttctgcgtttctctgtcttcctccttctcatccccaggatgacatctctacacaggggcagggtgtgtgagtgagttctcagaggtgtcttcctgctactctctgcatcctcgacaacttccagcattttgccctgctgatcttggggatttcactcttcctctgaaccggctgatgtaaaaaaccagactgaacttgccactattgactccacaccatgcccttggggtgcaaagttcccttcctgcagcttctcatccaaatcccaggtgctgtgccctctggccccctcagtagctttgtatcctctcagagaccctgagaagcatctgggccttctacatggacagcctgtgtggaaaggggtgctggtttgggctcacctttgcaaatgccttccactgttgatgaagttctaccagggctgtattagggaagcttgacaggagacagacactcgcagattctccttcttctatcttgagtttctgttgggctttctatcccctctggcataagaccctcagacgcaagggaaccgggaagtacctccacataatgctctactcctctctctccccccaccggctcgcacttcccagccagaaggaacagcgcttctccctgggaaggtattaacgtcaccgatatcatatgctgagtcttcatatctagcagctgtaataaaattctgtgttgttactttgccagtgtggccttttgacctatgaatgagagaatcacaactatagaaaactctttaaaaaaaaattgaacctgattttcaagcccaacatctcacaattaattcaaaaagtgagtttgtggcaggctgtggtggcttacgcctgtaatcccagcactttaggaggctgaggcgggcgtatcacgaggtcaggagattgagaccatcctggctaacacggtgaaaccccgtctctgctaaaaacaaacaaacaaaaaaaaattagccaggcgtggtggcgggcgcctgtgcgctgcactctagcctgggcgacagagtaacacttcatctcaaaaaaaaaaaaaaaaaaaaaaaaaagtgagtttgttctgggcaactaccatctctttctatgggtagtaaatatcatggattagctacaataaagaaaggacaaaaggtgacatgatttattttagagaataaaaatatgttggccacatttccaaaacatgatcctcattacacattttgatcatttacttaagtctgggctgtgaggttttgatccctctccaggtatcccacccatgatattatctgctaaagcaagttcacaagaacagagagggttttctgttttcttagccttttcccctccagtgagaagaagggtcctaaggcagaatgccggtggggagcagggtgggggtggggtggggggtgggaactcttccaaatgtgtgttcagcatgaccctttagccatggcttcttgagtcactgcccattctgtcttgagtcactgcccattctgtcttgacctagctctgcaggactaggcagtaagtccgggccagcgcataattacccacaaatgccacagttcattcctataaagttttgtttgtttgtttttgagacagagtcttgctctgtatcccaggctggagtgcagtgctgcaatcttgtctctctgcaacctctgcctcctgggctcaagtgatcctcccacctcagcttccggaatagctgagactacaggcaagctccaccacacctggttaatttttgtgtttttgtagagatggagtttcaccatgttgcccaggctggtcttgaattcctgaggacaaatgatctgcctgcctcagcctctgaaagcgctggaattataagcctgagccactgcccctggccctatttccattaagttaataaacccaaagggtattcaaagtggcccaatagtgcacttgaaagagcatgaactatttgtttggacagataactgcccctgtctaaacatcagttatttctttcatgaataagtttatttaccaggttcttatgacaatcacctgaaattctgaatatgtagaacatctatcccattttctggcagccagtgggaactgagtggatatgaattccatcttgttccttgctggcatcttcaccctgagcaattcaccatgactagaagtttctaagaaatgatataatggaccttgctttctctctgaaataatcatgcagtttcaacaaacatagtctctaaataggaacctaagtcaataggaaatgatgtcaaatcagacacttgggggtataggtactggcatttgtggggtgaaattgatagtcatcagactccctttctggtttcctgtgatcacagaggcatcatctgaggaacacaggaagtgctgcaagctgaggctgaggcctagctggggcagagggctggacgaggctcttccacattgggaaggatgtggtcgcagacatgataatggggcaagtgcccattacctcagctccaatgtcatgctagtttcctgggggccattatattgggtcatcatgtctttctatttttctaggaattttatattaagaactaaagggaagtagacagaattttatatagagaatttatatacagaattttatatatggttgcagctctttgcctgtaattgacctggaacagggtttttttccaagtaaatatcaaatcctcaaaagcctgatttggtgttggtcagtacctgagtgtgtatgaaaagttctatctaaataccctacagtgaaaatatatgcttcatttctgctaatgaaataaagatttttacttgcttcaattgtttttacccaatttcaattagaaacaaaatagcattttcaatgaaaccaaagttatcaagaaatgagacattcattttcaaaaaaatccctcagccaatctgagaagtaggagaacaagttcacattcccagagtgaagaacaggtgcatatctgtagctgtgacgtcccgtctgctcaggctgagtgcctgagacaaggctgaggaaatagggaacctggagcaggagaagctgcaccaggatgaggaaggggaacctcaaagagtgttcacagagaaaatgggtgtccttaggccctgcgcccagatcagtcatttctgaggttgctgattggtcaggatcacatgggaactttacccatagctgtatgacaccatgataatcagtccatttgccagggtaaaagttattcaccttgttatcttgctaactcttagaaacttttagaaagattctttttcattattattatttcatcatgattatctaactgatttcaggggagagttggtccaagttaccacgtgggctatgacctgaagccacctgtccacttttccaggtgagagtcctcactggtttatctggccaccaaacgctcacggcacagacccaacacttccatgacccacacacagggctctgctctggacccatggtggatgtaggacctgagagtcctatttggtgtggaagtagaagagctacctcatcacctcctcactgggagaggagggggtttccagggaaatcccaacagtgcttttcagagaaagtctttgcaaaattagagtccccaggaaagctcttactgtaattagcctggatatagctcatgagccaaaggttggagtcatcagttttgtctacctcttagcaagtctttgagaaatatggccaactaccccagggtttctcagcctctgcattattgacattttgggctggataattctttgttgtggggctgtcctgtgcattgtaggatgtttagtaacacttctggcctctactcactagataccagtagcattctcactctgtttgtgacagtaaaaaatgtctcagacattaccaatgtctgctggagaggggcttgccctccactgtgaatctctggttttgtccccttcttttgtattactaccattctcctgagcttagagtgtcagcggagattgggacaaaatgaaactcccactgaatatccagtatgtaaaaattctcatcatttaatgagcaatatcacttaatcttctttgccaccatctattttcttgaggaattggagtggatgttacaacaaatacctctatcactcagcatatagcactgcagctttgctagaccacttgttacctgctactttcatataacacatgctagatttcgtttttgttaagtcaaagtcataagttgtagggattgttaaagccccttatttcatcaagaaggatgccttccctatagtgggagctccataaatattgactatccttaggagataattcatatgagaaatcatattagaatgaatgaaaatgtgtttaaaaaaaactataactctttactttgttatggtgtctacaatttccaaaactcttttacaaacattggcttatttaatccaaacaatattttgaggcaggaagggattccccatggggaagagggggtaatgtaaggcctctcagctagtaaatggtagagctggaactaaaacctatttcttcaatgccaagcaaatccacgtagtgtgctatacaggcgagcatgcaatcattcagtcctgcttttaattccagttcagcctgctgttagcttgacttgttgctatctgacacccagtgccctcaactatgaaaatgaaattgaaatccctatctaccagcattggcttagataggtgcataatacgcctggaataaagtgggagctcagtgggttccatatctttcacctccttcctctctactctgcctccttgttgaagcaggatgagcacagagctactgttaggaggcctagtttggctttggggtatgctctttttcttaggattttagttccttgacttgaatgacaataaataacatctctagacagaggaattccccatcatgaggtgtggtggggctctcagcattgccctttaagtggaggctttttgtggtggggcctcacgaccagtcgtcgggctgctgcacccatcctcttcccccagagaggttccccacatccacgccccacctcgcagcaaacatgggcaaggaggaaactggctgcaaatgtcccatttatcctgtacctgaggaggtggtaaaaattaattcactgaagagtttgatttaaaaaaatgaagttctataaataacaacatacctataaatttgggatgctttttcctaaaatatgtcctttcgatattagaaaatgtgatgatgacaaaagctagtttttactgttgcaaccagactgtgacaaaaatgaactttctccttttcttgtttggcaagacttttacttgaatcttctggctctatgaagccttcccagtgatccattaacttcttccttctcagaacatttatctatgtcatggaatcaaggactcattagtttcattttttcctttgaagaacaagtgaatggtatagtggtattcctattgatattcactcaaaagagtcgggctgtttgattgctgcattatgtttcatccagcaaactggaagtcttcctgcttcaacctttttctttaaaggaccaaattcccaacttgggtacgcttacaggaacacattccacatccttgtgaatatacagagaagtctgagcccctcttccctcccttgtcatttattccagttcttgctgggtgagtgtggtgtggtgggaagagagtaagtcttatggaccgtcacacttgctctacatcccttctctgctactagtgatgcctgcgtgatcttggaggctacagagtctctctgaatctctggttcctcctctgagaaaggagatgacaatatttaagtgagaaaagcatgtaaagttcccagcctgacactgacttggccctctgcccatccaggccctccctgggcagccaggcaggaagcagaacatgatgtggccatctcaggccaggctgcagttgggtctcagcctttccaccctttcccatccacctttggataacatttctgtgctccccagcggactgagggtaagggagtgcagcggaaaggtgataatcagggggaatatctctgtgttccatctcgctgcttttctgttgctcaataaacacagttttggttacgcttttttttcttgttaaaaaaagaaaaaaatcttagaacccagaagtcagaaaaacttgattgcataagaaaattctctgtagagaattctctgcagattgtctgtaagtaaacaccgttagcatcaatttaactaacttcatgtgaccctggggaaaggagcttaaggccgcaaatgaaaaaaaaaaaactcataaaacgaattataaatttttttatttccccctgaaatgtctctatttaaaagttcgtgtttggttttgtttttctcatcactgtaggagatcaaggcaatagattttgtagtcagacagacctggattcagatcccagcctcgctgcttactatcaagtatcttaatttatcaaagtctcaaatctgtacttagaaaatatctataaagggcatttgtccccgcgacagaaccgctgccgccatcgctgtcatttaagatcgcccgggtccctccgccgccaccatgtctctgggaagccgcagcgcggcggtccgaccacccagccccctcccgccgcgccctctgcccacctgcccccacacagccaccgcctccggcagccgccccatctccgccccttccggccagccgagcctcatggcttagatggcgtccatggccgcaggggtagccgtgggctcggctgtgggacacgtcatgggcagcgccctgacctgagccttcagatgggggagctcggagcccgtccagcctgctgcccagcagacccccacacgcgctgccccccagcccctgcagatggggtcctgcgcctacgagatccggcagttcctggactgttcgaccacgcagagtgacctgtccctgtgtgaaggcttcagcgaggccctgaagcagtgcaagtacaaccatggtctgagctccctgctctgaagaggttggtgcagactggggggccagccctgcacccacctctaccctttgccgacagctggaccacaacaccagattgtaccagatggctgggattggaagtgtggaggtttctcaccccacgaataacccaagacacaaacgtgcaaataaaagagtttattaaaaaaagaaaatatctataaaaatgagataataataatgatagtattttgttaggctcaaatgacataaagcatgcagtataaagtgccatgcacataagaagtactcaataaacaatagctactattactacactcataagaatatttattacattattcattttcacatagaactgagctctttcagagaatagtctgtacatttaattctgtgcatgtaaactcactgatttttctgtttttctgtggctaagcaaagaaaataaggaaagtcagagaaatctgctgacctatggactgcaaattcaaattctgccaatttcagaacacaaatatggagttttgataattactctgtaactttagtttataagtaaaatataaagagaacgggactacagtaaagtatagcacgtgattcaatctctctgaatcccttagcactttgctaatttgctagttaaaagttgacttaaaagtgacaagaaattaaattagggatctacagaagagacacatcaattatagcaacaggggtgaggggataaattctacttgacatgaacgtgacaggcatttctctatcctcaatcatctaatgagagttgagattgtttctctattttaaacttagttgttgtaaagaacactacgagcacaattggattaatcatactatcgattcatgaagcactacaagcataaagcactataatcatttatctaaatgtgtatcacttttatgtttcttatttgagtctactacatgttggtgatttatttaatgagtcaacaaatacctaagactccttcacttaactcaagaacaaaagcattattaataatctacatgctcctccatattaagaaatcaactaaagaagtactaattaatgatgatctctcaagatttgtccagtttcctgtttttttactcaaggaacagtcacacatcctgttctgttggagatgggaccttggtggttttgtggaaagtgaaacaaaactaataaaaccttctggctccctagcttgtcctacttatctgaagtcaaacataatccacttattgggccatctgcaggatttcctccttggctcatccaagtccattttccacataactctgccttaaaagtctgaccgccctgggctgcatggatggtcttccctatcctgcaggtgttgtttgggggtagaaaatggaaacatcagcaggcagctgggaaataggagcgtggggtcagcgttccctccctgaaaaggggccttaagttggctgcatcctccccacattggccaatatgcagtgccatttgccccacagccagagctgatgtccaggatccaagaggtgtgggtaggagtcgccattctcttctatttcagttagctcactgaaaaaagttgtttcttttttcccaagacctttgatctacaggcttgaaaaatcctagtgttccaggaagacatacaagcccaataagctgccttgagcattcaaatcactaacattttctttagctcagcacagtgatcagtaggaaacaggagaaaaggtaagattttgctttttacaagaagcaaacgttgttagagaagaggaaagaaaaagtagtcaagcagagccccttccaggtccttctaaccaacacattttacatattgtctctaggtgctcaataatgtgcagggatatgtttaatattataaaacaggaattctttttttaagtcaattttaaaataaaattaaaaagtaatgtgttttctattagaccatttcaaaagtacagaaatgacacagataaaaatactcatgagcgcaatgtctggagataagcatttcaaagtctgtgccctttttttgtctaccccagtctgcctcttgtgaaccccttcacaggactgaaagcaaaaagcacccgagacaaaacagtcagcatggatttccaggtgggtacagcaacttctagaattgtggtttctataagatgactcctgggcagtagacattactttttccatagtacttgtatgtgtggggagttcggcaacagatgatatggtttatgaaaatattgctttccaagatttccttagattttattcagattttatattaactagataatataatgttgattctattattcagagtcattgtagctcacccacctcaggtagaaaagaaaagaagtcgaacccaaatcatcagaatattcagggcatccatccatacaacgcgttgacccattaggtaaaatgaacccatcaataataatgaaagtatcaatctcaattcaacagatattcattgagcccctactatatgcagtacagtatattctaataagatgctgtcagtgtttctgtgaatccaaaacttaaaccatttaattggcaaatattaacttagagctggtttgcctctggctagttttcctttggtgtggcgaaaatgttcctggtgaagctcaccttaagcaaaaggagaagggcaggaggagtaaaggactatgaatttcgacttgtttttcccctataatggtcatctgcactatgcacaaggccactgtcctgtccagctgtgtgtgagtcaaaggtcttagggaaccatgaccaaaagcttagaattaaattaatctgggataacctcttgtaagagtttcttcatacttagctattctctctataaaatgtaatagccacactatgatagacgtagcactaagccctggatatataaagatgtgtatatgggccaggcgtgttggctcatgcctgtaatcccagcactttgggaggccgaggtggggtgatcacgagctcaggagttcgagaccagcctggccaacatggcgaaaccccatctctactaaagatacaaaaaattagccgggcatggtagtgcgtgcctgtaatcccagctacttggaggctgaggcaagagaatcgcttgaacctgggaggcagaggttgcagtgagccgagatcgcgccattgcactccagcttgggcaacaagagtgaaactccatctcaaaaaaaaaaaaaccagatgtgtgtatgtgtgtgtgtgtgtgtgtgtatgttttcttgtatatatagtcatacgctgaataataatgtttcagtcaaagatggacaaattataatgaaactgccctacacatgtgtagcattttttttatattctatttttactgtaccttttctatgctatgtttaaatacacaaatatttatcagtgttacaatcgcatatagcattcagtacagcaacatgctatgcaggtttgcagcttaggagcaataagctataccatatatcctaggtatgtagtaggctgtaccatgtaggtgtgtgttaagggcactctacaatatctgcacaacaaggacattgccaaaggatgcatttctcaggatgttttcctgtcgttaagggacacatgactatatatgtgtgcttgctgttatttttttgttgtatctagttttgtctcttgtcagataacgctgggctgtcacaatatgccaagcactaggccaaatccttgaaatgcatcatgtcaggagttctcacagccacccatatgataaccacaggaccattgcctcacaggtgaggaaatggggctagagaagctcaaggccttgccacacagcttatccgtggtaagtagagccccatttggacctatgtccttctgacatgacaggcccaggtcttgaccactttgtacattatatgtatactcagataattattgagctgttgaaaaatcaaagtatcagagaaatttgagaagatgagactaaggatcattcatctctgaactctttcccagtggaaatctacttttctctattttatatttgtaagatcacatttcaagaaagggtttcatggcaaaaacataaattaaaacaacaccatcaacaataataaattgcaaagcctgagttgaactagaagtaacgaaaattcataagagacttacaatcatgagttatattcaagttgaggactgccattttagtggtgaatggcagcccagtagcagaatgtggttcaacagaagcaacctcgggcctttgcagagcgtatgggccttgtaatttctgctgtgcataatgcctggctcagagtagtctatcaaaagctcatggttggatgaccaggcacggtggctcacgcctgtaatcccagcactttggaaggctgaggtgggcagatcacgaggtcaggaggagatagagaccatcctggccaacatggcgaaaccccgtctctattaaaaatacaaaaaaattagatgggcgtggtggcacgcacctgtagtctcagctacttgggaaactgaggtagaagaatcgcttgaacccgggaggcagaggttgcagcaaatgaattttttctcaaaccccaatccaaagtggactttgacttagattcgattagtggaagtgtttacggattttgtacaaaatcaaacatcaccactcaaggcatgcatgtgatagatttgtcattgcagtctgccctgctcgtggttagatcatgctgcgtttgttacatgttaacctccagaaaaatgaataccatttaatgtcatatccattttttaatcgagagaaataggaaggtcagagaaaacttatgtaatgcatattgactagtacaaaagaatcacactaaaaatgtgtatatattataccagaaaaaaaatatataatgagtaggagaggttgaaccagaaaaataagcatgggtgacctagaaaagctgttggtgagagagtacaaccctgaaaaagaggaggctggtcacttgtatagacttatgcaaagcttctgctttgagaaaatatgtggaatttggcaactccaagtagagtcaccacatgaatgtttatcttaaaaactgtttacaagcacactggtggtaactgtggcttcccaattcgtaattataaacaaagactcaataaacatttattgaatgggatggctcaaactgtctgctgctgtgcacctcccacaaggcacagtagtaggtagctatgtcctgtttctctacattgtgaatggtgagagtggatgtagacgtttcaggtatcctatccacctcaaatttgcctgacggaatgccggattcctttctgacagtgccgtcatatgaaatggacaccaggaactgtatgacttcaccaggtctctctcgataccaatatacagatgttgcagaaattgttattccagacaccacacattccaggcgggctgtttttgacagcgttttagtactggaaatttgaggttgctctaggtgacctgcaccatatacacacactggggaaaaaaatgggagggagtaaataaaccaagaatttggaatttataaaaatatataacaatagagaatatcagtccaaagtgattgggggagcaaaactacttacgagccccaaggactgccagcgttgatgtgtggagcagtgacagcatgtctgcaggcactgtgctttctgccagggcagcctgaaatcaccgcagagaagcgttagacctctgtggcttggctgagtccaccaagtcaaacttcccatgggtgagggtgacatggggccccctgcatcgttgtaaagcggtgtcctcaccacctgttagcacttccagtctgtgtgaagacagtcctgcaaggtctgcagcctgagatcagaccacatagtttagacggccacctcagaccacaaggcggccaccccagcaagttgtcaggctggtgttgttggttgctggggctgtgacatgcagcattgtcttctgagagcttgtcttcaaccagctggagagatgttggtccgtcaagccgcttagctctgctcagctacccacacagcctgcagcaccgggtccttctggtcaccttcatgaggctgggccctccatcccagtttgtttgcttctgttgaagattcaggttcctgtcccctccctcagctacctgaataatgtacatctcctgaatcccggcttctcctcaatgacagtttcctattgtctgttgttctttctctaagccaagacatttaatccgtcccaaggtatttttacaaactgctctccccagtgcatcccttaaaagctgctgtgttccagatttccatgcttaatttacccactgggagctgcagctcactgccactgcccagcatcgcaagagagtatcataaccttatatcactgtcctggggaaacagcaaaggtcaaattatgttttctaccaaatgcgtgtcacttttgcaccatcataaagtaaaaaaaaatcttaagtcggacctcagttaaatcgaaagctgtctgtacccatatccagctaactcttggacattttcaagtacgtctgacatgggatctcaaacaaagtctgctcatagccagagtgaactcattcccttcccccaaaccatatcttcttccgagttccctgtatgacataactacccacattgcccaagccaggagcttgagcatcagcctcaattctcccctctaattcaccgcactctaattcctgaggattctacgtcctaaacatttcctggctcaccactgcctccacctcacgcacctccatacatcccatctcggcccctcccacccaccttccccatggccactagactgacctggtccttttcctgctctaaagtccttgctctctctaccttgcctctgaagatgaagtccagagttcttaggataagaggttctctgtgatgtggccaccccctccctgtccttccatcttcatttagtcactttctgcctggaattccacgacccacttctatggattgacttgaatttttttgtgtttggactgcattctactccacattccctggctaattcctgtttatccttctgggctcagccccaggcagtcttccccaggaagcttacctcacccagtaagtccaggatggagatgcttcaaattgctttctcttcacgccacctagtgccttcctctctcctagcacctcctacccaagtcttggcctgtttacccatttctctctcattctaaacgacagttaagagttcccaggggagtaagatcatgtgctgtttatctctctattcccaggtgtttgttgaatagatgaaagggtggagtgagggaatggatggccattgtagtatttttttgtcgttctgatgttaacaaaacatcaccatttaaaatacagtttttaaagagttaccaagcaatggacacttagtgaatgccttaatgtgtcaagcagtttgtagccattatgatgtttaataccataaatttagtataatcttcacaaagccctactcaaagcaggtcaggtaatgggtcaaggtttaacagcttgttggtgacagatttaagattaattctatcgggctgcaaagcctgagctctttgagtagttctctctgcctctgttttcttatctaccaaaggagaataaaatcacagcctaccttactggatgttgcaaagaataaatgtttgcccaggtagactgtttagggcaatgcctgacacagagcaagcccttggaaactgatggtgatttctgttatactctcccatgctgccttctgtgaacttgcccctgctcaccagcagcaatgcaccagctatgcccttgtcttgctaagacagactagctgggaggctccctaaagcaagagacgatgagagggaaagaacttgggaccatttctaagaaacaaaacttgaaaagtctggtgatgatgcctctgaaggtgagatcacttaggaaagataaaatcttggtctctaagctggtctatcaccctggaggttgaggctgaaaccaggtagtataattcagagggagattgattttggacattgctgttttctttattttggagatgaggaaactgatggctaggaaatttaagaactcgctcaagctcacagcattcatgaagagtacagcaggtgttggtgaggagtgaaggtggaggtttgtggtggtgaaggttcactgcagtggcagagtctcctcttgaggaaatgaaagatgttgttccataaggaggtgactggggagcttgcgcctccatttggccacaccctgatagtcaccatttcaccaaatttactcttgtttggagtaaagcactgagagagggggcaggcagaagaggaggcatctcctctctgtgcccatttggttttatcagcacaattagaaaaatgaaatgaaggaacaactccaaaacagaatgaaagtttcctcctgtatggcctctgtccttctcacacaagttggaaggccttagccgtgaactgagccttcagtagaggttagagacgctgggctgtttcagaagcaaggcgtagcgttttttttttttatttcttgttgctcagactggagtgcaatggcacgatctcggctcaccacaacccctgcctcctgggtccaagtgattctccttttgttttttatttgtataaatttaaggagtacaagtgcaattttgttacacacatataatgcacagtggtaaagtcttggcttttagtataccccacacctggataatactcattgtgatgtgaaattacttaatttccatctgtattccttctgccccccaccacccttacaagcctccaatgtctggttccacaccctatgtccacttgtacacattatttagctcccacttataagtgagaacatccagtatttgtctttctatttctgagttgtttcactttagataatggcctccagcttcctccatgtttctgcaaaaaacaggacttcattcttttgtatggataagcagtattccattgtgtgtatataccacatttattatggatgaatagtactccactgtgtatatataccacattttctttatccagccatccactaatggacatttaggttgattccatatttttgctattatgaacagtgctgtgataaatatatgaatgcagtctaatataatgatttatttttctttgggtggatatccagttatgggattgctggattgaatggtagttctatttttagttctttgagaaatttccatactgttttctagagaagttgtactaatttacattctcatcaacagtgtattaagcattctcttgaaaaggcatttaaattcagcttagacttcaaagaatttcttttttttctgcacatagagcagcagaggggtttcctgtttggtgctggaggatcagtaacacaggctttctttttttttctttcatttattctatgttaaaaaagactgctttatatgaaggtagtgggcatagtgatcttatgtgtatggctttgctttaatacaaaaatcatagtcatataacttagcagacatttggctaaaccccctcatttgtcagataggagaacaaaagtctagagaagcttgggatacacacgtgttccacactggggtgctgttgaaggagaagtggaaggtaaatgtctcatccagggaggactgcatcaccctgccatggcgactgtctactcacatcagttcctatgcagcccgcccacgggtgaaagtactgagaagtgggcagtcatgtttcccatgcttctaattgctgactctattgcaaaatgataacagtcccagggccaagagcttggaagctggaaacaggagtaggcttctagtctcagcttttcaaccattttgtggtaaatctcagcaagtcctccacccttgaaatctcttccaaaatattttatttgtgcattcttcaggggagatggtcagattcttaaatgatcagtctctaacagcactgtccaacagaaataaatgagtcaccaatgtgagtcacacactttaatttttttagttgctgcattaaaaaaagtaaagagaaacaggtaaaattagttttaatgctattggctttagtccaagatacctaatcatttcaacttttgatcattataagagttatctcacttttaacactaaagcttcaaaatatgattttagacacacagcccatctcagcttggactattgcacttggtatgtttcccatgctcaatagccacaggtggctagtggcacctgcattcaggagcacaggtcatcctgcaaaggcttcagagacactgaactggagcatctttaaacagacccctttcgatgagatatagatcactgagtctgcacaagctgaaagcctcatctgtagtgggaccggggaagggacctccaggatagatggggaggtgagggacaggggataagacttttttcttctatgccacagggaaacccaagggaccaagagtaagtgaaaatgcccaaggccttgttggatcgggaggaagagtccttttgtgtagggctggggcagcatgcaaggctgcgcagggcccaggttgtgcagtagttcatgccctcgatgcctgtctccaacttcagtactgccaagatagagctgctgccatccttggctatgattttatctgctttcaggatggaatcccactgcacatccaacttggacatggccagctggtggagtgcctcagggacctggcccttctgctggtaccagtgggtgtagctgatcctggtgcggaccacgcactgcaggatgaccaagcttccctagtgccccaggacatgggccagctgctccggcctgatgagccaccagccagctgtcagggagagagcagtgaggtagggatgtcccaaagcctcgccacctctacacaggtccttaggtaggagactgacctggaaacaggatgacccaaaggaaggcagggcagcccaccatatctctgatcctgactgggggagaggagcccagagtgacctgtttcaaactatggacctgagccacactttcctgagttatggtagcgaccagcttagggcctgaactgctatttccctggtggtgcaaggaggtaactgatgagagaaatgggggaggaagaaagaagttccagaggagagacagaaatctgaccacaaggtgaagggagggatgaccaatggctagagtgctgaaaaaggcttaaagagtgttgctggtataattagcaataatagcaatcattggttggacaccagcaaaactcttgcactgcactaattggtttagggccattgctttattaaatcctaaaataactctataggacaaatgttatcttcagtttagaaatgaaggagtaaggctgttattttaagtagcttttccaaggctgtaatacctaaagagaatcagagttgggagagaagccaggccaggctggtgacaaatttctgcttcatgtaaccatcttatactcagagaacaatgagtgtgctgcttgctccagaggaagggacaaacacaaaacagcaatccctaaaaaaacccatgccaaccgtctgagccagcatcggagcgtgtcacccagaggtcctagtagaaggagattttcagtgccctaaaataacatgatagctgtgtagtcttgggcaagttgtttcacctctttttcctcatctgtaaagagaggtgtcatagggccacatggacagtaaacaggagaatgtgagcagagcacgcagcacaatcccagctgcatagaccatgctcaagaaatgtggggtgttgttgtttcacctggaaactggatgggttccagtaaatgatctctggggttcacacaaagtagaaattatagggactaatgcagttttcaagaaccaggtgtgtgcgtgcgtgtgtgtgagtgtgtgtgtgtctccaaaggaagaaggctaagtcaggccagcagacagagagggcctggaggcaggaccagctcatcctctgccagtggcacgtccttggaaatggtgaagactgtgcattgggaagggccagcgaaggacacacctgccaaaggcttggagaaatagacccagccttgagttcctactgaaatgaaggttcattttcagctttgctaatgacacccaggacctcctgagtagtcaaagagatggccatgaggggaaggttgtgggcatggcaagaaaaggggtctggcttgggaagggaagctgtgagtccctgggctcccacgaccagacccagttcctgagcttctcttcgatggcaaaaactgaaagtcatgattccagttttcagcattctcacatgcagggcttagggttgtgctgagttggtgagaaggtggtcaaatacaaagctagcagaacgttttgacagagggatattctggggctatcatttatacactctatagacctttagcccaggggtgggctagggtaatgggaaagaaagtgacagctatggtcagaaaaggtcaacgcagggaaatgacaggtagaaagtgcaaaatacagacagtgagcaatggaaatgggcaaattatttgtcttcaatctttctctattttctagatttttttagaaataagaaaatattattttagaggagaaaaaaattataacaactacatatgttttcaatattcaaattggttatttaattgcaccttgtgcttataaggtgcaatatgcacatgaaaaaagtgatatgtttcattttagtctcgtcataacaaatcaaaccatattagagtcacatctgaggtaatataccaagtcaacatggcattgcataatgaagtgcagtggaaagcctcatcctgaaggcatatcttgaaggtaaatttaatagaaaaaaaaaaaacttcagtaatgcttacaagatacttatgtcatcaccgattcatgcacaaatttggttattactattctataataaatttggtgacatttggacaacctcattggtgagaataatttttgtaaagtttccgctttctaatttttttgtttgtttatttcaatagtttcgggggaataggtagcttttggttacatggataagttattttgtgttgtcagtgttcaaaactatgtttctctcaattgttgttttaaccgttttaattcaattactgatcattaaagactcaaaagttgttagcaatagccaatcagccaatcatagattttttgtttgtttgttttttgagacagggtctcactctttagctcaggctggagtgcagtggtgtgatctctgctcattgcaacttccacctcctgggttccagagattctcctgcctcagcctccccagtagctgggattacaggcgcgtgccaccacgccttgctaacttttgtatttttggtagagacagggttttgctctgttggcctggctggtcttgaactcctgacctcaggtgatctctctgccttggcctcccaaagtgctgagattagaggggtgaaccaccacacccagcccaaccatagattttaatagaatctgctgtaaacctgcagccatacattctgtctggtgacatttgctttcctttcctctacttgtcttcccaattcggtggccctgtgctcttctcaatgtagcacttacaggttctatttgtctaaattagacacgtttaaaataataatatgggggaaatcttgggcaaaacgcagtcaaggtgtaggagggcttgccctctcaagccctgggtggcgtttgaaggattctgaccaagatcccagatctccagggaaagagaaatgcgatgctgggcgagggagaggtgtgtcctctcatcccatgtcatccagtcactgcccaggtggaagcagacctcagccagcgtgggatagggctgcagtggtgaggaagagcagatccaggctgaggcggcccctgcatgaagatccagggactaagggctggacctttaaagtcacgcatcccctgcatcttccacgtgatttatccgacccaggacagtgctcttctggccatgctagaatctgagaactcatctaatcagactttgtcattttgtcatgtaggataaattgggtattcccaggatgacagttattagcaaaattgacaagactgggacaccagaaagaggaatgccactgaagggttttgatgagaagactgtggatgaaattttatttcttttgtttccaatttacaacttcatagcactgtttgttgaataaaagtttttgttaaatctgtattttgtgggaattagtaatcccctctttcagctttattgaggtataattgataaataaaattatatattccaggtatacaacataatgttttggcaaatgtatacattgtgaaatggttaccacaatcaagctaattaatacatagttccctttgggtttgtgtggtgagaacatagttacctttgggtttgtgtggtgagaacacttgagatttactctttcagtaagcttcaagtgtacaatatagtattactaagtatagtcaccatgctgtattccagatgtccagaacttattcatcatagaactgcaggtttatatcctttgaccaacatctgcacctccctacccctattatttttgttatgttttgtaatatacacaatgcatttctatcctagttcatggttcatagttataaataagtgtacatatataaggggtttattcttcaataaaagtatgcttttttgaaaaaacaaaaaagcaagaaaatttgattatgaaaaactattaattatttttttaaaagctatagcaattaacatattgtgcttttgcacaaggatatacaacatagggactcagccccacatgtaaagttgaagttgtgcacacacagccaccccacctctggttgtgtctttagagaaactggcaaaagtacaagccgacatgcacagtagagaagaagagagagcagaaggggctgagtgagcatgtggaagcttcactatcacaaaggtggccttgaactgggggttaaggatgggttaggtcagtaatttgggaagaaactggctctccactttaagattcctacctaactcccaccccacgcacaaaaggcagatcaaacaaatacatgtgcagaagaaaaccttcaaggtattgggagaataaaaatgagaatatgtttgtgcttcaaggtaagggacaggctttcttaaaaaggtgtgatccccgaggaaggagagcaagttaaagcagattcatttagtacacaactttttcttgcgtgaggtcacaggaagccagaaggaattgcagttgtgggattatcatgcaaaaatgtgagaaactgtcaaagcagctgctttgaggggctgggggagataagagtgaggcggatttggtgggctgcgaaggagcctgtgagcagctttctagaacacctttctgtgtcaggctcaggacagcccctcgatctcttgccactagtgcagcagtttttaaaagtcagtttgaataagaatcagctctggaggttattttaaaatgcacattttcacccttcattccaagattctgtcttattgtgttggatgcttcccagaacctgtacttttttttttttttttaattaaaagcctcacgtgcttcttatccaggtggtccgtggagtacactttgagaaacactcttctaggagccaggactataaggctgattcaaggtttagggttctggaagaaagaggatccaatagacaagagaccagataaacatgaacccagcactgctcccctgcagtattctggactctggatttcttgtagactcaagcttctctatcattattcagaaacctcttcctcatgaccacatttgtttaatctcattcctgcataccggggcctttgacacatcagctgtgatattttctaaacggaaattaattcttcagggtaagcgttgcttctctgctttcttctcctgctgtttcctggcttataattagtttcttattctttacaccagccatgtgcttccaattcatcaatcagaatgaaggactgcattttgagacaggaagagtcattttctaagacctgcctcaaagtcaagatattttaaagagaaaaagatttaagacaggttacaatagccagactgtgagctccagtcagtgaaagagaataagccatatgggttccaaatgaaataaaggaatgaaggctgcctggactatccgggggtaggggggcagcctccttattttatgtccattcatcatatccactctgatatcctcagacacagggtagagaccacagtcagtccatccacctatgggactgcccttttagatagacttgggcctttaaaactagcattagagggggagcttctatgtgtcctcactctaatgggggaccacgttgacagtatgcatttcttggtatcaaagttagctcagatgccgtctccaacagccttgaaagacctagttattccccttccctaggtgtacaaatttctcaggtaactagtcttcgatcttttgggggaaaaggctcggagaatcactgccatatatacttgctagaacattacaaggttctccctcaaggcaatctgccttccccttcattcaaaggactctgagttggagaacaggaggagctgacatcattctttcattcatcttctcttaatacgttccaattacatatatatatatatatatatatatatatatatatgagagagatatgtattatgtatatatgagagagatatacatatctatatctcatatatatctcatatatatatcatatatatctcatatatatctcatatatatcatatatatctctcccatatatatctcatatatatatctcatatatatatatatatatatgggagagatatatatgtatatatggaatacatatgtggaataccactgtggtagcccaatttccttacccctaggaacactgtggtttattagctgtcaccccagatttctgtagagcagggctccttggctgcttttctggctttatgtcttctcacactaattctgcccatttggactcttattttgaaattacatcatctccattgacccttgggagctaattccttaacagcgtctcctatagtcaaccctgccccacagggcacagcttccaccaagactctcaagaacgctgattcctcccatttcagaacatgcccttctttcctaattcagagggttctctgggctctcgcagggaatacagttatccagtgagttctcaggtttagtgggaaagtccactctagcatgcctacctctcgaagccttttaatgcctccctctgtaactgtgtccaggcagctccaacatctccgtatcatgtcatgcgaccaaggtttcctccatgtttccagggagccatcccaggagtgtctaaggaccaacaccaggagccctgtcagggtactaaattatgaaagcacccccgtagaattaaactctgcttcttcaggcttacattccacaacccaccactgagcaccctccaagtctgcttctaggcacgttctccatgtcggcccggaggtgtgaactccttgagtggataatcctttttatctctcagcagggctgtagtgttcctcaatggcccatgctgagacctgatccaaattatcagtctaatatccagaggggacatggaatgaattctgctgcagggcaagggtcagatccttcagatacttgcattagggcagggatgcttgaaatggttgaaaacctatgatatgacccacaagttggcgtacctatgactatcacttttttacccattctcctgcagaccaatagtaccatgatttgttatgtagaaaaaaatgtcagtgtgtccaaaagatagcagatctgatacacgttagatgtcttactgaagtgcaaagttgttattccaacatttatcctgagcaatgaataagcactattttagcctatagacaataattggataaatgcttgagtgaagctagtcttcccatatagtctcctaaatgaatccctttacagaccagtccttgaggaatttgtctgtcttaggaagcaggtggaatgggtctccaccagcccatagaagagctgaaagaactttgctgtcagcaaggctgcttggctgacacagctgggagattgtagtttggtctttaggtaactcatgagggtggggtggagaacagggtgcagctgccgccaggggagtgtgatattaggggagagatgaggagttaagctgtgtttctctttgtacagaatacagtgaattcatgggcaggaaatgagatgaggctggtctatcttgtgtaccaggagtagtcacaaggcagattttcagtgtggtgtagcacaggtctgaatcactgtgcctatcccaggtggcacagtaatagaccccagagtcacgttcaattagattttccagtataaatttaaggctcttccctgtgcttgcataagtatgatacttttctcgactgattcctgattccaacacaaccctggagttgtaggagtcatagtacagaagacgctgtggggccttcccctcctggtgtaggtaccagtgggtgtagacggcattttctacaggaagatcacaagtgattacagctgatgacccagttggcctggtgactgactttgttctcccttccaagttggaagatttctgactggctgcaatgggaacaacacaaaatgtaatgaggcatttcttagtatggtatcccttgcaaaagaagaaaataaacaaaacgaaacaaaataaaacctgtgagcctctctgtaggcagcactcttaccaggaggcaggaaagctagaagcagagctagagccaacagcatgccttcctctctggggtcttggaagtaagggaccagacgaagaggagcagaagaccctctcaaaactcaggtcccactcaacaaggaagtgatccctaacacagaagacagtaggaggagctggtcttcctgattcacaggcagagataagtgattgaggatctgtcttaggggactctgggtggtgcctaggaggacctgcagaggagtttctgcctctctgctcaggccagttctccagcgccctctgtggcggctgagagcaggccctctaaggaagagagctccgggcatagagagctcaggcctgcagcagagggagtgcagatgtgggggaagctgaccctggagttaacaggctcagaccttaaagggggtagtctcacagcaggttcacacccagcacttcagagtttcagcaagtaaggcaactgcaagaccctcattctgccgggaagcttctgattagggccctaaaccaccatccttttcacatctgcaaggacactagaggcaacacccagggtcactctgagagggcctgaacctgctttattaacaggatcgagggtcaggtatgttggtgggtcttggactctcctctaaggtaaatgggtgtgtgggggtggggcgggtgtttgtgtgatcctctgtgagtttgtgtgtgtgtgtgtgttgggagtgtatgcctgtgtgtgtgatctctttattagaggatttccgttcattcaagtagaagtgtgagttttttttttaaagtaatacagggtgccatgtcatgcaatatttgggacatacttcagctaaaaacttgttatttatctgaacgtccaaatttcctgagtattgcatattttacttagcaaccgtatcctcagaaagctgactgatgtctgcagtggacctggactcatagatggagatacaggtgataaaacaagtatagtaaaataattgtgaaaattcagtagtgcatacacagattttcacttcggtaaaaaaaaaaaaaagtttggacacatgtttaagatattcataaaacgtagaacaatgtccctcttggttgttgttttggcctagctcagagagttcagtttttgctgacatcacagctgggaatgagaaaggcagggggctccagttggtctccctctgcctctccaccacacgtacaggacttgaggctgccaggggaggagctctgaaagctgagtcattggggtccttgtgaaggagggaagctcacctgccttggagccaggaaaatcctgcctgggacagaactctcatggtttaaaaatgagaagggagagaactgccatcacattagaatgcacagaaaatccttaaaacaaaaaagtaatgagagaaacaatctccactggaatataaaatgaactacaaaactacagtgctgaagatgtaatgcccaaccgtgtttttactaaccctgtttttagactctcccttttcctttaatcacctggccttgtttccacctgaattgactctcccttagctaagagagccagacagactccatcttggctctttcactggcagccccttcctcaaggacttaacttgtgcaagctgactcccagcacatccaagaatgcaattaactgataagatactgtggcaagctatatccgcaattcccaggaatccatctgattgataacgcccaaagccccaagtctatgaccttgtaatagtcttaaagcccctgcacctggaactgtttactttcctgtaaccatttatccttttaactttttgcctactttatttctgtaaaattgttttaactagacacccctcccctttccaaaccaaagtataaaagaaaatctagccctttcttcggggccgagagaattttgagcattagccgtctcttggccgccggctaaataaacggaatcttaatttgtctcaaagtgtggcattttctctaactcattcagatacaacaaagagaggacaatactggcactagactgaaaagattcatggaacacagtggaaagtccagaaagagagccacgtgtatgtaatattttatcatgtcataaagttgtatgttaatatccacaaggaaatacttgattatttactatgttctcctttgggaattgacttaccatatggaaacaaatatccttgggttgctaacttaaaaggtacaaatagagatttagttgtaataaaactgaaaaaaggaaatcagacttaaacgatgatgaattgcacactaattgtaggtgacattggtctcgctgagcctgacatcataatacagaccctagaaaaattgatagattttattaaaagtaatatacaaagttcagttcaccaaaaggtgctgaaaataaataatagcaaatgatgagaaatattttcaacacgtttgataaaggatcaatatctcgaaaatggtgtatattaattcttacaaacaaataagaaaaaattaataccccaacagaaggataggcaaacagtatgaaaaggcaattcacaaaagaagaagtataaatggcctataaaattgtaaaataatgctagtattcataaagataagaaaatgcaaattgaatgaacaaatctcattttctgaaccccagagcttggattgcaattgctatcaaattaaactatatgacttagggaatgttagttaacccctcactttctcatctgctatattcaatgttacttaaacccgttgataaggtttctgtgaagattaaataaaatatacatgtaatgtgcttagtacagtaactaccggaaagtcagtacccatatttatcatcagtattattattattgctatagtaattattgtataaaaattccagatagatcatatcaagtaataaatgaataaaatattaatgaaatgatatgaatttctttaggcatacttctgaagtatgttcacctttccaagtaggacacaaaatccagacaccagaaactaaaagattgattgaaatgtataaaaacagaatatcagaacaaaaacataaatatgccattcaaatagaaataatgcatactgcacatatatgacaagcaaaagaggtatttctgtaatagtgatagacttctgaataaataagaaaaagtgaaaaagttcaactgaactaataaagatattgttacctatagggtgagacacagaagagaaaagagaattctagaatggaagctaaaatctctaaattgatcttgttttataattttgacttcagttccatgtaaaggttttacatatacaaatcaaaataatacaacagatttccaaaatataaaaatgaaaactgaacgaataaactagctgtatcaaagttggcatgaacatatagagaatgattctgtattctgattgtgtgcccaaaaaagaaagaaagagagagaaaaggaagaaaggaaaaaaagaaggaagtaagagaaggagggaggaagaaaggaaggaagtaaggaagggaaggagagagggaggaagaaagaaaggaaggaagtaaggaagggaaggagagagggaggaagaaaggaaggaaggaaggaaggaaggaaggcaagctagggagggagctagggagggagggaggggaggccagaaaaagggatgtgtagaaaaatagcaagtaaccaagaaagtagagagagagacaaaaaggaaagcagagggagacaatgttcaactgcatacctaggcttagtgttatagtggtaattatactattgcttatattgttatagacataaagaataagcaacactctcagctgtgatctctagatatatgattcagtataaatatccttcccatttgctgtccaaaatatctcgcttcgcagttggaccctaggtgtacctgttggtccgaggaagcagagtgagtgggcctcccccatgtcctcggagagctgagagagtcttgctctcagccaggctgcttggctgaggcctgaagatgacagcttgtcttcaggaaagtcctgggggagggtggggaacaaggtgcagctgctgccaggagagtgtgatattaggggagagatcaggaattatgctgtgtttctctttgtacagaatacagtaaattcggtggcaacaaatgagagggggctggtctatcttgtgtaccagaagcagtcacaaggcagattttcagtgtggtgtagggcaggtgtgaatcactgtgcctgtcccaggtggcacagtaatagatccagaatcattttcaattagattttgcagtatcaatttccagctcctcctcatgcttgcataagtaaaatactttcctctactgattcttgattccaacacaaccctggagtagtaggggtcatagtatggaagatgctgtggggccttccccgcctggtgcaggtaccagtggatgtagaaggtatttattacagtaagatcacaagtgattacagcagatgacccagctggcctggtgactgacttccttctcccttgcaagttggaagatttctgactggctgcaatgggaacagcacaaaatataatgaggaactccttagaacggcaccccttgcaaaatgagaaaacaaaacagaacaaaataaaacccatcagcctctctgtaggcagcacacttaccaagaggcaggaaagctagaagcagggctggggcccaccgcatgccttcctctctggggtcttggaaggaaagggaccagatgaagaggagcagaagacgctttcaaaactcaggtcccactcaaacaggaagtgttccctagcacagaaggcagtaggaggagctggtcttcctgagtcacaggcagggagaagtgatggaggatctgtcttaggggactccccagccttcctcccagaggggtggtgtctgggaggacctgcagaggagctcctgcctctctgctcaggccccttctccagcgccatcttgtggcagcagagagcaggccctctgcagaagagagccaggggcatggagagctcaggcctccagcagagggagtgcagatgtggggaaagctgaccctggcgccagctggccagggccataggacggggcagtccacagcaggctcacaccctgcccttcagagtttcagcagttgatgctgcttccagggccttgtcctgtcaggaagcttgatttggtctttcaactgctttccttttcacattcgcaaggacacttggaggcaaaatacccagggccactctgagaaggcctgaacctgctttattaacagtgtaacacctaaggttcttgcctagccacgccatagaattggtgtggcggctgaccgcagcgagtgatagaaacacggaccgagagagagaaaaagctgtaggctttattgagcagagtgaaagtacaaagcttccaaagcatggagggggtccagaatgggtagccagagttagattataggattgccttttaaactcttcaaggcgggaaatacctgaggcgggaagatgttaccaaagcgagaaacaaaggcaattaaccatttgtaacatgtcttagatcttgaggaaaaccggaattgcaacttaggttttatctactttatgaccttgcagcgtcatggcaaaggagacaggatcttacaggactttacaaagtatgtttacaaggaattggaattgggagtatagataaggtctgctggttacagaaaaacgggcagttaacgttattttactttagttttggggcagggggaaggaagagagggagagagaacacagggaaacttacaggaaaattttcgctgttcatagctttcatggggaagaaaacacatgcacaaatcctggtgttcggaatattttaagcatatatcttcaatattattcatccaggaccgaagtaagtcgtgatgcaggaaatgagtgcgtttcacagcttgctgagcccctactcgacccaggaagcccagctggcccctcctctcaacaggagtgagaatcaggtatgttggtcggccatggactctcctcaatggtaaatgggtgtgtgggggtcaggagggggtgtgtgtgaccttgtgtttgtaacctctttgttagaggatttctgttcattctcaagtaaaaaggccacatcaagtaggagtgtgagattggctcacgcctgtattcccagcactttgggaggccgaggtgggcagatcacgaggtcaggagattgagaccatcctggctaacacgatgaaaccctgtctctactaaaaatacaaaaaaattagccggttgtgggggtgggcacctgtagtcccagctactcaggaggctgaggcaggagaatgttgtgaacccgggaggtggagcttgcagtgagcggagattgtgccattgcactccagcctggacaacagagtgagactccgtctcaaaaaaagaaaaaaaaaagtacagggtgcagtgccatatgcaatatgtggtacatacttgaactcaaaacttatttgttatttatctgaacttccaatttacctgggtattgcatattttatttggcaactctatccttggaaagcaggctaatatgtgcagtgcacctggattcatagatgaagatatgggtgataaaacaagtagaataaaataattgggaacattcagtagtgtatacacagatattcacctcctctataacaaatatgtttagattcatgtttaaaatattcctaataagatgtagaacaacatccctcttggttgtggtattggcttagctcagagaattcagtttctgctgtcatcacagctgggaatgagaaagggaggggctctggttggtctccctctgcctctggagcacacgtggaggacatgaggctgccgcaggagcagctctgaaagctgagttcttggggtcactgtgaaggagggaagctcaggtgccttgaagcctggaaaatccttgctgggaccgatgtctcacggtttaaaaattagaagggagagatttgccattacattgcaatgcatagaacacccttaaaacaaaaaagcaataaaggaaagtaactccactgtaatgtcaaaagaactatacagctacagtgctgaagagacggcaatactggcactagaatgaaaagattcatggaacacactggaaagtccagaaagagagccatgtgtatgtaatattttatcacatgataaagttgtacgttaatatccttgagaaactactggattatgtaataagttctcttttgggaattgacttaccatatggaaacaatttttttttttttttttttttgagacagagtctctctctgtcccccaggctggagtgcggtggcacaatctcggctcactgcaagctccgcctcctgggttcacgccattctcctgcctcagccttctcagtagctgggactacaggcacctgccaacatgcccagctaattttttatatttttagtagagatggggtttcaccgtgttaccccggatagtctggatctcctgatctcgtgattcacccacctcagcctcccaaagtgctgggattacaggcgtgagccactgcacccggccagaaacaaatcttcttaagttactatgttgccagctacaaatggagattttcttgtaataaaactgaaaacagaaaatcattagactttaaccatgatgaattgcacacatattgtaagtgagatttgcctctctgatcctaacatcaaaatagaccccttagaaaaattgataggttttattaaaagtagtacacaaagttcagttcaccaaaaggtgctgaaaataatagcaaaccacgagaaatattttcaatacatttgataaaggatcaatatctctaaaatgaggtgtattaattcttacaaaccaataagaaaaaaatgataaccaacagaagaataggcgaagagtatgaaatggcagttgacaaaagaagaagtataaatggcctacaaagttgttaagtaatgctagcattcacacaggtaagaaaatgcaaattgaattaacaaatctcattttctgaaccccagcgcttggattgaaattgctatcgaataaagtatatgacttagggaatgttagttaagccctttatttctcatctggtgtattcaatggtactttaacccctcaatggggtttctgtgaagattaaataaaacttacatgcaatgtgattagtacagtaactaccagaatgtcagtacccgtgtttatcattagcatattattattactacggtaattattgtattaaaattcccaatagatcagagatgccatcattaaatagtctatgaataaaagcattcaaataaatgatatggacttctttattcatacttatgaagtgtatgcacttttagaggcaagacacaaaatctagacactggaagataaaagattgattaaaatgtataaaaccttatcagaatgaaaatataaatatgacggtcaaatagaaacaatatatactgcactatgacaaacaaaagacttttctgtaatactgaaagacttgttctgaataagaaaaagtgaaaaagttcaactgaactgataaaaatattgttacctatagggtcagggagagaagaggaaagagaaatccagaatggggcctggtgaggttgctcatgcctgtaatcccagcacttagggaggccgaggcagggggatcatctgaggtcaggagttcgagaccagccaggccaacatgaggaaaccctgtctctaccaaaaatacaaaaattagctggatgtgctggcgggcacctgaaatcccagctacttgggaggctgaggtaggagaatctcttgaacccaggaggcggaggttgcagtgagccgagattgctccactgcactccagcctgagtgacagactgagaatccgtctcaaaaaaaaaaaaaaaaaaaaaagagagagaaaaagaaatctagaatgtaagttaaaatctccaaatgcatcttcgttaaaattatgactttagttccatgtaaatagtttacatatgcaaaacaaatatgaaacaaaacaaaataatacaacaaatgtctaaaattttaaaatgaaaactgaacaaataaactagctatatcaatgttggcatgaacatgtaaagaaaaattatttcaaatgattttgttgaaaaaatattcggattatgtacccaaaaaggaaagaaagagagagaaaagcaaggaaggaagaaatgaaaaaaggaaggaaggaagggagggagagagggagggagggagggagggaagaaaaaataataaaagcaagcaaggaagtaagaaaggagagagaataaaagggagggcagagggagagagtgtttaactgcatatctaggcctagtgttttagtggtatttataatattgcctatattgttatagacataaggagtaagcagcactctcagctgcgatctctggaccatgattggatacatgattcagtataaatacccttcccatttgctgtccaaaatatctcgcttcacagctggaccctaagaaacagagtgagtgggcctcccccatgtcctaggagagctgagaaaaccttgctctcagccaggctgcttagctgaggcttagctgagatggcagcttagtcttcaggaaagtcctgggggagggtggggaacagggtacagctgctgacaggagagtgtaatattaggggggagatcaggagttaagctgtttctctttgtacagaatacagtaaattcagggcaggaaatgagaggggacggctctctcttgtgtaccagaagcagccacaagacagatattcagtgtggtgtagagcaggtctgaatcactctgcctgtcctaggtggcacagtaatagaccccagaggcattttcatttagttttggaggtataaatttccagcttatccttctacttccataagtatcatgctttcctgactgactcctgattccaacatatccctggagttgcagatgtcatagtacagaagatgctgtggggccttcccctcctggcgtaggtaccagtggatgtagaaggcattttctacaggaagatcacaggtgattacagcagatgaccccatctgcctggtgcctgactttattttcgcttccaagttagtagatatctgactggctgcaatgggaacaacataaaatataatgaggtattccttagtatggcgtcccttgctaaagaagaaaaatccaaaacaaaacccaacctgtgagcctctctgtaggcagcacacttaccaagagacaggaaagctagaagcagggctagggcccaccacatgccttcgtctctggggtcttgaaagaaagggcccagatgaacaggagcagaagatcctctcaaaactcaggtcccactcaacaaggaagtgatccctagcacagaaggcagtggggaaggctggtcttcctgagtcacaagcagggagaagtgactgaggatgtgtcttaggggactcccacgccttccttccagaagggtggtgcctgggaggacctgcagaggagctcctgcctctctgctcaggccagttctgcagcaccctctgtggcagctgagagcaggccctctgcagaagagagccaggggcatggagagttcaggcctccagcagagggagtgcagatatggggaaagctgacccctggagtcagcaggcccagccctaggagggggcagtcccacagcaggctcacaccctgcccttcagagttgcagcagctaatgctgatgccaggaccttgtcctgccaggaagcctctgattagggctgtgaaccaacttccttttcacatctgcaaggacacttggaggcaactgcccaaggccactctgaggagggttgaatgttctttattaaaaggactgaggatcatgtgtgttggtgggccttggactctgctctaaggtaaatgtgtgtgtgtgtggcggggggcgggggggggggtgcctgtaatcctgtgggtgtgatctctttattagacaatttttgttcattaaagtaggagtgtaagtttgtttgtttgcttgtttgtttttaaagtagtactgggtgccatgtcatgaaatatttggaacatacttgaactaaaaacttgttatatatctgaacttccaaattccctgggtattgtatattttatttgtcatccctaccctcagaaagcagactaatatctgcagtgcacctggattcacagatggaaataaggggacaaaacaagtacagtaatataattgtgaaaattcagtagggcatgcacagattaccaccacctctgtaagaagtatatagagacacatgtttgaaatatgcataatgagatgtagaacaatgtctctcttggttgttgtgttgtcctagctcaaattttgcagtttctgctgtcatcacagctgggaatgagaaagggaaggggctccagttggtctccctctgcctctggagcacacgtggaggacatgaggcttccgcaggaacagctctgaaagctgagttctcgggtccctgtgaaggagggaagcttgcctgccttggagcgtgaaaaagtcttgctggacagaagtctcacggtttaaaactgggaagggagaggattgagatcacactagaatgcacagaaaattcttaaaacaaaaaaatgagagaaacttcatcagaatgtgaaaagaactataaagctacagtgctgaagagagggcaatactggcactagaatgagaagattcatggaacacagtggaaaatgcagtaagagagctgcatgtatgtaatattttatcatgtgataaagtgatatattaatattcacaaggaaatagtcaattatttaataagttctctttttggtattgacttactgtatggaaacaaatattgttgcatttctaccttactagttacaaatagtgatttagttgtaataaaatgaaaatcattagacttaaacgatgatgaattgcatagaagttctaggtgagattggcctttctaagcctggcatcaaactagacaccctagaaaaatggacagatattattttatttttcaaagttcaattcaccataggtgccaaatgtaaataataacacatgaggagtaatatcttcaacacattggataaagggtcagtatctctaaaatagtatatattaattcttacgaaccaataagaaaaaattaatcctccaaaaggagaataggcaaagagtatcacaaggcgattctcaaaagaagaactataaatgacctataacgttgtcaaatattgctagtactcctaaagatgggggaatgcaaatcaaattaacaaatctcattttcagaaccacagagcttggattgccatcattattaaattaaagtatatgacttagggaatgttaattaaccccccaatttcttatgttacattcaacggtactttaaacccttaatgaagtttctgtgtagattaaataaaatgtgcatgcaatgtgcttagtacattaactaccagaatgtcagcacccatatgtaccatcaatattattattatcattattcatttttttgagacagagtctcactctattgcccaaactggactgtagtagtgtgatattagctcactgaaaccttcaccttcctggctctagaaattctcctgcctcagcatccaaagtagctgggattacatgtgtgcgccacaacagccggctaattttttgtatatttagtagagacagggtttcaccatgttggctgagcgggtccaaatctcccggcctaagtgatcctaatgactggactggccaaatgctgggattacatgcatgagccaccgggcgtggccagtattattgttattaatacagtaattattgtataaaaattcctgatggatcaatgatgccatcattaaataatcaacacataaaaacattcaaataaatgatatggacgtctttatgcatacttatgaagtatgtgcacctttagaagtaagacacacaatccagacacaggaaaatataagatttattaaaatgtataaaaaccaaatatcagaatgaaaatataaatatggcattgaaatagaaacaatacatactctgctatgacaaacagagtgaaacagctcaagtgaactgacaaaaatattgttacctgtagtgtcagggagaaaagaggaacaagaaatctacaatggaagctaaaatcttcaaatgcatcaccttttatgattttgacttcagttccatgtaaatattttatatatacaaaacagatttgaaacaaaacaaagtaatacaacaaatttccaaaatgtaaaaatgaaaactgaacagttaaactagctgtataaatgttggcatgaacaaatagagaaaaattatttcaaatgattttgtggaaaaagtattctcattatgtacccaaaaaggaaagaaagagagagaaaaacaaggaaggaaggaggaaaacaaggaaggagaatggatggaaggaaacaagggaggaagggaggaaaggatggatggagggagggagttagggagggagagaaaaataaaaacaagcaaagaagtaagaaaaaagagagagagaataaaagggagggcagagggagagaatgttcaactgcatacctaggcctagtgttttagtggtcattatactattgcttatattgttatagacataaggaataagcaccactctcagctgtgatctctggaccatgactggataaatgattcagtataaataaccttcctatttgctgtccaaaatatctagattcgcagctggaccctagttgtacctgtctgtcataggaagcagagtgagtgggcctcccccatgtcctaggagagctgagagaaccttactctcagccaggctgcttaactgaggcccggagatggcagcttgatcttcaggaaagttgtgggggaggggtagggaacagggtgcagctgctgccaggacagtgtgatattaggagggagatcaggagttaagctgtctttctcttgttcagaatacagtaaatttggtggcaggaaatgagagggggcggctctatcttgtgtaccagaggcagccacaaggcagatgttcagtgtggtgtagggcagatctgaatcactgtgcctgccccaggtggcacagtaatagaccccagaatcattttcaattagattttgcagtctcaaattccagctccacctcctcggtgtatgagtataatactttccaagactgagacctgattccaacacatcccttgagttggagacatcatagtgcagaagatgctgtggggtcttcccctcctgctgtaggtaccagtggatgtagacggcatttattacagtaaggtcacaagtgatttcagcagatgacccagtcggcctggtgactgacttcattctcccttccaagttggaagatttctgactggctgcaatgggaaaaacataaaatataatgaggtattcctttgtatggcacccctttcaaaagaagaaaacaaaacaaaacccaacctgtgagcctctctgtaggcagcacactcaccaggatacaggaaagctagaagcaccgctagggctcaccgcatgccttcctttctggggccttggaaggaaagggaccagatgaaaaggagtagaagatcctctcaaaactcaggtcccactcaacaaggaagtgatccctagcacagaagacagtaggaggagctggtattcctgagacacaggcagagagaagtgactgaggatgtgtcttaggggactcccaagccttcctcccagaaggggtggttcctgggaggacctgcagaggagctcctgtgtctcctcaggccctttcttcggcgccctcttgtggcagctgagagcaggcccagggcagaagggaggcaggggcattgagagttcaggcctccagcagagggactgcagatttaggggaagctgaccctggaattaacaggctcagaccttggagggggcagtcccacaacaggctcctaccctgcccttcagagttgcagcagctaatgctgatgccaggaccttgtcctgacaggaagcctctgattagggccctgaaccaagttccttttcgcatctgcagacacatggaggcaaccactcaaggccactctgagaagggttgaacgtgctttaaattaaaaggactgaggatcatgtgtgttggtgtgtcttggactctgctctaaggtaaatgtgtgtgtgtgttggggggggtgagttgtgcctgtaatcctgtgtgtgtgacctccttattagaggatttttgttcattaagtaggaatgtgagtttgtttgtttgcttgtttgtttttaaagtagtactgggtgccatgtcatgcaacatttggaacatacttaaactaaaaacttgttatttatctgaacttccaattctctgcgtattgtatattttatttgtcatccctaccctcagaaagcagactaatatctgcagtgcacctggattcacagatgaaaataaggggacaaatcaagtacagtaatattattgtgaaaattcagtaaggcattcacagattatcaccacctctgtaagaagtatatagagacacatgtttgaaatatgcataatgagatggagaacagtgtccctctcagttgttgtgttgggctagctcagagaattcagtttctgctgtcatcacagctgggaatgagaaagggagggggctctggttggtctccctctgcctctggagcacacatgcaggacaagaggctgctgtaggagcagctctgaaagctgagttctcgggtccttgtgaaggagggaagcttgcctgccttggagcgtgaaaaagtcttgctggacagaagtctcatggtttaaaaatgggaagggagaggattgagatcacactagaatgcacagaaaattcttaaaacaaaaaaataatgagagaaatttcatcagaatgtgaaaagaactataaagctacagtgctgaagagagggcaatactggcactagaatgagaagattcatggaacacagtggaaaatgcagtaagagagctgcatgtatgtaatattttatcatgtgataaagtgatatattaatattcacaaggaaatagtcaattatttaataagttctcttttaggtattgacttaccatatggaaacaaatattgtcgcatttctaccttaccagttacaaatagtgatttagttgtaataaaatgaaaatcaatagacttaaacgatgatgaattgcatacagattctgggtgagattggcctttctaagctgacatcaaactagactccctagaaaaattgatgggttttattgtttttttttcaaagttgaattcactaaaaggtgccaaatgtaaataataacaaatgaggagtaatatcttcaacacattggataaagggtcatcatctctaaaatagtacatattaattcttacgaaccaataagaaaaaattaatcctccaaagggagaataggcaaagagtacgacaaggcaattctcaaaagaagaattataaatgacctataacgttgtcaaatattgctagtactcctaaagatgggggaatgcaaatcgaattaacaaatctcatttttggaaccacagagcttggattgctatcataatcaaattaaaatatatggcttagggaatgttaattaaccccccattttcttatgtttcattcaacagtactttaaacccttaatgaagtttctgtgtagattaaataaaatatgcatgtaatgtgcttagtacattaactaccagaatgtcagcacccatatgtaccatcaatattattattatcattattcatttttttgagagagagtctcactctattgcccaaactggactgtagtagtgtgatcttagctcactgaaaccttcaccttccaggctctagagattctcctgcctcagcatccaaagtagctgggattacatgtgtgcgccactacagccggctaattttttgtatttttagtagagacagggtttcaccatgttggctaagctggtcgcaatctcctggcctaagtgatcgtaatgactggaccacccaaatgctgggattacaggcatgagccaccgggcctggccagtattattattactaatacagtaattattgtataaaaattcctgatagatcaatgatgccatcattaaataatcaatgcataaagacattcaaataaatgatatggacgtctttatgcatacttatgaagtatgtgcacctttagaagtaagacacacaatccagacacgggaaaatataagattgattaaaatgtataaaaaccgaatatcagaatgaaaatataaatatggcattgaaatagaaacaatacatacggcactatgacaaacagtgaaaaagctcatgtgaactgccaaaaatattgttacctatagtgtcagggagaaaagaggaacgaaaaatctacaatggaagctaaaatcttcaaatgcatcatcttttataattttggcttcagtttcatgtaaacgttttatatatacaaaacagatatgaagcaaaacaaagtaatacaacacatttccaaaatgtaaaaatgaaaactgaacaattaaactagctgtataaatgttggcatgaacaaatagagaaaaattatatcaaatgattttgtggaaaaagtattctgattatgtacccaaaaaggaaagaaagagagagaaaagcaaggaaggaaggaaggaaaacaaggaaggagaatggatggaaggaaacaagggaggaagggaggaaaggatggatggagggagggagttagggagggagagaaaaataaaaacaagcaaagaagtaagaaaaaagagagagagaataaaagggagggcagagggagaccatgttcaactgcatacctgggcctagtgttttagtggtcattatagtattgcttatgttgttatagacataaggaataagcaccactctcagctgtgatctctggaccatgactggatacatgattcagtataaatacccttcccatttgctgtccaaaatatctcgcttcacagctggaccctagttgtacctgtgtgtcataggaagcagagtgagtgggcctcccccatgtcctaggagagctgagagaaccttgctctcagccaggctgcttagctgaggcctggagatggcagcttgatcttcaggaaagttgtgggggaggggtggggaacagggtgcggctgctgccaggacagtgtgatattaggagggagatcaggagttaagctgtctttctcttgttcagaatacagtaaatttggtgacaggaaatgagagggggcggctctatcctgtgaaccagaggcagccacaaggcagattttcagtgtggtgtaggacaggtctgaatcactgtgcctgtcccaggtggcacagtaatagaccccagaatcattttcaattagatttcgtagtatcaatatccagctccacctcctgggtgtatgagtataatactttcctggactgagtcctgattccaacacatcctttgagttggagacgtcatagtacagaagacgctgtggggccttcccctcctggtgtaggtaccagtggatgtagaaggcatttattacagtaaggtcacaagtgatttcagcagatgacctagtcggcctcgtgactgacttcgttcccccttccaagttggaagatttctgactggctgcaatgggaacaacacaaaatttaatgaggtattcctttgtatggcacccctttcaaaagaagtaaacaaaacaaaacccaacctgtgagcctctctgtaggcagcgtactcaccaggagacaggaaagctagaagcaccagtagggcccaccgcatgccttcctctcgggggccttggaaggaaagggaccagatgaggaggagcagaagatcctcttaaaactccggccccactcaacaaggaagtgatccctagcacagaagacagtaggaggagctggtcttcctgagtcacaggcagagagaagtgactgaagatgtgtcttaggggactcccaagccttcctcccagaaggggtggtgcctgggaggacctgcagaggagctcccgcatctcctcaggccctttcttctgcgccatcttgtggcagttgagagcaggcccagggcagaagggaggcaggggcattaagagctcaggcctccagctgagggactgcagatgttgggtaagctgaccctggaattaacaggctcacaccttggagggggcagtcccatagcaggctcccaccctgcccttcagagttgcagcaggtaatgctgatgccagaaccttgtcctgacaggaagcctctgattagggccctgaaccaagttccttttcgcatctgcagactcatggaggcaaccactcaaggtcactctgagaagggttgaacgtgctttattaaaaggactgaggatcatgtgtgttggtgtgtcccggagtctgctctaaggtaaatatgtgtgtgtgtgtgttgggggggcaggggttgtgcctgtaatcctgtgtgtgtgacctccttattagaggatttttgttcattaaagtaggagtgtgaatttgtttgtttgcttgtttgtttttaaagtagtactgggtgccatgtcatgcaatatttggaacatacttaaactaaaaacttgttatttttctgtacttccaattcccccggtattgtatattttatttgtcatccctaccctcagaaagcagactaatatctgcagtgcacctggattcacagttggaaatataggggacaaaaaaagtatagtaatattattgtgaaaattcagtaaggcataggcagattatcaccacctctgtaagaatatatagagacacatgtttgaaagatgcataatgagatgtagaacagtgtctctctcagttgttgtgttgtcctagctcagagaattcagtttctgctgtcatcacagctgggaatgagaaagggagggggctccggttggtctccctctgcctctggagcacacgtgcaggacatgaggctgctgtaggagcagctctgaaagctgagttctcggggtccttgtgaaggaggaaagcttccatgccttggagcatgaaaaagtcttgctggacagaagtctcatggtttaaaaatgggaagggagaggattgagatcacactagaatgcacagaaaattcttaaaacaaaaaaataatgagagaaatttcatcagaatgtgaaaagaactataaagctacagtgctgaagagagggcaatactggcactagaatgagaagattcatggaacacagtagaaaatccagaaagaaagccgcatgcatgtaatattttatcatgtgataaagtgatatgttaatatccacaaggaaatagtcaattattttataagttctcttttgggtattgacttaccatatggaaacaaatattattgcatttcgttcttaccagatatagatagtgatttagttgtaataaaaacaaaatcattacacttaaacaatgatgaattgcatagaaattctaggtgagattggcctttctaagcttgacatcaaactagacaccctagaaaaattgatagattttaatgctttttttttcaaagttcaattcaccaaaaggtgccaaatgtaaataataacaaatgaggggaaatatcttcaacacattcgataaagggtcagtatctttaaaatagtgtatcttaactcttacgaaataataagaaaaaattaatcctccaagagaggaataggcaaagagtatgacatggcaattcacaaaagaagaactataaataacctataaagttgtgaaataatactagtactcccaaagatgggggaatgcaaactgaatttacaaatctcattttcggaaccacagagcttggattgcaatcattatcaaattaaagcatatgacttagggaatgttaattaaccgcccaatttctaatgttacattcaacagtactttaaaccttaatgaagtttctgtgtagattaaataaaatatgcatgtaatgtgcttagtacattaactaccagaatgtcagtacccatatgtaccatcaatattattattatcgttattcatttttttgagacagagtctcactctgttgcccaaactggactgcagtagtgtgatattagctcactgaaaactccacctaccaggctctacagattctcctgcttcagcatccaagtagctgggattacatgtgtgtgccactacagccagctaattttttgtatttttactagagacagggtttcaccacgttggctgagctggtcacaatctcccggcctaagtgatcctaacgactggactgcccaaatgctgggattacaggcatgagccaccgggcctggccagtattattattactaatacagtaattattgtataaaaattcctgatagatcagtgatgccatcattaaataatcaatgcataaaaacattcaaataaatgatatggacatctttatgcatgcttatgaagtatgtgcacctttagaagtaagacacacagtccagacacaggaaaatataagattgattaaaatatatagaaactgaatatcagaaagaaaatataaatatggcattcaaatagaaagaatacatactccgctatgaaaaacagagtgaaacagctcaagtgaactgccaaaaatattgttacctatagtgtcagggagaaaagaagaatgagaagtctacaatggaagctaaaatcttcaaatgcatcatcttttatgattttgacttcacttccatgtaaatgttttatatatgcaaaacagatatgaaacaaaacaaagtaatacaacaaatttccaaaatgtaaaaaagaaaactgaacaattaaagtagctatatcaatgttgacatgaacacatagagaaaaattatttcaaatgattttgtggaaaaagtattctgattatgtacccaaaaaggaaagcaagagaaaagcaaagaaggaaggaaggaaaacgaaggagaatggatggaaggaaagaagagaggaagggagggaaggagggagggagagagggagggaaggagggagggaaggacggagggaaggaggaagggagagagagaaaaataataaaagcaagcaaagaattaaaaaaagagagagagaataaaagggagggcagagggagagaatgttcaactgcatacctaggcctggtgtttcagtggtcattatagtattgcttacattgttatagatataaggaataagcaccagtctcagctgcgatttctggatcatgatgggatacacaatttagtataaatacccttctcatttgttgtccaaaatatcttgcttcacagctggaccctagaggtacccatttgtcctaggaagcagagtgagtgggcttccgccatgtcctaggagagctaagagaaccttgctctcagccaggctgcttctctgaggtttagctgagatggtggcttggtcttcagggaagtcctgggggagggtggggaacagggtgcagctgctgccaggggagtgtgatattgcaggggagatcaggagttaagcaatgtttctcttgttcagcacacggtaaatttggtggcaggaaatgagagggggcggctctatcttgtgtaccagaagcagccacaaggcaggttttcagtgtggtgtagggcggatctgaatcactgtgcccatcccaggtggcacagtaatagactccagagtcattttcaataagatttcgcagtatcattctcaagttcttccttgtgcttccgtaagtatcatacttccctgggctgattcctgattccaacacaacgctggaggtgtaggagtcatagtacagaagacgctgtggggccttcccctcctggtgtaggtaccagtggatgtagccggtacttccttcagcaagatcacaagtgatttcagcagatgacccagtctgcctgatgactgacttcgttctcccttccaagttggaagatttctgactggctgcaatgggaacaacacaaaatataatgaggaattccttagtatggcaatccttgcaaaagaagaaaataaagaaaacaaaacccatgatcctctctgtaggcagcgcactcaccaggagacaggaaagctagaagcaccgctagggcccactgcatgccttcctctctgaggccttggaaggaaagggaccagatgaagaggagcagaagatcctcttaaaactcaggccccactcaacaaggaagtgatccctagcacagaagacagtaggaggagctggtcttcctgagacacaagcagagagaagtgactgaggatctgtctaagaggactcccaagccttcctccctcccagaaggattggtgcctgggaggacctgcagaggagctcctgcctctcttgctcaggtccgttctccggcgccctcttgtggcagctgagagcaggccctctgcagaagagagccaggggccaggagagctcaggcctgcagcagagggaatgcagatgtagcggaagctgaccctggagtcagcaggcccagccctaggagggggcagtcccacagcaggctcacaccctgcccttcagagttgcagcagctaatgctgatgccaggaccttgtcctgccaggaagtctctgattagggaactgaaccaccttccttttggcatctgcaaggacacttggaggcaccacgcaaagcgtgtgtttattgcggcactattcacgatagcagagacttggaaccaacccaaatgtccatcagtgatagactggattaagaaaatgtgacacatatacaccatggaatactatgcggccataaaaagggatgcgttcatgtcctttgtaaggacatggatgaagctggaaaccatcattccgagcaaactattccaaggacagaaatccaaacagtgcatgttctcgctcgtaggtgggaattgaacaatgagaacacttggacacagagtgggggaacatcacgcactggggcctgtagtggggtgggggcaggggggagggatagcattaggagatatacctaatgtagatgacaagttgatgggtgcaacaaaccaacatggcacatgtatacatatgtaacaaacctgcacgttgtgcaaatgtaccctagcacttaaagtataataaatataaataaataaagaaataataaaaataaaagaactgaggatcatgtgtgttggttggtcttggactctgctctaagataaaggtgtgtgtgttgggtgtgtgtgtgtgtgtgtgtttgtgtgtgtgtgatcctgtggttgtgatctctttattagaggatttttgttcattgaagtaggagtgtgagttttttttgtttttttttttctaagtagttcagggtgccatgtcatgcaatatttggaacatacttaaactaaaaacttgttgtttacctgaacttccaaattgtttggtattgtatattttatttgtcagccctaccctcagaaaggggactgagatctgcagtacacctggattcacagatggaaatataggggacaaaggaagtacagtaatataattgtgaaaattcagtaaggcatacacagattatcaccacctctgtaagaagtatatagagacacatgtttgaaagatgcataatgagatgtagaacaatattcctctcagttgtggtattggcctagctcacagagttcggtttctgctgtcttcacagctgggaatgacaggtgggaatgagaaagggagggggctccggttggtctccctctgcctctggagcacacgtgcaggacatgaggcttccacaggaacagctctgaaagctgagttctcgggtccttgtgaaggagggaagcttgcctgccttggagcgtgaaaaagtcttgctggacagaagtctcacggtttaaaaatgggaagggagaggattgagatcacactagaatgcacagaaaattcttaaaacaaaaaaataatgagagaaacttcatcagaatgtgaaaagaactataaagctacagtgctgaagagagggcaatactggcactagaatgacaagattcatggaacacagtggaaaatccagaaagagagctgcatgtatgtaatattttatcatgtgataaagtgatatgttaatacccacaaggaaatagtcagttattaaataagttctctttttggtattgacttaccacatggaaacaaatattgttgcatttctaccttactagttacaaatagtgatttagttgtaataaatagaaaatcattagacttaaacgatgatgaattgcatagaaattctaggtgagattggcctttctaagcctgacatcaaactagacaccctagaaaaattgatagcttttattgtttttttttcaaagttgaattcaccaaaaggtgccaaatgtaaataataacaaatgaggagaaatatcttcaacacattggataaagggtcagtatctctaaaatggtgtatattaattcttacgaactaataagaaaaaactaatcttccaaaaaaagaataggaaaagagtatgacaaggcaattctcaaaagaagaactataaatgacctgtaaagttgtaaaatgatgctagtactcctaaagatgggggaatgcaaaccaaattaacaaatctcatttaggaaccacagagcttgcattgcaatcattatcaagataaagtatatgacttagggaatgttaattaaccccccaatttctaatgttacattcaacagtactttaaaaccttaatgaagtttctgtgtagattaaataaaatgtgcatgcaatgtgcttagtacgttaactaccagaatgtcagtacccatatttaccatcaatattattattattattagtctttttgagacagagtctcgctgtgttgcccaaactggactgcagtagtgtgatcttagctcactgaaaactccaacttccaggttgaagagtttctcctgcctcagcatccaaagtagctgggattacatgtgtgcgccactacagccggctaattttttgtatttttagtagagacagggtttcaccatgttggctaagctggtcgcaatctcccggcctaagtgttcctaacgactggactgcccaaatgctgggattacaggcatgagccaccgggcctggcaagtattattattactaatacagtaattattgtataaaaattcctgatagatcgatgatgccatcattaaataatcaacgcataaaaacattcaaataaatgatatggacttctttatgcatacttatgaagtacgtgcacctttagaagtaagacacacagtccagacacgggaaaatataagattgattaaaatgtataaaaaccaaatatcagaacgaaaatataaatatggcattaaaatagaaacaatacatactccgctatgacaaacagtgaaaaagctcaagtgaactgccaaaaatattgttacctatagtgtcagggagaaaagaggaacgagaaatctacaatggaagctaaaatcttcaaatgcatcatcttttataattttggcttcagtttcatgtaaatgttttatatatacaaaacagatatgaagcaaaacaaagtaatacaacaaaattccaaaatgtgaaaaagagaactgaacaattaaactagctgtatgaatgttggcatgaacatatagagaaaaattatatcaaatgattttgtggaaaaagtattctgattatgtacccaaaaaggaaagaaagagagagaaaagcaaggaaggaaggaaggaaaacaaggaaggagaatggatggaaggaaacaagggaggaagggaggaaaggatggatggagggagggagttagggagggagagaaaaataaaaacaagcaaagaagtaagaaaagagagagagaataaaagggagggcagagggagaccatgttcaactgcatacctgggcctagtgttttagtggtcattatagtattgcttatgttgttatagacataaggaataagcaccactctcagctgtgatctctggaccatgagtggatacatgattcagtataaatacccttcccatttgctgtccaaaatatctcgcttcacagctggaccctagttgtacctgtgtgtcataggaagcagagtgagtgggcctcccccatgtcctaggagagctgagagaaccttgctctcagccaggctgcttagctgaggcctggagatggcagcttgatcttcaggaaagttgtgggggaggggtggggaacaggatgcagctgctgccaggacagtgtgatattaggagggagatcaggagttaagctgtctttctcttgttcagaatacaggaaatttggtggcaggaaatgagagggggcggctctatcttgtgtaccagaggcagccacaaggcagattttcagtgtggtgtaggacaggtctgaatcactgtgcctgtcccaggtggcacagtaatagaccccagaatcattttcaattagattttgcagtctcaatatccagctccacctcctgggtgtatgagtataatactttcctggactgagtcctgattccaacacatcccttgcggtggagacgtcatagtacagaagacgctgtggggccttcccctcctggtgtaggtaccagtggatgtagaaggtatttgttacagtaagatcgcaagtgatttcagcagatgacccagtctgcctggtgactgacttcgttctcccttccaagttggaagatttctgactggctgcaatgggaacaacacaaaatacaatgaggtattcctttgtatggcacccctttcaagaagaaaacaaaacaaaacccaacctgtgagcctctctgtaggcagcgtactcaccaggagacaggaaagctagaagcaccagtagggcccaccgcatgccttcctctcgggggccttggaaggaaacggaccagatgaagaggagcagaagatcctcttaaaactcaggccccactcaacaaggaagtgatccctagcacagaagacagtaggaggagctggtttcctgagacacaggcagagagaagtgactgaagatgtgtcttaggggactcccaagccttcctcccagaaggggtggtgcctgggaggacctgcagaggagctcctgcatctcctcaggccctttcttcggcgccctcttgtggcagctgagagcaggcccagggcagaagggaggcaggggcattaagagctcaggcctccagctgagggactgcagatgttgggtaagctgaccctggaattaacaggctcacaccttggagggggcagtcccatagcaggctcccaccctgcccttcagagttgcagcaggtaatgctgatgccagaaccttgtcctgacaggaagcctctgattagggcccggaaccaacttccttttcgcatctgcagactcatggaggcaaccactcaaggccactctgagaagggttgaacgtgctttaaattaaaaggactgaggatcatgtgtgttggtgtgtcctggactctgctctaaggtaaatgtgtgtgtgtgtttgtgtgtgggggttgtgcctgtaatcctgtgtgtgtgacctccttattagaagatttttgttcattaaagtaggagtgtgaatttgtttgtttgcttgtttgtttttaaagtagaactgggtgccatgtcatgcaatatttggaacatacttaaactaaaaacttgttatttatctgaacttccaattcccccggtattgtatattttatttgtcatccctaccctcagaaagcagactaatatctgcagtgcacctggcttcacagatgaaaataaggggacaaatcaagtacagtaatattattgtgaaaattcagtaaggcattcacagattatcaccacctctgtaagaagtatatagagacacatgtttgaaatatgcataatgagatggagaacagtgtccctctcagttgttgtgttgggctagctcagagagttcagtttctgctgtcatcacagctgggaatgagaaagggagggggctctggttggtctccctctgcctctggagcacacatgcaggacatgaggctgctgtaggagcagctctgaaagctgagttctcgggtccttgtgaaggagggaagcttgcctgccttggagcgtgaaaaagtcttgcaggacagaagtctcatggtttaaaaatgggaagggagaggattgagatcacactagaatgcacagaaaattcttaaaacaaaaaaataatgagagaaacttcatcaaaatgtgaaaagaagtataaagctacagtgctgaagagagggcaatactggcactagaatgagaagattcatggaacacagtggaaaatccagaaagagagccacacgtatgtaatattttatcatgtgataaagtgatatgttaatacccacaaggaaatagtcaattattttataagttctgttttgggtattgacttaccatatggaaacaaatattattgcatttcgttcttaccagatatagatagtgatttagttgtaataaaaacaaaatcattacacttaaacaatgatgaattgcatagaaattctaggtgagattggcctttctaagcttgacatcaaactagacaccctagaaaaactgatagattttaatgctttttttttcaaagttcaattcaccaaaagatgccaaatgtaaataacaacaaatgaggagaaatatcttcaacacattggataaagggtcagtatctttaaaatagtgtatattaactcttacaaactaataagaaaaaattaatcctccaagagaggaataggcaaagagtatgacaaggcaattcacaaaagaagaactataaatgacctataaagttgtgaaataatgttagtactcccaaagatgagggaatgcaaactgaatttacaaatctcgttttcagaatcacagagcttggattgcaatcattatcaagttaaagtatatgactcagggaatgttaattaaccccctcaatttctaatgttacattcaacagtactttaaaccctaatgaaatttctgtgtagattaaataaaatatgcatgtaatgtgcttagtacattaactaccagaatgtcagtacccatatgtagcatcaatattattattatcgttattcatttttttgagacagagtctcactctgttgcccaaactggactgcagtagtgtgatattagctcactgaaaactccacctaccaggctctacagattctcctgcttcagcattcaagtagctgggattacatgtgtgcgccactatagccagctaattttttgtatttttagtagagacagggtttcaccatgttggctaagctggtcgcaatctcccggcctaagtgatcctaacgactggactgcccaaatgctgggattacaggcatgaaccaccgggcctggccagtattattattactaatacagtaattattgtataaaaattcctgatagatcaatgatgccatcattaaataatgaatgcataaaaacattcaaataaatgatatggacgtctttatgcatacttatgaagtatgtgcacctttagaagtaagacacacagtccagacacaggaaaatataagattgattaaaatatatagaaactgaatatcagaaagaaaatataaatatggcattgaaatagaaacaatacatactccgctatgacaaacagtgaaaaaactcaagtgaactgccaaaaatattgttacctatagtgtcagggagaaaagaagaatgagaagtctacaatggaagctaaaatcttcaaatgcatcatcttttataattttgacttcacttccatgtaaatgttttatatatacaaaacagatatgaaacaaaacaaagtaatacaacaaatttccaaaatgtaaaaaagaaaactgaacaattaaagtagctatatcaatgttgacatgaacacatagagaaaaattatttcaaatgattttgtggaaaaagtattctgattatgtacccaaaaaggaaagcaagagaaaagcaaagaaggaaggaaggaaaacgaaggagaatggatggaaggaaagaagagaggaagggagggaaggagagagggagagagggagggaaggacggagggagcgatggagcgagggaggaagggagagagaaaaataataaaagcaagcaaagaattaagaaaaaagagagagagaataaaagggagggcagagggagagaatgttcaactgcatacctaggcctggtgtttcagtggtcattatagtattgcttatattgttatagacataaggaataagcaccagtctcagctgcggtttctggatcatgatgggatacacaatttagtataaattcccttcccatttgttgtccaaaatatcttgctttacagctggaccctaggggtacccatttgtcctaggaagcagagtgagtgggcctcccccatgtcctaggagagctaagagaaccttgctctcagccaggctgcttctctgaggcttagctgagatggcggcttggtcttcaggaaagtcctgggggagggtggggaacagggtgcagctgctgccaggggagtgtaatattgcaggggagatcaggagttaagcaatgtttctcttgttcagcacacggtaaatttggtggcaggaaatgagagggggcggctctatcttgtgtaccagaagcagccacaaggcagattttcagtgtggtgtagggcggatctgaatcactgtgcccgtcccaggtggcacagtaatagaccccaaagtcattttcaattagatttcgcagtatcaatctcaagttgttccttgtgcttgcgtaagtataatacttccctggactgactcctgattccaacacaaccttggagttgtaggagtcatagtactgaagacgctgtggggccttcccctcctggtgtaggtaccagtggatgtagccgttacttccttcagcaagatcacaagtgatttcagcagatgacccagtctgcctgatgactgacttcgttctcccttccaagttggaagatttctgactggctgcaatgggaacaacacaaaatataatgaggaattccttagtatggtactccttgcaaaagaagaaaataaaacaaaacccgtgatcctctctgtaggcagcgcactcaccaggagacaggaaagctagaagcaccgctagggcccactgcatgccttcctctctggggccttggaaggaaagggaccagatgaagaggagcagaagatcctcttaaaactcaggttccactcaacaaggaagtgatccctagcacagaagacagtaggaggaggtggtcttcctgagacacaagcagagggaagtgactgaggatctgtctaagaggactcccaagccttcctccctcccagaagggttggtgcctgggaggacctgcagaggagcccctgcctctctgctcaggtccgttctccggcgccctcttgtggcagctgagagcaggccctctgcagaagagagccaggggcaaggagagctcaggcctgcagcagagggagtgcagaggtgggggaagcagaccctggagtcagcaggcccagccctaggagggggcagtcccacagcaggctcacaccctgcccttcagagttgcagcagctaatgctgatgccaggaccttgtcctgccaggaagtctctgattagggaactgaaccaccttccttttggcatctgcgaggacacttggaggcaccacgcaaagcatatgtttattgtggcactattcacgatagcagagacttggaaccaacccaaatgtccatcaatgatagactggattaagaaaatgtggcacatatacaccatggaatactatgcggccataaaaagggatgcgttcatgtcctttgtaaggacatggatgaagctggaaaccatcattccgagcaaactattccaaggacagaaatccaaacagtgcatgttctcactcgtaggtgggaattgaacaaggagaacacttggacacagagtgggggaacatcacacactggggcctgtagtggggtggggggaggggggagggatagcattaagagatatacctaatgtagatgacaagttgatgggtgcaacaaaccaacatggcacatgtatacatatgtaacaaacctgcacgttgtgcatatgtaccctagcacttaaagtataataaatataaataaataaataaataataaaaatgaaaggactgaggatcatgtgtgttggtgggtcttggactctgctctaagataaatgggtgtatgtggggtgtgtgtgtgtgtgtgtgtttgtgtgtgtgtgatcctgtgggtgtgatctctttattagaggatttttgttcactgaagtaggagtgtgaggtttttttgttttttttttctaagtagttcagggtgccatgtcatgcaatatttggaacatacttaaactaaaaacttgttgtttatctgaacttccaaattgtttggtattgtatattttatttgtcagccctaccctcagaaaggggactgagatctgcagtacacctggattcacagatggaaatataggggacaaaagtagtacagtaatataattgtgaaaattcagtaaggcatacacagattaccaccacctgtgtcagaagtatatagagacacatgtttgaaagatgcataatgagatgtagaacaatgtctctcttaattgtgttgttggcctagctcacagagttcagtttttgctgtcatcacagctgggaatgagaaagggagggggctccggttggtctccctctgcctctggaccatatgtgcaggacatgaggcttccacaggaacagctctgaaagctgaattctcaggtccttgtgaaggagggaagcttgcctgccttggagcgtgaaaaagtcttgctggacagaagtctcacggtttaaaaatgggaagggagaggattgagatcacactagcatgcacagaaaattcttaaaacaaaaagataatgagagaaacttcatcagaatgtgaaaagaactataaagctacagtgctgaagagaaggcaatactggcactagaatgacaagattcatggaacacagtggaaaatccagaaagaaagctgcatgtatgtaatattttatcatgtgataaagtgatatgttaatatccacaaggaaatagtcaattatttcataagttctcttttggatattgacttaccatatggaaacaaatattgctgcatttctaccttaccagttacaaatagtgatttagttgtaataaaaagaaaatcattagacttaaatgatgatgaattgcatagaaattctaggtgagattggcctttctaaacctgacatcaaagtagacaccatagaaaaattgatagattttgtttttttcaaagttcaattctccaaaaggtgccaaatgtaaataataacaaatgaggagaaatatcttcaacacattggataaagggtcagtatctctaaaatggtgtatattaattcttacgaaccaataagaaaaaactaatcctccaatagaagaataggaaaagagtgtacaaggcaattctcaaaagaagaaatataaatgaactgtaaagttgtaaaatgatgctagtactcctacgatgggggaatgcaaaccgaattaacaaatctcattttctgaaccacagagcttggattgcaatcattatcaaattaaagtatatgacttagggaatgttaattaaccccccaatttctaatgttacattcaacagtactttaaatccttaatgaagtttctgtgtagattaaatacaatatgcatgcaatgtgcttagtacattaactaccagaatgtcagtacccatatttaccatcaatattattattattattagtctttttgagacagagtctcactgtgttgcccaaactggactgcagtagtgtgatattagctcactgaaaactccaccttctaggctcaagagattctcctgcttcagcatccaagtagctgggattacatgtgtgcaccgccacagccagctaattttttgtatttttagtagagacagggtttcaccatgttggctaagctggtcgcaatctcccggcctaagtattcctaacgactgtactactcaaatgctgggattacaggcatgagccaccgggcctggccagtattattattactaatacagtaattattgtataaaaattcctgatagatcaatgatgccatcattaaataatcaacacataaaaacattcaaataaatgatatggacgtctttatgcatacttatgaagtatgtgcacctttagaagtaagacacacaatccagacacgggaaaatataagattgattaaaatgtataaaaaccaaatataggaacaaaaatataaatatggcattgaaatagaattgatacatactgcgctatgacagagtgaaaaagttcaagaaaacggataaaaatattgttacctatagtgtcagggagaaaagaggaatgagaagtctacaatggaagctaaaatcttcaaatgtgtcatcttttataattttgacttcagttccaactaaatgttttacgtatacaaaacaaatatgaaacaaaacaaaataatacacaaatttccaaaatataaaaatgaaactgaacaattaaagcagctatatcaatgttggcatgaacaaatagagaaaaactatttcaaatgattttgtggaaaaagtattgtgattatgtacacaaaaaggagagaaagagagaaaagcaaggaaggaaggaaggaaagaaaggaaggagggtggggtgatggaaggaaaggaggaagggagggagggagagaaaatgataaaagcaagcatggaagtaagaaaggagagcgagaataaaagggagggcagagagagagaatgttcaactgcatatattggcctagtgttttagtggtcattatagtattgcttatattgttatagacataaggaataagcaccactctcagctgcgatctctggaccattattggatgtatgattcagtatgaatacccttcccatttttgtccaaaatgtcttgcttcacagctggaccctagctgtacctgtctgtcctaggaagcagagtgagtgggccttccccatgttctaggagagctgagagaaacttgctctcagccaggctgcttagctgaggcttggaggtggcagcttggtcttcaggaaagtcctgggggagggtggggaacagggtgcagctgctgccaggggagtgtgatattgcaggggagatcaggagttaagctgtgtttctctttgtacagaatacagtaaattcagggcaggaaatgagagttggctggtctatcttgtgtaccagaagcaaccacaggcagattttcagtgtctgaatcactgtgcctgtcccaggtggcacagtaatagaacccagaatcatttttaattagattttgcagtctcaaattccaattgctccttgtgcttccagtgtcatactttcctggagtgattcctgattccagcacaaccctggagtagtagggttcatagtacagaagacactgtggggccttcccctcctggtgcaggtaccagtggatgtataaggtacttgctccaggaagatcacaggtgatttcagcagatgacccagtcagcctggtgactgacttcgttctcccttccaagttggaagatatctgactggctgcaatgggaacaacacaaaatataatgaggcatttcttagtatgtcgctccttgcaaaagaagaaaataacaaaacaaaacaaaacccgtgatcctctctgtaggcagcgcactcaccaggagacaggaaagctagaagcaccgctagggcccaccgcatgccttcctctctggggccttggaaggaaagggaccagatgaagaggagcagaagatcctcttaaaactcaggccccactcaacaaggaagtgatccctagcacagaagacagtaagaggagctggtcttcctgagtcacaggcagggagaagtgactgaggatgtgtcttaggggactcccaagccttcctcccagaagcggtggttcctgggaggacctgcagaggagctcctgcctctctgctcaggcccgttctccatcgccctcttgtggcagctgagagcaggccctcttcaggagagagccaggggcatggattgctcaggcccacagcagagggagtgcagatgtgggggaagctgaccctggcgctagctggtcatggcccttgggagagggcagtcccacagcaggctcacatcctgcacttcagagtttcagcagccaacgcagctgccagaacctggtcctgccaggaagcttctgattagggccctgaaccaccttccttttcacatttgcaagtccacatttgcaagtccacccagggccattctgagaaggcttgagcctgctttattaacaggactgagggtcaggcatgttggtttgccttggactctactcaaataaaaacaacggcagtggctctcactaaccatcggtaggacattttaagcaccaaaagaataacacctacacaaattcttgaaaaacataatatagcaaaataaagtctcctctggaggttgctaagacaccatctcattctgaaaacagaaaagaaaataatcaagcatttaccttgccatttctgtacaaacattttagaataccacagagcttaagaatgaaagttctttttttttttctttagatagatagagtctcgctctgtgtctcagactggagtgcagtggcacaatctcagctcactgcaatctccacctccggggttcaagcaattctcctgcctcagcctcccaagtagctgggattacaggcacgcgccaccacacctagctaatttttatatttttcatagagatggggtttcaccatgtgggccaggctggtcttgaactcctgacctcaagtgatccacccacctcggcctcccaatgtgctgggattacaggtgtgagccactgtgcctggccgaatgaaagttcttttgtggaagtattacaaccaataaatttaggagaaatgttaaaatgagaatattagcattatgcaaccgtaatgatatgttgaatttagacaactaccatgaattgctttatagctttcacgtgccctggctctatttctctctctactattctatttctctatctcctgcattgctttctatcactatgtccttccatctccgtctttatgtccatatttcttttttctctgtcccgtttttgttcctccctttacatttttccttctatagctccctcttacagctctcagtctcctctattttgctttagtgctcctgtttcttactctgttcatatctttatgtttctgtctctctatctgcctatctctattcatctctttttctatttctctatttgtatctctcctatctatttactttctacctccttctctcctcctctctttccatttcttcctgtggtcactatagctcctttaaagtctttgttattccaacacctgtgtcgtgtcaggattagcatctgttgtttggcttttccgtttggagatgctaagattttcctcgtcctccacatgcggagtaatttcggattaaatcctgtacactttgaatatcatgttatagagctctgggcattgtttaaatattacacagaatgtggagggggtttttttgttagcaggcaactgacgcagttagggattacaacttcctactggtgtttggtgggcagttccagtcagttccgttttccagcctttgcagtacttgtcttgtcagacctgtcctgtgtgtgcgccacccagtggccattctaggacctgggcagtgcctactcctgcttcggtttgcaaggcctttggctttggagctgtttagggtcacgtttatgcatgcacagctagtgggtgagcccaggagtccagacatcattgcatgatgtttcttgcttaatcttctttctctctgcaagctctgcaatactttctagttcacaggaaatgcccctccagtcgtctggccagacaggtgtggctttagcacactgcatttcccaccattgtgtctccctccagggccaagtggtgagaggatagagaacaaaaaccaccaggattctctctcagggccacagcttccctggtcagagagaaggatccctttcctaagagctttaggctcctggctcaccatagctgctgccactgccactcagattgcctgggggctgcgagagaatggaaaaggacaaaaaacagaaaaccagggctctctgaccacagagagtccccctttctctctgtcctcacctggtgtacagttctgcatttcagattatctttgtacatatactctgattatctgagtacaggccaggggataattgaggaaaaataaataagaaacttactgggaattcatagtgcttcactttccgatttccttctccagttgacttgctatcatttatttttcaaagtcctcagattcagggttcatagttgcatttgtgagccagacaaggcagtgtgggctcactgcaaattttccagaagtggaactcattcttgataagtcaaagctccttcgattaagaggcgccgtttatgccccccgcctttttttttttttaaatacaagaagaactcatagggctccagttctgaattgaggcttcaagtggcctgatgtgcttctgctagctctttgctttctgtcattgtcattagaacaaatccaggctagcctgttggaggatgaaaccctgtgtgtagtggagctgatttattcagacccaggcactttgaccaggcagtccccctcccagctaacccagcagctgcctgacatgtggccaagcccagccaagatcagatgagcttggtttagatcagcagaacagtctagcaaacctacgcatttgtaagaatttgtagatgattattgtgctaagccactgagtttgggatatttgctacatggcgttattgtggcaatagtatggatagacagacagacagatagaatatatgaagagaaaaggaaagctagaaatacatataattttttttttttgagacggaatctcgctctgtcgcccaggctggagtgcagtgacgcgatcttggctcactgcaagctccacctccctggttcatgccattctcctacctcagcctcccgagtagcagggattacaggtgcccgccaccacacccggctaattttttgtatagaaatatatataatattttatatataacatattatacatgtataaatacatttatgtatatttttacaatatataaatatgcatatttctttgttttttctctttatatatatttttctatctcaatatttaccattatttctgtatatttatctctatcttcctaacactgccgcactctgtgtgtccacgtgtatgcttctgtctccacaggtctatcgttctctctctctccctatctctccccctaactccagttctctcttcttgtatctttccctatttctctgtctctctccatcactgtccctgtccctgtcgctatatttatatcacagtttctctctcttctctgttgttttctctctctccatcttccctccctctctcgctgtctctctgtccctttgtctctcaccctctctctgtgttttgtatttctttctctgttttctctctctctcccccgccatgatagagaactatacctctccacgtgtctctgtctcttgctctttttgcttgtatggccactgtcctagtcattttctttccttctcacttccactctgctctctgtccctcttcaactttctactttctgttgccgtcactgtctctatatcatgccctctccctcttcatatgaacactctgtcccctcttgtgtctctccttttgtctctatcaagtcctccttgccagtcttctggggtcctgagggtgtgatctgctcactatggtgggagagaggtgcaaactcacagatgtaaatgttcttctgcttctcctcgtaattgtacctttacatatcaagaggtcagcattatgatgatgatgatagaagaattgtttaaaaaaatagcactgccttggggagaaagttctagtgcgcagacaattgcttgtatttctatttcagtctgctgtgagatgttccctagcaacactatgggaaacaatctgcttaccatgaattattagaatttcctcacctctaaatggttgtctgggctctctgtatcactttgtgaccgcagtgacgcaggtcaatagtgttttcaatgagcttaagggggcacacacctcagtatcaagagcacacagcacaaggcctggaacgtagtaggcatttaatgtgtatcaatgaggctgggcacggtggctcatgcctgtaatcccggcactgtgggaggccgaggcaggcagatcagttaagcccaggagttccagaccagcctgagcaacatggtgaaacccagtctccacaaaaaatacaaaaatttagctgcacgtgatggcacacgcctgtagtcccaactacttgggaggctgaggtgggaggatcccttgagtctgggaggtcaagtctgtagtgagctgtgatcgtgccaccgcactccagcctgggcaacagagtgagaccctgtatcaaatatatgtatatttggatgggataaatgatcaggtgtgtagtttagaaggctattataagggtgtcaataaggctgaattatataacatatattctttccatagaaaattaaaaggaaaaatgaaaaattctgcaaagaacagggtttgtatatgctcagtctgggctggggcatagatgggaatgagtaactcatgcacatcatcactgatcatcccgggctaaaataggagtggacaatggagaagatacgaagccagagtggatggatgaagggtccccagtttacgttcctgtgtcctgtgctgctcactggccgctgcatgttcccagaagacagcagcatctcctgccagtgctgtggccaggcggtgtcaggcatcgtttccagggaagttaagtgtgtcccagaaacctcagccaaagcttcacttcctgcctgctcttcttacaggccctgtggctgcctggtgccctgggaatggtccggtcatgggcctcagcccaggatgagcagccaacaatgcaatcccacgaagagtgtgcggaagggagaggttacttctcaagatggagctgccaaatagggacactttggagagtctggcctgagaacttttagtttcaagaatgtattgctttggaaaagacagaataaaagtccaagcactgccacttagaggttgtatgtccttgggaaagtcactgtacttggcaattataacctttaccctggatacaccattcatctcctggggccaggggttgtgccaccttgttcatttctaaactaaatgatatctaagctagtctttaccacagtttaattcttacaataatactccaaaggagatataatcaaccacatttcacagatgagagagttggaatcttaaaaaggttaaactcttcgaggtcatttgacgaataaataatggagcctggatttcaactgaagtctaacaaattccaaaatcctggctaccggccatttatattcgtgtgtgtgtgtatatatatatatataaattatataacatatatacatatatcatatgtatatatattatatatatttctttttaagttataaagtataagagaccatgaagaaaatttcagaaagattttagaaactcaagggtcactctcagctgccagtaagaaaacaacctaagatactgttgaatagtattcattcagttaattatggtggacctcaaaaagtcataggaatttcctctagcactgttaagtaaatagttaatggccttttattaaaagactaatttttaaagtcatagcagaaattcttgatccattaaatgatagcaaataccctttgagtgtcaaacattgtatatatttattcttttcttgcaagcagaaaataggtgttacttatccccatttttcagatgaaattgaagcttacagagaggttaaataactcctcgaggtcacctagctaataaacagcacaccaagaatttgaaccaaacagacaagtctccagagcctgtaccataagggaactgcttggctgtttatgattcagggattaatttctgtcttcatgaagctgctgcattttgatacaaaatgttatatttccgatttgatttcaactcccagcttcatgctttaaaagaagtagtgttttgactgcatttagttatttgtacaaacctgtagcaccccctcctggccattcgaggtataccatacatgttatattaccccaatattagaccccaacgaatggcaaagacttcgtataacgaatggaaaggtccccaaatgcaaggcaggttccaactgcacaccttatgtgcttgatagttttaggcaagagactccttcttgcagggctgtcatttcccccgcctcaaaatcagaggagtgggtgatgtttttggtctcttctagttctaattgtgattctgaattgaattgataaactggatattgaaggaataggtgtggtgaaatgaaaaatggaagcttctagtttttattttgatccaacaataatgcatgttatttgcttcctcttgactcaacattgctctaggaaaagcctattctatatagactccttaacaaaaacattgattcctaaaggtcttctgaatgtttggatagccaatggctttgcagcccagcctggccactacatgaggccgatgactttaacaaacttatttcaggccagtgtaaatgcagtgttcaaaaatcccacctaagaaggatgggaacacggaggtttgtgtaggtaacatgcaggtgtgtgcacatgtacccaagaatgcacacacacatacatggacacaactgcaattgatacaaaaggctgaactgtgctgattcttacaggtacttggttctggcccagtctggaaaaaaagaaaagatccttagtctaaacatgcatacaaaatagaattcccaccatgctttgatgttatctatttataattttcaatgtttcaatgttttgtggtcttaaaaattacaaggattattatcaataatccttgtacctaatgtgccttgactctgaaggacatggtaactgcctgtggtttagaaaatgttttggctaaaagacaagttctcctccctcctctcatttttatatcacagagctgcacgggggcttggatcaatgcctgaatccagtgttcctgagtgcagagcatctttgctctgggtgagctttgaccatcctggagaagaaggctgctgcgggggtgggacaaagccaagaccaatgcccagcggccaaggccagccagatggctctgtgctggcagccagtgtacacggattttacctgaaggaaaatgtcacattttccacagacaactgaagaaagagagctctttggattaccctaattgtgatttactcattggaaccactgttttggattgtccaaaattaagtctcaaagcttaaatatgaggcttcagggagttatcctgaaatcagtgcttggtatcttcttgttttttgcttgttttttaaaaccttaattctcatatttttctgtcatatttctcagtgcctggtacattatcaccattaatccatgccagttatgtacagttttgcatgtttgttttttattttactcttttctctccttcattccctattcctgttcccccataggtgcccagtctaatgtatttgatatctgtccttagagcctccgtatctgtgaagactagagtcatgcacttcatcacatttcagtaacgatgggccgcatgtaccacagtcccatgagatgatagaggtgcagaaaaattcctgtcatctagtgacatcgtagccatcataacatcacaacacgactctcatttgtggtgaccctggtgtacacaaacctactgtactgccagttgtataaaagtctagcacatccagctacgcacagtacatacttgaaaattataataaatgaccatgttactggtttatgtaattactatattatactttttaatcattattttagagtgtacaacttctacttgtaaaaaaaaaaaaagttaactgtaaaacagcctcaggcaggcccttcagtaggaattccagaagaaggcactgttgtcctaggagatgacagctccatgtgtgttactgccctgatgaccctccgtgggtacaagatgtggagctggactacagtgatattgaagatctcgaccctgtaggcctaggctaatgtgtggctgtgtcttgatttttagcaaaaatgttttaaaagtgaaaatgttaaaaatagaaaacagtttatagaataaggatataaagaaaatattttgtacagctgtataatttttttttgtttttcttttcctttttcttttttttttttgagacggagtcttgctctgtcgcccagctggagtgcagtggtgtgatctcggctcactgcaacctctgcctcctggggtcaagcgactcttctgcctcagcctcctgagtggctgggactaccggcaagtgccaccatgcctggctaatttttgtattttttgtggagattttcaccatcttggccaggctggtcttgaactcctgacctggtgatccacccgccttggcctcccaaagtggtggggttacaggcgtgaactacagggcctggcctgtttgtgttttaagctaagtgttgttaggagtcaaaaagttaaaaaataaaagttgctaaagtaaaaaagttacagtcagcaaaagctaatttattaatgaagaaagaaatgtatgttttgatcaatttagtgtagcctaagtgtccagtgtttatagtctacaggagtgtacaggaacgtcctaggtcttcacatcctctcaccactcactcattgactcactcacccagagtagcttccagacctgcaagctccattcatggtaactcccctatacaggtgttacagtacttaaaattttatatcctatttttactgtaggttgtctctgtctagatatatttggatacacacatacttaccaatgtgttacagttgcctgcagcactcagtacagtaacatgctgcacagctttgtaacctagaaacaacaggctacacctatagcctctgtgtagtaggctgtgccatctgggtttgtgttctacaacgttgcattctacaatgttcacacaaggatgaaatcgcctaaggacacatttctcagaatgcttcctcattgtcaagcaatgcatgactgtatatagaattgttcataaatactgtgtttttcatccatgtaaatggcatgccatttctacctatccacgtctgcacaccagctcatgcccctcattcatgctcctttctgctgctcaccgctccacagctggcagcccctgcattccatccatccattcccccaaacatgggcatgttgctatcagcagggagctgtgatggacccctcacagggtcctcttattcctcgtgcaagcctttccctgggaagttcctcccagcattgctggtcagggggaacacacactcacatcttcactaaatgctaccagtgctatggtgttatcagaaactttatttatttattttttgccaatatgatagctatcaagctaccccatctctactaaaaatacaaaattaggcctttagtagaaaccctgtctctagtaaaaatacaaaaattagctgggcatggtggcacacacctgtaataccagctacttggtggctgaggcaggagaattgcttgaacccaggaggcagaagctgcagtgagccaagatcgcaccactgcactctagcctgggcaacagagaacctgtcttaaaaacaaaaacaaaaaaaatggcacaggtctgattattaggaagctgaggttcttttttatacttagtattcactgaagtgtgaattacctttcatgtcctctaaacataccaacaaggaggctggagttaggacttatgttagagccagcctgcctggggcacagcctggccctgccatttattgactgtgtgactttgagaaagcttcctcatgtaactctatcttagcttccctgcctgtaataagtaaaaacagcaactacctcatagatttgtaaagattacataaaataatacatgcaatgcatggcaaacgacagtcaacgaatgttattattatattaactattgccatattataaatataaataaatataaatgatataaacaaactaataatagtaattattcatttattcttgacttgaatgagatccttgtgtactttagacatttatcctttgtgaatttgggatggtacaaatatcttaggcaagtctatcatctgtctaccaactaactatctcaaatatcttttcattaaatataaattcttaattttggagtcaaactctttttttttttttttttttgcccatatactttgggtgtttccgagtctcatttaagaaaactttcccctctccaatatcacagaagtattttgcattttcttctcacactcagtttcaaattttattccatgttgatcctgggattagggtttctggacttccctgaactaatcgttcaatcagcctcttgttcgttcactcagcacacaagtatacaagatccagaagtgaatacagcatgcagagaaggttggagacagtgtgcctcttggtaggggaaatgaagggctagggagtatcatatttactctaaatgtggaaagaatgtagaaggatgagaggacgggggattttgaggatacagggcttggactacgcctgggggatgggattagaggccaacaggagaggggaaggcatcccaggagaggggttttgcaaaacggcaagaaaggtgtatagctgagggggagaaggcgggtggggtgctgaggagacgcctctgaagcaggcagtggatgaatactggggaagaggtgaagttcagctctgaagaccaagcagaggctcctggatctggtatgacatgcagcagatattcatcatttgtgtatgtgtttctgagagggagaggcgaggagggagtggggacctgttgggtacttaaaatgggtgggcagtagggtacgaggaagacaagaagtcaggtggcaagggagacaacaaggatccaatttgtcttctctgtcagtgtgaagaacagaaccccgactagattaaagtgcaaggttgtatgttttgcagggaaatcatagcaggtgccccaaatctggaaaatgatgcacaaaggaagctcccaagtcttcaggcccaagattctgaagaatggaggagcccctcagtgacgcaccatggaggggtttggaaggaagtccctcaagcgtgaagtctaaatcttatgaatgcggtccccatgtacagtaactgacacttagctggtgcttgatatattttaatgaacaaatgaacatgtggacttggaagcaataattggacactccaaaggcaacattccttggacaactggaacacaaattgaaggacaggtcgctattgccccaccccacttccagcaaccacaggaaggaggaaaaaaaattaggaacagtaacagagaaggaacaacaagagaggtaagaaaacaaggaaagttcgtatcttggaatcttgggggagaattggaagtttggtggcatctccaaatgccacagacagcactttgtgatcactggtagggttttggagagcagagcataatgacacagagtttaatatttactggtgggagagggtgtagggtatcagccatgtggcaaggtgcgtatggacaaggcactcctgggctggactggttttacagggcatcagagtgcagcagggagggaaataagcatgcaattctgacccaaccctcaagaatcaaacaacctgagtgtttgacctgagatcggggggactgggaattaactggattttaggaaacaaagataaaatttagatttctttggaaagagcttcagggtacctacctggccttcctctcaatttgcatagatgtaagggttatgtctcaaatatcttttaagtggaaaaagtcactatttgctgctgcttgttaagtgatccttaaaaggtattaccaatgagtcacaaaatatttggatggaatattaagcttattcgcgcatggtttatttggctttatgaacaacttatcaaccccctactgtgtgccttgaagaacgctgcccgtgaacatccaggcggtctcctcctggtgattcaggacaggatcatcatcaaacagggatgcacctgcagggctcaaagatgaacaaaaccacctggatctccattttctaagtcttccaagagaatattggtcattgtcttctctgtgctgttaccaaatgtccgattccatttactgaagtcctaggaaagtctcacaccaggaagacggtagctacagcactgtgtagaaaagctgtgcgatctgctcatctccaagttctgacacgtttgtaaggtttttagttgagttccaagtaaaaaccagaaggcagctgttagttgggctcctttgaaaagaggagtagagtcctatcaaggccaatccattggccagtctatttctaaggcttcaaggtgttcagccatgcaattttgcatggaataaagcactgagcttccgccatctttaaactcattgagttctcataacttttgtagtttcccgaaggcattttctttaatgggccatctgaatgggccatggggtcatgctgggattgttccaatgacctggttagaggcttctttatgtaagaaaagagggctcagaattctaaacgtgcacactccactgggcagcctaagatgtgatggatatggttttctggctgactccaaagccaccccagctttgtcaggaagagcaggcgtggtggaagcaatgcaacagcatggtatgggagcttttacctgtcccaggggccctggctaccctgagatagtgttaaaaattgaaattgctggccaggtgcggtggctcacacctgtaatcctagcactttgggaggctgaggccgatggatcactaggtcaagttatcaagaccatcctggccaacatggtgaaaccctgtctctactaaaaatacaaaaatcagccaggcatggtggcacgcacccgtagtcccagctatttgggaggctgaggcaggagaattgcttgaacctgggaggcagaggttgcagtaggctgagatcattctactgcactccagtctggcgacagagcgagactctgtctcaaaaaaaaaaaattcaaattgccaggcaattttactttgcaattatatgcatcacacaggtttacatgagtgactatttgtcatattggtaggaatgccaggtaggtgtatgtttaataagaactactggctttctttccaaacagttctgactcataactatttgaaggtctgcatgacattgggtttctaagaagaatcttaaatcatggagaggaagctcagaaaggaccaaggcctgactgggtgtggtggctcacgcctgtaattccagcactttgggaggctgaggtgggcagatcatgtggtcaggagatcgagatcatcctggctaacacagtgaaaccccatctctactaaaaaatacaaaaaaaattagccgggtgcggtggcgggcacctgtactcccagctacttgggaggctgaggcaggagaatggtgtgaacccgggaggcggagcttgcagtgagccgagatcacgccactgcactccagcctgggcaacagagcaagactccgtttaaaaaaaaaaaaaatgaaaggaccaaggcctggttcaaggccatttgggatacaatacaaacttgccattatatgactgggtgatgtgcctaggatgggttggtggtgtgagaacttgaacggaataactgagaaagagaagtggaaagaactttacactagtaatcccagaaagtccttgaaactaacattccttagaaaatccactgaaatggaaaacaatgttcactccacattcaaggacatttctggggaatgccaccaccacacgcccatcccctccatctccttcattttcaatgcattaggaattcttggattttggcaattcctgaaacaaacaaacaaaaaatctgataactcttatttagtgtaaaaaaaaatccaaaggcattttaaaaaacaggactaaatagctaattaaaatcacgtcatttcagaagaacttgttacattcatctaggaacattcatctagggctacagttatctgggccatgtcctggcaaactgtacactgtgagcagccactgtgggcaggagggtgaaaggaatttaagaatgattcatcacatcttctgctccaggagatgtggcaagccaattatctttgcagaacattaggtgcattttattattagagcgaatttttcagtcttggcttttaacatcctgtgtgtactctactgtcaggagtggctttctattacgaatcttacattgctgcattccacttgctgaattatcagtcatgctcctgggcagtgacatttgcttttcttgcactagaatagcattcatgatgacccagcttctctgtatattagcccctggaaaaatcttggctcaaaaacagttatttccctattcacacttaaaacaacaaagtcagtaatacaccaggaagattcaaaccatgaatcaggaatacatactaaatctaaaagtctaataatatacattcttgatcagcctatgttgtataaagaattatattagcagaaaagagtccaaatcaactaaaaggatttgcgttaagaattctcttttggaaataatggccaagtgaattcacttttctattccaactgatctaatttttatgtacctacgaacataaacatgccaaaaaggaaagtgaccagaaaatgaagctggtgtgagaagaaattgctgattatgaaggtcgtaagattatcagtgattcacggactgggagtctacagccggcacctttaagggctctccgttggcagctgttattggtgctgcagtaattgctggatgtcagggaacaccgagtgaccagcaatgactggaatgaaagaagtggggaggtgcggtgggggcgtggagtgcaacctagtggaagaacaagcatatttctgcacaaataacaactccaataccaactgtttcaagcagagtatccgactggaacaaaatttccaaaaaaaaaaaaaaaaagactcatcaaaaggaattagggtaatcgttgaagattaccaaaggtttatttggaatgacacagcactgaaaacataattgttacagatgatttgtggatacagcatacaccatctattttactttagaacaatctgtgaagatgagttgcataaatagaaagaggtggaaatatagaggagctgtttttatagtgttcttttgggggtagatgaatatgccccatctttctacccaatctcataaaggcagaagagaagactgcttagctgcccatcccaactagcctacctccagccacagcggctggacagctagataaatcaggccctgccttctctgagggtgcctcagtgtagtcgtgctatctgtcatctcatcctgaaaactgcacagtacaaacacagatactgttgactcttttgccaatgggatggctggttttgccattaggcaaaactgcaattgtaatgccagacagaataagagcaatgcatgtatcaatgacaattgagaggcaaagagctacaatggaaaggaaagaagcaactatgtatatgtagccttctgcatacacatagatccaggagtcatgggaactagcttgcgtgactgtgtgtccatatatatatagatgtgttggaaaagaacattgagaacttttgcagcagtttagttttaaacatagtaaacctgaaagggagcgagagcacgtgctcacacctgggcaggggaataagataatcttgtactacaggataattcatcacatcttctgcagggcagccactcaatacgatacacctgatgcagagaaattaaagtctgatctggagaaagctactttagaattggtgggaggggatcaagtacaagagtctccacagcttggacaaagcacaaacaaacctgttattgacaacatgggaatgagtgaggattttttccttaatttactttttttcctcttacatttttttgcacacatgctccattgatacatcttcccaaggtttgtctggcatcagtctgtaaatcattaagagcataataacaaaagtgaactcttcaggttttcatgaaggtttaaaaaccccgtaactgagctccttcttgcagtacttgttgccctaatctaagcgtcgggtgaagttctctggaaagaggcctttgtaggtggcaaggtctctgtactgaagccagtctgattccttcactcccaccagccagcctgcatcctgaaaaacaatgacagaactttcagggtccagcaaactactggaaaatccacactgccacaattaattaataatgtgttacattagtgttgtggttctgaaccaggatgtcacattacaggtaaagtgctgtgccgtgatcaatgggaaggcctatcccaaataagttgttagttaaaaaaaaaaagaaaaagaaaaagaaggaataaacatttgcaatgacttattgactgtataaagtatagctaatgctttgtacattgtgactgtacaaagcatagttaattgatattaactggattataatatgagttcttaaagaggagaaaaggattacaattacaaccagtgcaaagacaggaataccatgtgaaagcatttcatgcacaagagcatgacctgttctggggtcacagtgtaaaaaaggtttgaggttgcttgggttagaatggaatactgatgaggccatggaatatcttatatttcatcccaagccacttgctcataagaaagaactctgacccccagctcatatcctataaccccaataaactacctatgtagatgtagggctcatcaaatactaaaagctagatgtgtgttgccttatattactatttttgtttttataatacctaatttttcaagtttatataaactacaaagcagttggatgtcatggcattcttgctggaagcgctcctatatcctttataaattattcctcataaacatttgtctgtcatatagaagtgccatcacaaaaatgaaacagtttgccccagaaagggtaaagaacccatccatatatggtcatgcagaatgggagatgatacttaaaactgagaaacagaggctgtggtctgcccttggcttcctgaagttaagcagagtctagctggaaaagctgtgttgaaaggaacagtgggaaatgagaccataggaagtgcaaggagtgggaaatgactatctttattatgttaaccagtgcagaaaggaaattccagttcagatgagggatggccaggtttagtctgaacaaacccccaacatagttcaagtatatcagataaaatgaggcctcaaaaattaaatgaagaagctgaattcattcccttttgatataatctgagactctaaattgatgctgccatatagacaagaaatataagtatttagacagcccaatttttgaaggcaggaaaaaaaccgctgaggaaaaaaacgactcaataaaataactgataatatcctagctgatgaggaaaagtgccctctttaaaattatgatgtcatatatgtgaaggacaaagctatgcttaaaataaaagatgatagctaaatattttctgaagctctagaaagcatataaaaggtcatttttcccccacaagtgtctatatttgactttatttacagtaggtgaaaaatctaatggagccaagtagagttaagcacttaaaaattgtttcaataaagaaaacaagtaaaggactacacaaacccacaatcaagatatattccaacacatataatctgaaagacaacttgtaaagaatattagccaacatcaatctttagctgaggaaaatataaaaaattaaatattaactgcttaaaatatgtggtagaaaaagatttcctgtcttggtaatggtagaatggcttgtattagacaactccttctggagagaataattaaaaacattggaataactatatatctccaaatatctatatatacacatatgcaactatttatataaacaaacaactcttggttatacaatatataaagtgtaaatttatatataatgggatgggtataaataatgggtaaaactatttgaagatgctggaaatgaccaaaaggaggcagaaattagaaagtatttgacccttgaaagtagagaactgcaaggggtgagatctatgctgatacagcttttcccctgaggattatcctcactcagtgtgatgtggggcattcacagcatagagtgtaaggctcccagagaagctgtacactcaggggggttatcttgaaaagaaaggaatcactgggggatgggtatcctaacgtatgtggataaactgccttgaaatcctgggctgacccccaagctgtgcatgcataaagggtacagacccaccctaacaaagtataaaaccaactcccatcaattcaagggaattatccagtaatttatatgtctgctaaaacaaaaataagcaattttcagatatagaaaacagagtcagactctttaccacgtatggtctacctactatgtctagtatcaattaaaaaattattagacatggaaaaacaggaaaatatgaccaaaagattaaaaagcaaacaatagaaatatgccctgagatggcccagctgttggaattagcagtaagaaatttaaggcagctattataaatttgttcaagtatataaattgagagacagtaataatgaaagactataagtgggaaatctcagccaagaaatggaaacccatatgaaataacaatatggaaatgaagaattgtaagaatctaatatctgagatgaaaaagtcactggataaatttaactacgaactcaaagtagcagaggaaacactcatagcacttgaaggcagatcaatagaaattatccaacctgactaccagagagaaatagtgaaagaaaaagaacagcatcttagctatcaagaagtccaacttaagtataattagaaacccagaaaaaaagaacaaagagaataattcagaaaaaaattaaagataaaaagcaaatgtagtgaaaaacattaggttacaagtctaaggatctcagtgattttcaagtatgaagaccataaaaaaaaaaaacctacccaagcacaatatatttaaactgatgaaaatcaaagatacagcgaaatttattaaaagtagtcagggaaagtcactttgcatacagagaagcaatattaaacaaatgacagctgatttctaattataaacaatagagaccagaaaacaatgaaacatgtttaaagagttgaaagaaaaaaaaatcaactcagatttctaccttagtgaaagtattgttaaaaattaagaataataaagacattttcagatatacagaagccaagaagatttgctgccagcagactagcacttcagaaatagctaaaggaagttctttaagcagaaaggaaattaagaccagatagaaactcggacttaaggaaagaatgaagacctggaaatggtaaacatggtggtaaacataaaagactaactttttttccttttatttctttacaaaataacttctggttaatgcagacaaaaatcccattataaatgggatttttaatatctttgagatgtgtgatgctgacaccttttctttgtattggtaatttatgctttgtgacttttctttcttgagtatttctaaggttttaataattttgttaatcctctcaaaaacctactttcggctttatcaattttatctgttatagtcctttattgcattcatttgtgaatttatttttattattttcttccttctatgcatttttctatttaatttctatttaatgatcattatgaaatttttttttaactcacactatgatttatttgacccatgggttatttagaagtgtattttaaaatttttaaatctttgggggcttttaaagatatattattgttattaattttttgttttttgagacggggtcttgctctgttacccaggctggagtgcagtggtgtgatcatggctcactgcagccttgaattcctgggctcaagtgatcctcccatgtcagctttttgagtagctaggactacaggtgcacactgctgcacccagctaattaaaaaaaaaattttttgtagagatgaggtcttgctatgttgaccaggctggtctggaactcctggcctcaagtgatcctcctgccttggcctcccaaagtcctgggattacaggcatgagccaccctgcccagcagattattgttatataaatttccaatctattttattgtggtagagactgcttgacccaacacctgatgtatcttggtaagtgtgttgtcaaaagaaagaacaaaatgttgaacatattaagtcttaacctcaaaggcagtgatgcttgaatttattttttaaggggagagctcataaatctctttgagaatagtatggaagttagagtttttctctccagaaaaatatgtttacagatgcatttacttgctctgcataccatttcaagggctcacatattttatgaatgagaacaagatgggagttctcagtaccttacatcagaccactcttttaggaagtgatatttttaaagaatctctttaagttgaggtataacttaaatactgtgtaatgcagagatgattaggtatatatagttcaatgagttttgacaaatacatgcagacatccctctcaagatacaaagcatttccatcactccagagggttccccaggttctttcctcatcaatatccacacacccagaggcaaccacttttgaaggggtcttttagttcacattcatagtgtctgcatttcctgaagacaggtgttacagagataacattcccagaaagtggttacgtgataagaaacagtcaactgtttgtattatataaaaaaagaatgcaacagcatcccaaaagggtgtcctagaaacctcgttaatgatctatgctgtcacaagcccttaagcccttttcagatggcttgtagcatctcagaaaatagaaacatctttaggaagtgattgtgtccaacagaccctcagaaaaaaatcaacgtagcccaaagcatcttcctatcttttcttttacctgatcagcttctgaatctgaggggaccaccagcaccacatcacccctttgtaaggtaagttcatcagaatttgctgcctcaaaatcatgcagtgtttccacctgcagaagataagaatacataaaaatcaatttcccagccagatttcaagcagacactcttacaagtcactctccaacctggatgaaaagaggaagatatttgccatatcccaaggaggaagaaggcctctaaagccagaagggaagtcctattctctgatatgaggccattcatatgtatatttattaatagtaatgcaatgccctctacaacagggaaaagcactatattaatcaaattttaattcatcttatttttgttagagatttgcattttattatcgctgatgctttattactgtttgttgtttaactggaacccaaaatgtctaaagctcctctaaccccagcttctgtcaaataataataaggaaaaccaccacttgcaggttatacagtaattactactaaataaaactctgtgatcaattctgtgtaaatatatttccttccttccctatcctaccttatatacaatggcaaccagtttcttttcctttcccattttgaaaaagatttccttaaaattttattatagaaaaatattttaaagcagaagaaataacataatgaacccctatgcgtctgtcacccagtctgaatcactctactgtcatggctgattttatttttcccacctttccctcaactccacccctgagagtaaacattggcttttaaagtgtgtattttgccattgagcatattcatagaatcacaagctgtcagagctggaaatggattatgttatccctaaattaatttttctgattggaaaactgatacccagagagagggtctatatggggtgccttaggttattctacagttagtgaggaggccagaatgggcccagcaagctccagccgtgcttggcacaaggcttcttggactgcttgtgctccagttaaaacggaacctggcaggaaacaaccccttatctagaggtttagcttttcctccaaattaatttattcataaatccattatagccacccctgtccccacaagaggtagcaaggtagcagttactttctaatggagagagacaaagacagagagagagagagagagagagagagagagagagagagagagagagagagagagaatgatacaacattttacactttagaagaaaaagagctgatttttaaatgtaaaatcaaatttaaaaacttaaaattccttttcagattctatcaggaaacatctgagacaggaaacacttaggttaagccagtgtttttaggtatttactaagtttttttggtaagaaccctttggtttatgaaggctctaagtagcctgtctgagcaaaaccttcttcccattaacttagccgccttttttttctgccttttggtgcaagttcattcatacatgaatccattaatttaccaaatatttatgggctccctactctgtgtcatgcaccctacaaggtgccagagttgactgaaggattgctgcccgacccccaggggatatagccgagtcaggagctcttggtgattccaaggcctggtctgagccaggctccacagattcacaggcacctgggggagtagagaggagggagggctggaaaagactctcccattcattacccaggggcatactgtttgccctgtggtgaacttccctttaattattctttgttaaaacatgaaaatctattactgtagtcctggcttgtccaagtgatgttgtggtgaagggaaagcagttcacagaaataataattgcaaaaagtaaaagtaaaaactggaaaaccaaaggcttgagcaaaagggccttaaagcaaaaaaaggataaatgagacttaaaaaataagaataccttgtagagaaagccaggaggcaattcctgagaggcctcccttgcagatgctagctggtcagcagcccccatggctggtgcagaaggcgtgggctgagggtcctggataggcttctgctccgtagccagctccggtgtctcgctggtggggcccggaggagccgcgtcctcggtggtctccttgggctctgcacctatagttatttcgttttctccttcctcttcatggttggaggcaggctctatgaccaccgaaggaatgaccttctcctgggggaagaaaaaccgtggcgatgccggcagggcctggaaaacagaacctccttgtcctgcacaacctgccttagcccccagcccaaagctggggctgccacttccatacttccccactagccagactcaggtctgggccttccgctgtgccacacagcctccttctgttcctcctgaggcctaaacccttagtggaattaatttctggatccttgaatagccaggcagtttggtaagcatgaggtttcggtgggaattgggaggagggataggggatgggagacagagtcttgaagggtgagggaggccatcctgagagggattgcaggaggagtcaatgcaggccggcctggttctttttttttttttttttttttttttttgagacagagtcttgctctgtcgcccaggctggagtgcaatgacgcgatctcagcccactgcaaactctgcctcccgggttgacgccattctcctgcctcagcctcccgagtagctgggactacagacacctgccaccacgcccagctaatttttatatttttagtagagacggggtttcaccgtgtgagccaagatggtctagatctcctgacctcgtgatccgcccacctcggcctcccaaagtgctgggattacaggcgtgagccaccacgcccagccccgcaggccagcctggttcttgtcccacggaaccctaactcttgcggttggcagttcacctcctgtgagccccttcctcccctcccccagtcccaggaggcccccagtgcctgaaccatgcttgctgatgaagatccagccggggtttggagatcatccactagtccttcgcttgtgattatcattccagccccacactgctgtggccgctggagggaccacacctccacaatccactccaagtactctagtgtctgaaccaaaggattaggaccaccctttcatttgtttaacaaagatgagcatggaggggagtttcatcagcagaacgggagtctttctatattccctctgctatcagcagactagagcactaacattcgtcaacttggagagataataccgtctttccatgagtagaacaacatacacaaaaacactctgggcactgtgatgagaaaatctaaggggaaaaaggaatattcttttaagttccttctcccataacactgttatctgcctcagcccccagcccaaaaagggataatgaaagggataattcagtttcaagttttaagtaaccctggagaaatttttgaaaacttattgggagtaaaatcatcagaagaaaacaatgcataccattaagccctctcttaatgttgccttctagaataccgaagaaccagacaatggaggcaggccctggggttggaggccctcgcagtggtagagtatgtggctttgtggcctctcaatgctgctctgaggcagtgccgagcagggccccctcccgcctcatgcacggacctaatggccctggtccctttgtttcccttctcaaagtgccacccagtggtgggctcttggtaaaaggggcctgatggtgaatttggggcactctaatgataataataaccaccaaacagtaataagaataataagatctaaatactattgagttctccctgggctgagtgctcacttcatcacattctctttctcccggctccattctcatccttttcactgtcctgcttcattcctttctccacgtcaccccagtttcccattcccgtttccatgcttaggcccagtcagccacaggccctgagggcctatatgcaacattgcaatgctgatactgagcagctgggattagtctttctgagaatctgataataatgttgtttggtggagtcacaaaattgctacaaacctattatacatccaaagagttatcaccatgaaccaaccaacagagcacccagcccatgctacttcccaggagctcccctggctgcgacatgggacactcacctgaggcactgttgcttcgagctcctctgcttcaggttgggcactctctgcaccctcagtggtttcagttccaattttggcctcctctaaacttactccttccccggcagggacagtggccttctccgcctctgcttcctctcctggggccccctcagctgctgacaccaaggttccaacagctgcatcagcatcagctccaggtatgatctgcagggcagaaaccagcaggccacgtctgcatctccatgggcctctgccaggagtcaaactcaagcctatttctaatctcccctctgtggaggctattcagatttggaacattctttgcactcccaggatttaggtacagcagaatctgccatctattcatcaacactccgacttctcttctgctgagctcccaacaattctacactcctcagctttccctgctgtcaggtgtagcaaatgggattagaatggaagtgacatacaccattccaaagacatggcttttaaggtgtaggtggtcctctccacaagctatttccatttttattggctggaagcaacaaatgaggccttaggggagtgaaagaaataaaattgaatctcgggaccttaaacttaccatgccaaaggaaagctaagcttgggaacggagtcacacgaaaaccaccttccttttgttcccaaacacagggctgtaatttcacacacttccttcatcttatgtaacatgcagaactacagagcatgagatgaaggcatgagtgagtttgtccccactccctcttttcacatgtaaaatgtagattcactgagcgctaatcagagcctcacaagaatgtgacacttgcctcattgcctaaccaccctctttttaaaaaaattatttccttcttgcttgctatttcccctttaaatactgaagttctcaaaactctcttcagaaaaagcacacgtcacagatcctcctttgactcgtgtctctttttcctgggtgcatccttaaccttggctaaataagcctctccatgactaagacgtgccttggtcactttttgatttacatggcacatctgggtcacaggatggaagtggcctgggtcagagagaaaagccatatcagaaaagcatcctcatcacacaaagtcaaaatttagaaagagtgcattttagtataaactttcaaatctttgtgaggaaggttccagaagccaaatcactttcacaggaaaaaaaaatacataaggaagctttctcaatgaaaaccctcgagaatgaaggggaaatcatttttgtaatcaaatatgcatggtaatgctccaaatagctgtagagcctgttataggcaaaatgccaaaatcatagtttaggtccagtaaggagaagtgaaatagaaaaaagtcagaattttctttctaaggtagaaacacagaagaagagttttaagtactatttaaaatttgagataatgaaataaaggaaatgcaatcagaaattttagttttgaacaaatgggttggagtccaactctttaaacaggattctgacaacatcagcttggcagacttgatttgagaggttcacgtgagaaagactatgttagaagaatctcaggttgatcttatataatatatccgggacacatatttcaaaaatggctcttactatctgatgggattaggattaactattttttctttgttgaatacattctatccagttcaacatcttaagttaggaaggccctaatattgcaaatattaactttcaaactcagaaaacagaaaaggacaatgaagagtacctccgagtgagcatcagaaatcggagatgaagaacatgaaccacacatctacacttataacaaagcagttttaaaaacgtttctgctggctcaaaggtacaggtaatagtttaaataaaaatgcctgttacagaatatatacagtacatttttctataagataatattttatttgggaatgaaaaagaaatgttaacagctatactactcattatatgtccaagtatttactcatattcttagaaacttatttccctctcttatgagaatctcctattacgaggatgtggctctccaaatgtgcaatccctagccatgacatacttccttctttctgccctgtcatgaaagtacatgtgacatggtttggctctgtgtccccacccaaatctcatcttgtaggtcccataattcccatgtgttgtgggagggacttggtgggagatgattgaatcatgggggtgggtctttcccatgctgttctcatgatagtgactgggtctcaccagatttgatggttttaaaaatgggagtttccctgcacaagctctgtttttgcctgctgccatccatgtaagatgtgacttgctcctctttgccttccatcatgattgtgaggcctccccagctatgtggaactgtaagtccaataaacctctttcttttgcaaattgcccagtctcaggtatgtctttatcagcagcatgaaaatggactaatacaatatgggttcacaaaagtaatgatttctcatgaattgtaacagacacttatttaaagtgaattataaatgctgatcattattgaagtggggtaacaagtacatgagggtttatattttggcaaatggctgaaaattcctataataaaaagtttattttgaaatcgaatagactttcatcactgttttaaataagcaccgacctttttatggatgctattgttactgttgtcaagagaatagtaatcagaacataaattagtagggcatcttaatcctgagaagaacaaggagcaattgctcatagctttattgtcggagacattaacaggatttctctacgacactaaggacctaataaagtttcttctatgttaaaaactatactgaaagaaaatgtgcatgcaataaacttatgagctcaaatgtagaaaataagttgtgtcatgattacaagcttattctctccatctgtctggaaaatcacacctatgaatatcccactagtttcaacagcttggaagcagatggactctatctacatgcagacggtatggacaaacagagcagcagacaccaccactacacacacatgcagcagaggcactgctacagatgaaaaagcagacaggatgttattccatgggctactctcccaagtgattatgcataaatccttttatacatatatgttccaaccacacattattactaattggcttttagtctcagttgaattgatactacatctctgggagaggatatctttccatgacctatagatggtgttgccacaggtgattttttaaacttgttccatacgaacataatgtttattattaacctgtaacttgtctctagatatctatcaatttggttgtataagattttaccatcactaaatatacatgttatcacctttcctttgctagataatttaagcaggcaacgaaactggactcctatcttttgccatatacaaaaattaaataaaaatggattaaatacttaaatataagtcttcaaactatgaaactaccaaaaggaaacattgggaaagctctctaggacactggactgggtaaagatttcttgagtaatatcccaaaagcacaggcacacaaagcgaaaatggacaaatgggattacgtcaagttaaaaagcctctgcactgccaagggaacaatcaacaaagacaacctgcagaatgggagaaaatatttgtgaactacccatctgacaagggattaataaccagaatacataaggatctcaaacaactctatggggaaaaaatctaataattccaattaaaaaatgggcaaaagatctgaatagacagttcacaaaagaagacataaatagcaaacaagtatgtgaaaaggtgctcaacctcactgatcatcagagaaatgcaaatcgaaactacaatgagatctcatctcaccccagttaaaacggcttttatccaaaagacaggcaataacaaatgctggcgaggaagtagagaaaaaagaaacctcatatactgttggtggaaatgtaaattaatgcaactattatggtgaacagtttggaggttcctcaaaaaaaaaaaaaaacacaaaaactaaaagtagagataccatatgatccagcaatcccactgctaggtatatactcaaaaaaaaaaaaacaaaaaaaaaagggaaatcaatatatcaaggaggtatctgcactcacatgtttattgcagcactattcacaatagccaagatttggaagcaacctaagtatccatcaacagatgaatggataaagaaaatgtgatacatatatacaatggagtactattcagccatagaaaacaatgagatcttgtcatttgcaacaacatggatggaactggaggtcattatgttaagggaaaaaagccaggcacagaaagacaaactttgaatgttcttacttatttctaggtgctaaaaagtaaaacaattgaattcatggagacagagagtagaaggatgcttaccagaggctgggaagggtagtgaggaagtaggggggatggttaatgggcacaaacaataattagaaagaataaataagacctagtatttcataacacaaacagggtgactacagtcaacaataacttattgtacattttaaaataactaaaagaatattactggattataatgcaaaaaaaggataaatgcttaaggaggtgatagatatatttaccctgaggtaattactacatgtcatatatctgtatcaaaatatctcacgtacctcataaatatatccaccccctacgtacccacaaaagttaaaaataaacataaaataaaataataaaaaacaggtattagctgctgtgacaccaaccaccagcaggtggcggccaaaggctctgcctgactgctctgacgttcctgacgttgtaggagcaaatacctcagcctcagcacctcagctgtgatttttgtcacataaaaaagaactgcagcatgcagaaaacgaattttaagaatgataaataaatatcaggaaaataccgaaattaacaactctggcaaaggtaaggtgctaaggaattggcactttagactttaaagagaagccaaacaattttaatgatctacttggaaaacaaacaacactcctacaccctactttgagtccattagtaatgaattcccatttttccagctgctgtttacttaccacgttgattttacagggcttaaaaactacataaacagagaaggatcatccactatctgcgtatcctcatagctttctgtttctgacactagtctgatgatcagggggcatcagtcctccctttatgtctggaatctggtccagatgttttgctcttaccaaaatacttccaatgccgtatttactgaccgcaagaatagaacaacataaaaatacaatggaaaacaggaacccatttgttcagattaggtgttagctgtagataaaatcaaggaaagagtaaaaaggttttcatcaatgaaagttatacctcttattattattgttgttgtcatgcatttcaatttgttagctatttgtagagctataaaagaaaaaacattttctatgctctgcttgctacagtacatgttatacctgctaggaaaaaccacaatgataaatgactaccatttgctttttaaaaaatgttactcacaaagaccagggactgaatctgctgaaagtacttcaagcctttcatacccagtgctatcaaatgtttctcttcactctaaatgttcagaaaaacacaattatcctatcttctgcccaacctatactatctattggtcaaatatatttatgggggaaacagctattgcaaacagagactaaaaatgttctccttgaccttgggcacatatttactatatccatgaggtctatgaggtgcagaaactaggagtattgctaaaccgcctgtccatcacacagaaatcacagcgaccagcacaaaaccttctggagagagtaggtggtggctctctgcaccatacatacctcattgctttcttttttctttctttttcttttttgaaatgaagtctcactcttgttgcccaggctggagtgcaatggtgtgatcttggctcactgcaacctccgccccccaggttcaagcgattttcctgcctcagtctcccgagtagctgggattacaggcacctgccaccacacctggctaatttttttgtattttgagtggagacagggtttcaccatgttggccaggctggtcttgaattcctgacctcaggcaatccacctgccttggcctcccaaagtgctgggattacaggaatgagccaccgtgcccagcccctcattgctttctaatcttctgtctcaatcatctccttagtggaaagccacataattatggcattcatgccagggtcccctaaacaccagtttaaatttgctttagcaaaattttctggaaatgtaatgacatgaatgaaatgcaacaatagcctaggttatcaatcatgtaaaatagggaaacacaactgggtgacagaaactagccagtcctgctatgagatggtgctatgaaagcaggtcaacaaggaccaagacccccaaacatgtcagagtagtgataggctcaagagaacttgtcgtctctgaggtttatgtcatgcattcatacattcattcactcatttatttacttatttgcttgttttctttgtgatattagctctgaccaatgcctgaaagtagtgtgtcaatcacgcaactggtcgggatgagacaattgaagatactttcattatccttctgcccagcatgaaattccatacttatttataaagtaggttattgtaactgatcataggcatttttctaataaagcaattaaaaaatttttttctaacaaattttaaaataataaaagaaataatttatggtaacattttgatatatttagttgtattcattttctaatcatacaagggtttatcttacaaaacatgagtcatgtttctgagaaaagttatagtaatggatatataatactttattgcttattctatttatcaagttatttaacagttctattagcattaaacactagttggtttcatttttaaatgttactctaacactgtgagaaagatctttggtttgtaacccaacaattattaggttacacatttcaataatttaaatactaaacactgctctatttctttatgatgtctccattaaacatgttttgggggtttctgctcaacattataagaaatttttaaaaaatttcaaaaacatagaatcatacaatgaacttccaagtgcccaccacctaggatcctcaatagacatgtcaccacatttgctttatcacgtcttcccacctatctgccttgatttgagtcatcttccagtcaattgcaatatagcttcataaaatgctttttaggaattctatggaaagtctctagcaccttatgtaattggtaatgtctttctgctgctttcctacatgaccaactattgacttggggtagaattactgtattgtgtttctttgtgctcaaaatttgtatgttgttctaatagcttctgacctttagtactgatatggataagtcagagaacaacctaattgttgttcatttgtagtgctttcttatttccaacctagatgcttgcagaactttttttttaaactttaaactcaaatatttaaaagaatacatttcaatgtagtctctccccattaagtttgctttttttggtgatttcttatgatccacatgcaggaattccatcaactaggaaaacttcagtttgagcatgtttttttctattatactggccacttctgcttctgtaacattcttatagtctcttcttcaggatgaacttctacccatgagctgtatcttcactccttggtccctaaatctatcatctttgcttgtgcttctctttatgtgttgggagaactcctccagcttgtcctcatatcactaaatcgattctctatagtgttgcttctcgtctttaccacatctcatgcaaattttaattctaatattacatttcctccccttaaaatcttttctcatgttattgagttcccttttcatctgcctttcaaagtgactttcttttcttctcaatatggttgccttatcatctcacccttcatcttttgtttcacctatcgaggtcatcttgagttttactgacaacaaaaaggaaggcaattttcaaattttgtctttgtatgtcaggtaatttttgttattgttgcatgttctctaaagaaacttttaactctggcatgcaataattattttttcttttgtattgctctataggtgtttgctaatctaaaaatgtatttacttgcttagttttctcaaatcaggagaaatctctataggcttgatgtttacagtagacgtggaaacattttctttgttccattttactcgctatctggggactcttagatatccttttcagaacaggagctggagagggatttatcaagtcttgacatagaatcacctgctctgaatcccctaaatatatgtgtcaaaggatatacttctgtgagagtagcagcaggccccaaatggcctggatgcttcagaaaggaatcccatactcatggcggggtagatgcgagttgtctctgatcgagggtggagatggatgacactctcagatattttcccttgcctggctcaggtattatgcgtcaaggatccatttatactttgttttatggaaaattatcttgggtttagctaacatttctagaatatacttttgaaatgttgactttctttttctatatgctgggttttttctttaagagtaaaatcattaaaatgaaaacaaaaaaaactagtaatagtgaatctgattttttgagtgatttttaagtgttttcagctttctcgtgaatcttcttttacacatcccaatgataaatttcatttttttaaaaaaatgctccaaggtttttttgttgttgttgttgttttttccaagatggctgactggagacgtcagaagccagttctcttcagaaaggggatcaaagttacagacgagtggccatgatctgaatggaaagctgagagaagagagccaggacctgttggagttcccatggaaataagctggggtgtagaaaaaggaaagctacgagagtctggcagagactgactcttaaggaacttagaattcggcagaaagggtaggtgggggtgcttctctactcccctcccttctgtgacaaactgctgaccactaaattgtcagagagcacctctgcccttgtgaccttcggcaatgctgttggtggcaatctgagaacttcctgaggacagagcagcagtggccagctcctccaggtgcactcggactccccgcaggcctgcactgaaatggcaggtgccataccggctgtgcacccagtgtaggtcactgcctgcctgaagaacctgcctgtctgtgtcaccagacccctgcaaacataccttagaacccactctgacttggcaatgataggggactgatagggaggatgctgggaagctctgggtactccagagagctagctcttggcagaggccgccccgagggaagggggaatacggcctgccaaagtgccccttggaacaaaggaaatgcaggcatggtgctgatttctgaaaggggtagcaccagtggctgggaaagatcatggaaaagaggccatttcccacttcccccacccaccattgtggatgcagagcagacttcccctactggggccttgggcaagtgcacttggagaaagccttttcagtgcatttccagatggccgcacccccagtgaaagtgagcctatgccatttgggtttgcacaaagggcagagcccatcttcccctccctaaacagagtgggcagcatggtggcaacagaggacagacaagtcacagagctgtctgctctggattgggggaagaagctgtgccccaaggccattttgctgatagccaccagagaggtcctttcacagacctcagtcacactgcagactggagtcaaaggacagcatctatgtgaactgaaggtcacgagtcctgcaacaggaaagtgaatcacatccctgcctatctaggatgggaagctgctgcagccccctaacccttatccccaagagctcagcacatcctcctcctgtcacccttgtcagggcaggtgcctccattcatcatccagctacccaagggtaagccagctgtcatccttaagtgccacctactggactggagactgaagaccaaataaaaaacctgctgcagaagggcatagtgctaatgtatgagataaacttcttgagacctccacactcccagccccacagaagacagtgtatcagttcatacacccaatatactgctacaacaagcagtgtttgagaaagccaccacacaacagatatccataaccaaggaacccatgtagagccttggcctcctgaaagcacctagaaacaaagccaaacaatcatatacaacaaactccacagccatatcctcaagggaaaaaagagtaaaaatttaaatgtcccatccaaaggatgactaatttaaaaataagaagtgacagcttcttcacatgagaaagaatcagcagaagaactctggcaatacaaaaagacagagtgttttgacaccttcaaaggagtgcagtatgttccctcaaacatatttgagggaatgattcagaaaagttttcctgatcttgatagagaagtatttattcagatacaaaaaactcagagaacatctgggaggtactatatgagattaacatcatcaagaaatataatcaacagagtatccaagatcaacactaaagaaaaaatcttaaaggcagctagagagaagtgtcaaatttacctgcaaaggaaattccaacagactaacagtcaacttctcagcagaaaccttataagccagaaaagattcggggcctatttttagccttcttaaagaaaaaaaaaatgccagccaagaattttatatcttgtcaagctaagcttcataaacgaaggagaaataaagtctttcccagacaaacaaatgttaaaagaatttgtcaccactagactggtcatacaagaaatgctgaaaggagttctcaacatggaaggggaaggatgataccaccataaaagcacacataagtacaaagttcacacatcctataaagcaattacacaactgagattataatgcaactagctgataacactatgataggaacaaaacctcacatgtcaatattaaacttgagcataaatagccttaatgttccacttatagattagaaaattggattaaaaaaacaaaacccaaccatctgctgcatacaagacacccatctaacatgtaatgacacccacaggctccaagtaaaggggctggaaatgatatatgatgcaactggaaacaaaaagagcaggagttgctatccttatgtcagataaaacagactttaagccaataacattaaaaagacaaagacagcattatatcataacaagagttcaattcaacaagaagatttaactatcctatatatatatatgtagatatatagagagatacatatacatccaacaccagagcacccagatttataaaataaatgctactagacctgagaaaagagatagtcatcactacaataataatggaggacttcaataccccactgatagcatcagactgatcaccaaggcagaaaactaacacagaaactctggacataaatgtacttctaaccaaatggacttaatagacatctatagaacattccacccaacaactgcagaatatacaatcttttatctgcacatggaacattctccaaaatcaaccatatgcttagccataaagcaagtctcaataaattcaaagtcctgaaatcataccaagcatcttctcagaccacagtggaataaaattagaaataaataccaggagaaactctaaaaaccacacaaatacttgggaattaaacaacttgctcctgaataacttttgggtaaataagaaattaaggtaaaaataaaaaaatagaaacaaatgaaaatagagacacaacatatcaaaacttctgggatacagcaacagcaatgctaagaggaaagtttatactgttaaaatacttacatcaaaaagatataaagatctcaaattaacaatctaacgtcacacctcaaggaactagaaaaataagaacaaaccaaacctaaagctagcagaagaaaagacataacaaagatcagagcggaactaaatgaaattgaaaattaaaaaaaatcttacgaaggatcaacaaaacagaaagctggttatttaaaaggataaataaaatttatagactgctataataattaatattaggtgtcaacttgactggattgagggatgcctagatggttggtgaagtattgtttctaggtgtgtctgtgaggttggtgccagaggagactgacatttgagtcagtggactgggagaggaagacccctcctcaatgtgaatgggcaccatccaatcagctgccagcatggctggaacaccaagtagaagagggggataagcttgcttgctctgagttctctctcctctcctctctctctccctttccctctctctctctctctctctctctctctctctctctctctctctcgtgctggatgcctgctttctctcctactgcccaaaactcaaggttttgggacttaacaccagtggcctcttgggggttctcaggcctttggcatcacacagagcttcattgtcagcttccctggtttgaagctttcagacttaggctgagccttgctactggtttctctctgtccccagcttgcagatggccaatcgtgggactttgccttgtaattgcataagccaattttccctaatagactcctctctctctctctctctctctctctctatatatatatatatatatatatatatatgtgtgtgtgtgtgtgtgtgtgtgtgtgtgtgtgtgtgtataaatatatagacatagatagatagctatagagatatatctatctatatctatctatctagcatccagcaattactctctctccctctctctatatctatctatagatagatagatatagagatatatctgtatctaactatctatctatctagctagctagctttctatctatatagagagagagagagacagagagagaggaatctattagggaaaatctctctctctctctctttctccctataaaagtgagaacaccacatgttctcacttttgagtagaaactaaccagtggatacacattgacataaagatggaaataataggcattggagctccaaaagtggagacggagaggaggctgaaggttggaaaattatctattgggtataaagttcactatttgggtgatggtttaatagaagcccaaatcttaccattgcacaatataaccatataataaacctgcacatgtaccctctggatctaaaataaaatttaaaaattttaaattaaaaaaattcaaaaaattaaatatacactaaggtaaattatacaagccataagtacagaataaagacatatatattttaaattttagccaaatgatattcttccatggctatggaacactttatactacagttagagaacagccatcttcctggcatttgctcttacagagacatttgactacaggaccactgaattcaaggcttactgatttaccccaaagatggagaataataattctgattctgattcataagcaggtttctgcttgacagttttgatatatgcacattctgtagactgagggggaaatggatatttatcatgaatttacaattttccagactgtatctcaggtggtttacatttattacacattattcttccaacaaccctattaaatattcccccattttcaagaaaaattaactagtacttcaagtttaagtaactcacctagtcagtaaacaaggactgaaacagtttgtctaactctaaattctgtgttttctcacaccatcccataaccaagaagaccacacatctctcaagtaagggagttccacggaaattctgagacctcctaaataatctttggttcccaagtgatgtttgacaaagaatgtgagtgtattcttataaacagttgatacattcacttaaattgttggaatgctactctttaaagtgagatgcatagattataattttttttctttattcatgtacacatactatctgggcatcaaagcaaacatatcacaaaatgcctcttaatcaatagcaaattatacaataaaaagatatcaagaagagtttggtttgatagaatttctccacattacttaggccgggcgcagtggctcacgcttgtaatcccagcactttgggaggccgaggtgggtggatcacgaggtcaggagattgagaccatcctggctaacatggtcaaaccctgtctctactaaagatacaacggcgtggtggtgggtgcctgtagtcccagctactcagagaggctgaggcaggggaatggtgtgaactgggaggtggagcttgcagtgagccaagattgcgccactgcacttcagcctgggtgacagagcgagactccatcacaaaaaaaaaaaaaaaaaaagaatttctctacattacttttgcctactttattattctacattattttgtcctgtatttgttctatagatttcatttttgtcctgtggatttcatcgttaagttatgtacaggctggaaaagtggaaaagatgaccagttgatccattgcactacagaactacaactgagaacatttagaagtttcattgatagctatgttcacaagttagagattaatctgatcccatggctggaaggaccatagggcccaatgttctcattttagaagggaggaactattataaagtagaagcagcactagagacagactagagattgggttttagttttgactcttccactaatttgctatggagctggaggaagtccctttgggcctagctgtgtaaactcatggggaaaagtaacaaaggagaataaatacagcgggaattctggctgcagggcaccattgccttttcttgcccatctctaattctagatccaacttgagctcttgacttgtctgaagttccttggcattttaatgaaaatacagcattttcttcagaatccattttaaggaaaagcccaagaggtaggtagggtatccagatcctcattatggccccaaatagaagatgattggactatggcacaggctggtgactggtaaatctcttcacgtgaactatatttaaaacaattcaggtcataattttccttcagtgtgactgtaggggcaagctctctcatggtacccccggtccctagtagcgttcctttcaaagctggcacttgataccgcaaatttcatttgacacatttatgcgctttttttctaataaaggaatttagtggtgtccccctcacaaccttcagctcaatcatctttttcaatctgctctcctggtattgcctgcagtcctatcatgaaccctcagcagccgggtcccagagcaactcaactgcaggcagcactgttgccatggcaacgtctgttagaactagctccatcactttcttcaaaaattaaagtcttctacagagatcccaaagttaatgaatttttggttaatttggcctttaagtttgtgtcagtatatccaataataatacagatcagtatttaaagttttaattagtgatttatccgcaacgcataggggagaagtggataggaaaaggggacttatcttttaatgcaaacgtaaataccatgtattgttctctctcagagatgaggagataagcacatactagtttttggagcagccgccgtggacagcttcaatggggattgcaaatagtttgttaaagagattgcttaaggaagacacatttatggtacaataagcatttttctatggctggctatgtcatctttgaatgatatgtaaggtgcctgctgttacacctcaaactgccttctcctaagcaggcccaggctcaggttggcagaaggcagagggaaggctgccagacatacccagagactagactgagaaacagtgatctgcaaatcacctgaatgtcattacactttgttggcaaaactcccaaacctgaccctgtcaagcacgacatatatctcaccgtgcaacctgggacccaacccagatggcagtgtggggcctgaagcttgaggaggggcaggcagctgaaagtcacacttggaaggcctgactgccaacctctgagttcacagcctttgaactggccatggcattagtaagtaaaagccactccacaatgatatgtcatcccgatggcctagcaaacagaggctggaaaaaagccataaacacagggtgctcttgttactacaaagaattgttactacaaggaatttttaaagtaatacattttgattttgggggagcaggaagaggttatcatgtacaaccctcttaaaggaagaatgagaaaactggcacagagggtaaaatgatttccctaaggccacttcactggttgaccatgcagttagttccccatattcctaattcaaggtctttcaaatacatcccctttgaaatttgctttgccgccaaagtggaggattaggacacacattatctctgagaagctcaaggttgaggctgcacagagtttctgtttcatttcaactcctcagccacaaaccaggaacatccatcaagtctaagcattcgttgtgggaagtctttgtgtccacttggaccctaagttgtgaccctaacggctttagttagatgtgatatgagacgtgttgataaatatatttttataaaacctcctctttttaaaagcatctggagtagtcaggagatagacagctatggcttaaaataccaggatttgaatcacatgtcactactttctagatgtgtgatcttggttaatcaattaatctctttgtgtccgttttcttaatctgtaaaacgagggacctgatgcctaaataatcctatttcacgggactgctgtgagagaatgcatgacaatgctactgctccctagtatctcttatcacagtatggccttctttactatcaccttactctctttgatcatactccttcatttcaggacacacacagtagtcctcaaaggcagtatctgaactgcttgagcaccgatgctggaacacaaggcaacttgctggggaaaaggaagggatctctaatctcaaatcaagcactttttcctgatcatgtttaaggtccagctcatgtctgtggagggctagcaggagggattcatgcaagggcctttctatcgtgcaggtgagggatggacagaacaggaacaggcaagaagtgaatgagaactcagcacacatggtctagggggttggttccatattatccatggactaaacaaatcccaacactgccacctgtaggggaagaggagtgagccagtaagtagaacacatctgtaaggctcttgtaggtctaaattctgatttctggggtgggactgggcttcatattggggtggggctttattatctcaacagagttgtctttttaacatctgaatgggtctggtcttacataggctacccaattgtgttgatgaccaggaatggtttcaatgagggattatgaattgggcccaatacatattcagaagacagaataagagtttcttatcctgaagctaatgataactagtcatattaaatatatcaagctaaagctctagatttagtatgtgacaaaaagtatacaccaaggcagacacaaaaccatcttataatcatgtgttgtatgattccatttatatcagctctctagaatagataaatccatagcacattggcaggtaccaagggcctggggaggggaagatgggagtcactgcttaatggctatggggctgtgatttgaggtgatgaaaatgttttggaacgagatagaggtgatgactgtacaacactgtgaatgtactaagtgccagttaattgttacttgaaaatggttaattttattttatgtgaatttcacctcagaagaaaagtacatgccaaaagtaatacttaaaagtcactgggcatctatcacctaaaaatggctcctcaatagtggaagaacaacctgaatcttgagttcatgttcacatagatttataacaacactctgaataaacaatgacatttattaaaaagtctcacttggccctgtttgagatggggctttggaaatcacactccagaaggcagggaagatgccgctactagcagttggtaggtggttaatgaatacttaatatcagccacatctcaaaacagcagtggccccatatttcagagatggccacctacaaacccagatcaacctgctctgtgaggttgggggaactgatcactgtgttgttactttcactttattcttggctaattttatctcttccctatgacttcctgcaaagacagagagaaagatctaggttcagttacttgtatcagatttggatgtatcatgtttgtagatcatctgcccttctttttccttctacaaccacatggaaggaggacgcagctgagagggcactgccagttctctgaatactcacatctcctgggcaatgaagatagaaaaattccctattcattcactgagtatgaaggtgcctggaaaaggggaagtcttcttagaaaggacaaagaattttgatgggacacagcttgtttgggaaccacatggaaatttgtgttgatggagatctaacagggactgggtccattgccatttctgacatgaggcaacactggaagagggggctgttatctttgcctctgctgctttctcctccccagagtacatatttcacatgcttctgcttatttgcttctcaccaacttttcatgacgatgataacaataatgatatcaccaaactgtcattaactaataacctctgcacgacagatgttgaaactgacaacatgttttatttctaagccctcatgggaaacttttaaggtgattattattaactccattttatatttgaggtaagtggggcttaggtgtcacagagctgtggggcagaatgaaaaaactgacattgcttttgatcataataactggcttgcttttcctaaatataaaaaaagccaaagtatctgaatgaaaaaaaaaagagaaggaaaatgaccatatacatatttgtactttaagaaatcaaactgcagcccctttaaggaccccaagactgcactgtcaactaactaacaaatcaatgacttagaatttgatgggcatggattatgcactctgctgtgtgcttggtatcatgaacaagagagaaacagacacttatttagtttgaggggcattgaaaatgtaactatttgctaatgggaatacaatcaaactcagaaaataaccaattctgtgatttttttttctaagaaaggtaaacaggaacatccatctccaaggttctcataaaaaaaagaaaaatccatatgtatgtttcttgacatcttaaagcatgcttcagtgtaagcccttggagttggaagatcattctatgttaataagggcagacaataattcaagcttcctggcttcctctgatcttcaatgtcttcttctgacatactgagagatcacatctagaggcacaggggaaacgctagctctcatgtttactctgcaaaaggataaaacccaaatgctgtttcccgtgaacatgagtgtcactgaaggacacctcaacctctgtgtaacgtgcatctcaaccaccagtctgtggaaactaggaggcaggagccatatctatttaccacatctctgtattctccagatccagaacagagcctgacacctacagaggactcaaatatatctgtcaactgagtaaaagaggaagtgagcacatgcattctgttcagacagaaatattctagcaagatgaagttgatagactatagtctggcaattctgatatgtatatatttgttggtttaaattggtcttgacaagtttagtggtaaaatttttaaaaaacaaaacacagcaaaaaccaaagttgtccccagaataatgggtcaataatgtttcataatccaggattccccaacaattctaagaacgtctttaccacagtcttccttacatttatatgttctaaaaactatgctaactctaaatttaattacacggcattattttgaaaaaataataggcaaaaaagaacactggtataattcacatcatttaagcaaaatacaggcactgacagaaatttagagaaaattagaaggggcctctttagaaaaaaatggaataaatgtgggtaaaaatctaaccataattaattgtaaccaaataatacattatgaattggctctgtgctcatctttacctgctttacaacctgattctctaacacatattgaaacgaatattgaaatcatattgaatttttttttttttgagacagagtctcactctgtcgccctggttggagtgcaatggttaagatctcagctcactgcacctctgccttctgggttcaagtgattctcctgcctcagcctcccaagtagctgggattacaggcacctgccatcatgccaggctaatttttgtatttttgtagagatggggtttcatcatgttggccaggctggtcttgaactcctgacctcatgtgatttgcctgccttgccctcccaaagtgctgggattacaggcatgagccaccacacctggccccaaatcattttttttctaacaaatattttcattatttacataacatagaaacatctggaaaagtaaagacaagagtgttgtttttttaaatgcatcctgtagacataccagtaaaatttgatgttgttgggaaaaactgaagacaatactacctatatgagaaataaaacaacaaacaaaaatgtaataattaaacttttcttaaaagccctaggtttcttttggaaacaccgttaaaatttcccatgtttgaaattatacgtgcctctttacaaaaacaaaacaaaaaccaaacaaacaaaaaaaaccagaacaatcacaaacttcatctcaggtgaaatgcattctgtcaaaacttgaactaataattatggtgacatttcagtagtgaaagggattacctcaaaaggtcatgtcaactcaacgctgactgacgacaaccacagccagccaattaattaatgctagggacacaatgtggatttttgtttttacaactaaataccacgtatctagcaacctaatagacctttctccagagaaatataaccctaatattatgttagattattatgaccggaaggaagaagctataaatctactttaggaaacaaaaatacattttatctgattctattttcctaaggagaagggagaacgaggggaaaaattgatttcatccaagtatgtccatgttaaaaacatggaaggcagccactactgatgaccattaggcaaactaaattgctgtaaactgtctcctcttagttaacattgttactattatttttcagtccatatggagaaatgaacttgaattttttctctgtggaaagcgtggatcacactgtgagctctgcacctatgattcttgcatcacctatggatctcaggaagtgcctgaatccttcattagactgtaaattgccttatattttacaaggaatcaaaatttttgattctctacagttcacctgtgagcttcaggagaaaaggtattttcagaatgaagcattcttccaaacagctgcttacccaacatgagggaagctggtttgagtgatggttggtgcctgtgccacagggtgttgaatatttttcatattacccttagtttaaacaatgatcaaacatatgaatatatatatatatatatatatattagctattacatagtaggtacttaataattggtggccactaatattgtccactggaaaaccataaacctggattctgaaaaaaacaaaagcctacttagatcggtttgttgaaatgaggatgggtgtgggaggtatatgaacatgacactcttagaagggatcatagagaatcaacattcagccgtattgaacacagtagcttgtctattccacatttccaatctattgcacaacatccaatgctgcccctgctcatgggcatgatggcattaagccttacactgaatagtcttgggcataaaatcaatgaactagttttaaaacattggtgaagatgaagttggtgctgctgttcaaaatagggatttgatgagagctttttcagaatcaaaacaatttccctcaaaacctaaatcaatatctttttaactccctggcatcatccacattcctttaaaaataaattatcttcttaattataatagtaacgaaaaattaaactccatttttcccttcctttgttatttaaataatcttaaagctaaggtgagtagacagatcaccattggacaccaagtgaaaaagcactgtctgcatggacttgctgaaatctccagtgaatctgggagtggccctggacacagcactccctggtctaaagtccctgcaagcaatgcctctaggagagattcagtccagctttaagtattttccattactatcttgcactattatttatttttctacttgattaatgaactgttgatgtgacagatgacctaccattttccctgtaaaatgacttaaggcaccaacgacatgaagtaagactcatttctctaggtatctaatctagggaatgttatttttggtaatagagaaattgtttttcctatttgtacagtctatgaagggtaaatggtaccctgattgaaattgttggaagacatttttctgcatttcataaataaatgacttttcactcgccatgggtatttggtactctacactttcatgggtattacaatgtccaattctacttggtacatatcagagctcagcccagtttgcaatgtggtgttctttatggctgcatggattagggtaagagcaggtttccaggcagacaaatggatccccatcccagcacaaaaacaaaacatcctcaaggtccgtattattatgagtcatcagcagacttaattgtgagcaaatggtggtgcatataggaatccttacagattcatggagttgtgatatgggatttcaacacctcattggaccttaaccaacctatgaaactaatattgtaagtaatcaatatgtacacacaatgaacaaagttattattctgtttatcacatgcaagttccctaataaaggcacgtctccagctgtcacaggtagaacaaagcattaacaggtctgattactcgcaagttctacaacccttctactgtgctatacctgtggctatgtacagttttctttagatcataagatcagttatctggatatcttccttaataaaaaatgaaagagaacaggcatgaaggctatttgaacctgggagctacgacagatatggagcatgtttggcccaagtgaggcaaagatgagagcgatgcatatggtcatgagatgagcatggctgtggcagcgaggcagatggagggtgagagggaggtggtgctcaccactgcctcctccactggctcctcagcccgagtgtccattccaaggtccagaccaacggcaggtgtgacagcagccagaggctcctctgcttttggctctgtgggtggagcctgttcagattcagccttggagtgtttgttttgagggttagaggaaaaagattcaacaggtaaatagataacattacagaatactggacaattaagattttctttgtcatcccataggcaactagcttcatgaaatccgtgctggagaaaagcccccatttgccatcataggcttttagagaatggaaaagactagaaataaaatcttattaagcttctgctttaccatcatcaagactgtcatttcccttgaagtcaggcaagacttaccattttacctacccattttacttacttgcaacattttgactacccacttacctatgatagctataagaggttctgctattttccagagagagagagacagagacagagagagagagagagacagagatagagacagagacggaggcagagacagagagaaaggattctaggaggacccacaattacttgccagtgggaaggagtaaggaagaaatcgcagggcacacagttccagggcctttcagttttatgaatatgcattgcaccaaaaaaatcaaagagtcattctaatagtcagactaaaatgcattcatttgacccaacaggtcaccatgaagctagtgttccacttccaaggctgggaagaacagaatcagctacctggctatttgctactacaatcatagatactttactgccttgttgtaaattcctgttcagtccctttttccctttctccctccaacaaaatccttagtaatgcatttatttcatataatagttgtttaaagaaccacagggcagtattctccatggtttcaattataccccctgaattgtgtaggcagggtgaggtctttttgtcccaacaagacatataaacatcatcctgatttcaattacatatatgctgaatcaggcttctggcatctcttagatcaaggcctttttagttttaaaattagcaatataaactaacagcaagccattaaaagcaccacagccaatgcatgttactacaaatactgaaaatattccttctttttccattcttattaatataaataaacatatttatctagtatgattctttcactaaatgaatggccattagagggctcataagatccttttctatcaccagaacacttaaactaaaaaaagtttaaaagtgatttcccagtggagtaagaagtctctaattaatgctgtgattggagaaatcagtaacttctatccaactcaccataagcaatcaaaacacacctctatttgtcctgtacatttatctgagtcagtgcacatggcaagttccacagagaagtgctggaaaagttatgctgagataatacaaaatgaatatgaatagcctagtgttggacaaatacacaaagtatttgtcttatgtttcccaccaaatcattccatttttatgcatgccaggatcacacgactattcttttcaaaaggacataataaattcaagggactggtagacaagtgtgcagacatttgatttttatgggcttttttcagctttaagaggtggcctgacataatttttaaggaagaatgagataaaattcacactaatatgctctcaagagtcctttatggaaaaatacttcacttttattgtttgaaaagaattatcttcatagtggaacaagttttcataacagcaaatagatactgtaagtgctcagggaatgatcttaccatttgggaagtcaaggtgatttgctatgacagcctggtatcaaatgaccttcacaatgaaggataaaagggtaatttgagaaaacaccaagaaatccacgagcagatgctgttcactgcaaactgagtctactctatggaagaagtaagatcgaagccagatgagaagccaagagatgttttaaaacatgagccaaagaaatataacatcatatattttataaaatgcaaagatatcttaaaatgcaaaaaatatttgcaccagagtctgggtttcttagaagtctgaagaaattctgacattttttataaggcaagaataaatagctagggtgattttataaatgagcccaattgcatttgcttgttgaaatttgacagtgcagctgtggtctagtataaagagaacataggattgcttatgttccccacaagtcacaagatgtttcacatacgacaataacacatgaaattttacaatatggcattacaacttaacctaaattccaggaggatagtatagctcactaaatgatgagtaacaatgaagcatggttatatataaaatcagctacccaaatttagaaatagaggccacctttctattccaagataatgtaaaattctaagtattttgtcaagaaagagggaaaagcaaagataaaatgtgagcaaccgcttgtggagagatttaatatagtcctgtgggaattgtgccctaccttcactgtttttcctacaagatgcctcccttgaaagacattgcaaatgggttgatcccatgccacacctattttggagtgctgagaatgatttcctattgtttgcttcagtagcagtcattacacactcagagaagaggtacatcctttacagatattggtggcagcagatgccacaatggtttaactctgaggaccataaaccaattattcctttagaataaaatgaggagtgtagccttgcagcaccttttctggtatcctttgtgataagatgaaaggcgggtcaatacagaggaagaggagatgggttgggacagcaggggcagaagtctagtcacatccaatgtggccttgtatccagtttctccaatcctgagagaactaatttagtgagaactccaaagggctttagaggcaaccctgagccccgagcaagagttactgattcaaaagggtttaaacctgtactcaaaagatgtcctgcggggctgtatgatgcaggctgggagatgtacagctgattaccaacttcaccccctacctcgctcagaatagtcaatgagccaaacactggggcgttttcttgctcctgggaagatcgtgtacaatcacgactcactgggagacatcagttcactgtgatttcctagatcagagggcaggaccaaggttagcagcatttgcaatgctgaacatgacaaagctaagttccccatggaaagaaggggcaagatgtctgcttcagagaatacatacaaacagaagagaaagacaagcatggaagctcctaggaccagccatggatgacagggaaaggttcactgaaacttaaaaaccactgaattctagacctgaatcttttgcatccgtgtagtaggtgtgagtttaattataaccaattgcctttccttttatactggtatttctccatttctcataaaccattcatgattgataattaaaaattccgttctccatcttcatcactcagctggagaatcaccaatgaacatgaagaatgagcttcactggctccattactaacacaagtataatttgtatttgaaacatttaaatatttatttgcaggccagagagactctgcctttcagctggttgcccaaaaggcaaaagtgtgacaatctattgacaaggtatgagagacacacctgtctttgcaaatatatcaaaccagccttgaagacaaactttccagaagagaattccttacttaaaatagtttaaaagaaatcattctatttaatctcaattccaagcatccaatatgaaaggcaggagctaggataagtatgcactattcccatgagaaaaccatagtgctacaaataaccctcatgaactagtcctcaaagagcccaaatcctctgaagtgtagcaatgacatgctcaaaagtgatatctcttaaggtctcttcattcatctttactagtaagctttaagctgttgctaaaaatgtttcccatcataactgcaacactgatcttttaagaatcttctctaacgccaggagtaactatttctatttcttactcatcccctaactaagcttttctctctcttctcatttggtatcaaattaggaatcacaactctactatgcattactgctttctacctctcacaaagtggagggatgagatgataaatggggtagtttcacgttcaagaaacaaacaaggatttattttgaagcatgaattcttgagacaatttcactttaaatactggaacttaagttatattcacatggaaatatacatgtctttaatggattcactgtgttctgctggggttcatcattaggagactagtttttgctggaatcactgtgcctgtgtgaatagaaataaccaaatgcaaagtcacactgaggttttacagacacattctctcctgttttctagaaaagtacaggatccagaaaccacattctggatattcaaactctagacagcctagaatgatcagctttagaacattcagtgataactaacaacttcctgagagcacaaacccaaatcaacttaccaagttgcagatcatactctggtctgtctgcattgtgaataatgaagtatcctggggctgaaaatcaaggataaaaatagaagatgttttttaaagatatttaaatcagctaccatcaattgtgtctgcctacgtatctatctatctatctatctatctatctatctatctatctatctatccatctatctatcgacactctatctatctaatttttttttgagaaagggtctcctctgttccccaggctggagtatagtggtatgatcatgctcaccgcattctccacctccctgggctcaggcgatctacctcagcctcctgagtagctagaagtacaggcgcacatcaccacgcctggctaatttttgcatttttttgtatagacagcgtttcatcatgttgcccaagctggtctcgaatttctgggctcaagcaaactgccgagcttggcctcccagagtgctaggattacaggtgggagccaccatgcctggcctcaataaatattatttgaaacatgttcaagtccccttttattttaaatcattaagtcaaaacatgcaaaagtaagttttaataatagttattctaaatataagtctctgctagcagaatactatgagagtcattaaacagaggccactggcttcaggggcatctttagtccacagcttctcttctggccgttgatatcaaatcagaagttagtggttgaagctccaaaatttaaactttttaaatgttgtgaattcaatctcactatattacttaagtgttccttctatgggttatgtatgaaccatatgttaacatttcataaaatatgttcattgacctaaacaaatcaagctggaggaaatctaaaggaaaagtaatctctaaaggaaacttcatctctcattacattggtagccaggcttgcaccctccaaacaggagacccaggtgtctttcctgggaaatctgccagctcaaggaaaaaaacaaaatgcctgaagaaattgacatcaggggatgcctaacggaaaagatgagccagtgccttttggttgaagatggtgttttgaacacatgcagttgcctctgttacctcctgaatccaaactaaacaacaataaagggatttttaaggcatcaacctataagaatgaaaagaatgagaagaaagatagaaacaacaaaatgttgaaattggaaagcagatgaaagagtagtaacttggtagatcaaagaaatctgtatcctaaggtgatgctagaaatgctgcaaatcagtccgatttgttccttagaactcccagtggtgaaaaattagaagcataaagagccacaggaaacaggagtgagggtggtggtaacaacagaagaatagtaaaagtctattacaaagtcatcagacctcaagatattcttacctactaagaacaccaagcaacatccttgcctaccctagcagaagacttgagattaattatatagaggctgaaacagggtccctggactggggaacacacaggcacatcaggaaggtagaagcactgagtacttacataataaatattgagaccatgcacccctctctcgccactctgctcccattttttccccaatcacctccattacactagtagtcagacttgaacttcacagacaggagacaaaataaatcttccctgggaaatctggccagcccaaaggaaaaaaaatgcctaaagaatctgacttcagtggctccccaacagaaaagataagccagaaagtcctgcaacaatgcccacagtcaatgaactctatctacctgtacaaggttccagtcagcttttcagcatcccacttttaaatatgaatattcagtcaagatcaccaaacatttgagaagtctcaaatataaaagagagatggaatagaaagggttaagcaagaggaagaaacaaagattttgcaaaaataattcaaaatgattattaataccttcagagatataatggaagagaatcattcatgacacaagaagaagatgctattggaaaataaatatgcagtaaacaaaaagagttattggaaattgaaaaaattatagggtgaaaaacctgttagaatagttggcagagaaagtagagaaagacaacagagaaaaggaaacagcaaagaaacaataatagaatactagtcaggaagttaaaatatgaaaaagagaagtgttatggaatgagagaacaaaggaaaaaaaaagataaagccatgaaatatttttttaaaattctcccaaaccaaaacccataaattttgagattaaaaaggcttatacagtggatgaaaagagactcagaccatagcccatcattgaaacatttcagaaacactgaagtaaaaagaagatgctacaaagttccagagagaaagagagaaaaggaagatgaaagaggtaggaggagggagatagagagaaagaatgaggagaggaagcaggtttcttacaaaatatcaagaatcaaaatgacagtttcttgaaggcaacactaggtggtaggattgagtggagcgatggctgtaaaattataagggaaaatgatttacagcttcgaatataatacccaaactagcagtccagtatattaatatatatgtaggacatgttcagatgtgtaacgtcacaaatatacaccttctgtgtatgcacttttttcagaaagctactggaggttgtgctccacccaaatgaatgattaaaccacaaatgagaaaacttgcatcagaaaacagtggaaggacaggaaagagaggtgaaggcagtccccatgaccaacaggatggaagagccagtgagaacagctctacagcaagtcacagtcatagagtacccagttcagcccacagcagcccaggagaggaggacagataggcaatttcttcaagaagatgaaactgattgaatgtctagtgttttcagcaaaataggagatttgtataactatagagtatggggttgaatatgtgataagtacctagaaaactaagcatatcaatcaaaaggcaaataaattagacccacaatttttttataattaccacaaaggaaaacaaaaagttggcatgaaacaaaatgtgaaattcatgacttggctgttaatagcattttcatcactattacattaccacagattgcctggatggctttgatggaactctatcagaggaagggcaggaagcagaagagggggcgaattgggtgggtaggaggtggaaaatactttaagtcttcaccttccagagagatgagtcaatagataatactttagaaatcaagaagcagcattataagaaacccatgcacacatatagggcggaaacagagaatttgttgaaggaagtgaaactatttacctctaagaaacaggaaatgaagggagtgtatggtggtctgaagttttaaaataaaagcccttataaaagttgttacttttaaaattatgtgcattaataactctgatggaaatacaaacctgaaaagaatgagaaattgatgacagagcctatcataacctttcaaaggaattttctgaagatggaagagatgcattaacgtctctttgtatttgtgtgtatctgtatttggatgtgggaatatcagtgggtttttatctttttacaggtaacatgggaaaataatgaaacctttaaatacagaattctatttatgaatatattatgaatatatatttagagaattataaatgctaaattattagaaactgtgcatgtctgacattctgagacaaagcaggcatcacagacaagcctgtctgaggtctccattgaagaggttgtcagaactgatccaggagcctgagagccatgtggccggccttttacacaggttacacctgcctacctgttgggacatacacatacactgtcctaatgggacagttcatcttgtggtttctctttcacagactctcaagaaaaatactgccttattggacacaaccagcctatggtttctgatcttccaacagctccttcctggagaactgctgaagaggtaaggctctgtgcagtgtggctcctataggaatctctagaaggaagctcctaaaaccctctcacattttctaaagatccatctcattagttcaaaacaatcctagctcttctttagaacagctgaatccagtggatctctcagatcagaacaacttctaatttctagtagaggaatcggtagaaggtagaagcccatggtatagctaatcatattaataaaagctaaactaaagtcagggagaacttagtgtgtgctagcctgctgggctaaacactctgttgcatagctcatttaatcttcacaataatcatacaatgttgctactattctgtttccattactcagtctgtaagtagtggggtccaattttgtgctgatattcttaatcattacgctatactagtggcacagagaaccaaaccacattgaaaaaaatgtgcatcattctcagcagatggatcttgtaagaaaacagattccttacctgtgtgaatccattaaatgaaccaccagaagcctaaacagaaacgaaaatcagattgtgttattatttttcattatcattttgtaggaccagtaaatatccattagacaagttggaaagtaaagactatcacaagttttaaaataatacaaaaggttgctgtgcatgaaagaacttaggaaatgcaaaggccacactgtatgattttaaataggctgacaaaaaaaaaaagaaaggttaattttacaattattgctgctgcattattgcttggtgccaaccaaaacccactttctctataatgagaagatgattccagaaaagggccattaggagttaaattgcttgtttttcaggccattgatagaatctagaagaaacttctccagtgtttctacaatgcatcattttgatgaacagcaattatgatattttacagtttcagtgggcctgggttgaaacatttcgtgtgttctttttggagtggaaccacttcaggaacagtaaattagtctgtgctgctcttggtttagcacatttttagtacctgcatagtaaaagtgaaagtagggagaataaactcagaaaatgagatggtaacatagactgtcattaattcccaacacaatcattccgctttgtgtgtatgtgtctatgttgttgggttctttttgttgttgttgttgatgctgctgcttttttttttttttggtcaacctatttgtgtttggtttgcacagatttcaagaagtacatgacaatctgttagagagatcaggcctcctagaagatagtgatggataatgaagtaggtgacagacatgaggaaaaacagagcctacagaagtctttggctagtctatgctacagaccagggtaagtacctcgtctttgtcagcctctatttcttggtacaacaatccatatctctggttagcaatttcatcttcagataaatctgagttgttgatgtcctggtctcgggaactagcagaactctcagtgctagcattccaggaggtccccaaaatcaatggtcttgctatctcctggctttgttcccagcagctagcaatggcttgttccctacaatcacctgctagtaagtccaccttcagttcttccttgtgctcaactacatctgaatgtgtccagctattatctaagccttctgtatctctgataggccagtggttaatagaatccagacaactggcaaatccacttgcttggccatctggtataccagagaatcctgttatatccaaattattcattgctgaatccaagcttggctgccagatttgacctggatctgttccccaagagtctatctctgcaattcttggcaagttaacagtatgactacagttctcagttactgttctttcagacccttctattagtgaactttctgccttacatgaacataaatctcttctgtttgcatctcttcccagagaataattaaggtcagtcctagactgagcttctacttcaagttttattgataaaacagcctgatttttatccctgtcacctacaagagcatttaacacagtctcacactgaatttcttcagcatctgtactgtcttgtgctgggtaaaatatcatatcatggttgggagtgtctattgcatttttctttatgtcttttctagtcaaatcccatccctcagggctgccatcttcaatattagatacagagtaggtctggagagatggattcaagatatctgggtgattggcaggtttggctccaaagccttctatcattccacaattattgattaccttttgaattccatcatgtagaccttggtctctgtcactaagttcttttgccatatctcctccttccatgtccttttctaataggtcagttttctcaaaataattttcattggcgtttgtactttccttataccctgctcttagatcttttctagtttccacttcattaatttttaaggtcttatggtcttcctttcctatggtattaagaagttctaccactctgtttcctgtcctttcacatgctttctcttcaaattcctctgtaccttctagtgtcttgatatcaatagctccagtgtctaccttttgacacgcctccacacctgcccacagagaatcttccatcttctgtttctcttcctcttcatctgacttcttcatatcttcatgactttctttgaacaggccagctgtgtccatggctggcatgtctgagtcaagtgggtcatacagctgctccatctccacacaagcagcaatggcaactccagcctccggcgcaggctttgggggcagttgttcatttccacctggaaaggctggccccggggcatgctcactctcttcagctacagtgggccagtcagcagacgaaagcaggctggtggataatcttatgtcttgctctgtttcggagggacatgcagagtcttctccaaacccacctgaggtaacttcttggctgaccctgtctgtactagcgtcagggccccaagtaaatgcacctatatcattttgagatctttgaatttcttcggccaacccactgtctggagtttcctccatgatcaggttacacaaggaaagactttctgaagagtcagtctttaaagtatgcagaagagcaaaggaaaaaaaacaaaaacaaaagatgaaacagaacatggtaagatttgatgagaaacacaaagctcttcaggcgagtagcaccagtaaaaccaaactggaaagtgattacattcattggcttaaggtttaaatctatgactagcaatgccatggggaaacagttcattctagaaaatatactatgtatgtaatgcatatcaaataccaaaaaaatccagaatgatctggatatttacctaccggctgtaccaaatcagtgcttgtctgtatgggtaaagaaaatagtaacaataaggcgagagagaaaattcactaacacaataaaatcctatgctgtctagagtcaacattctgctgaaggctatagcttttactggtttaggaacaaattttacaacttgttttgtgataggaatgatttttgttccaaaattgtttaagaccaccatagaaaaggcacaaatgaaacacaaagaaagcctctttcactttctagcatcagcaaggatgttttatggctagtatatgacttctgctttagcagactctgaaatgctaagtttcaaacacataagcaagtttgagaacatcggaataagatcaagcactagaggtcaagaaattacacagtagcacacactttgacacagtatcagaagaaaatattccccaaactcatcctatacttggctctgtctttgagatgggtgtttagatggagaatggtctgatattaaccagtctgactgcctgcagagttctcttgatgtcattcccccaaattagcagccattttctccacataatgaaaaaatcttgcaaagttgagaagattaatagctgtgagcaactatgttcagaaagctgttgttttgcattttgatatcgctaccattcctagcaagtttgtcctctgaaacgttcaaaagctctttttagacgataccttcaccctctccataccctcccagcgagggaaggaaaatgtgttacagttccactaaagatataaaatattggaataacaaaaaatagcattgtctttttaatctccaaggaaattaacacagagttgaagttagaattcaaatgactcgaacatcaatccatgcatgcctttttgtgaatatatgagtaaaacttttcactagaaaagatataacttagtcattggtggtttcaatagacatttttaatctctcttcttgagcacttcccttgatgctccaaggatcttaaagagtgcagtatgagccctgcaactgcagaaggaagggacagacatctttttgttttgaagggagaaagaaagtggcaatgtcaattcagaagtggcattgcccatgaatagctagatctatcgaactttcctttttctgcctcacaataaaagaagaaaacatacaacttaagttgagttcttaagaccacatcaccagggcttttctaaaacaaagaccctgctccaagggatatgaggctgtagaggtgtgtgaccaatcacctaatttcacagcaccaatgagaccaccacaaagctctgtttgtgacactttcccaagtctaaattatggagtagttatccttacacatcagattagctgaaaaaacatcagtaataacatctaccttttattgatacacaccagacaccatgctacatactttacaattatcttatttaaacctcacacaaccttccgaggtaggcatcattacccttattttataaatgagaaaaaaatgatgcttagagagttttagaaattgctcaggctggccgcagtggctcacacctgtaatcccagcactttgggaggccgaggcgggcagatcacaaggtcagcagatcgagaccatcctggctaacacggtgaaaccccatctctactaaaaatacaaaaattagttgggcgcggtggcgggtgcctgtagtcccagctacttgggaggctgaggcaggagaagggtgtgaacccgggaggcggagcttgcagtgagccgagacagtgccattgcactccagcactcaatgaaacagcgagactccgtcttaaaaaaaaaaaaaaaaaaaagtaattgctcaaagtctcaaggttatgagtagtagagtttggactaaaatccagggctatctggctctaaaactcaagttcttattaacccaagcttcattgaatacaatcacttttttttaaaatggtaccatgtgccaagtagcccatctcttccattttctcattcacactttccttgtcttctatttaagtgtgtgtgtccttcactgcaacagctccttttgccaccaaccaccacagaaagaaacaaagggccaaactcttgaccattattcaaattattgaccattattcacccaggagtctggtccactgtactcttccttcaccatcatcttccggttctgataatgctcaagactttcagtggcctaatgatcattctaggggactatatcatcattaaatgtatgtgtcttctttctgttgcaaatgaaataaaatataacaaggtttccaaatttctggggatcaagatacatgaaaaaacagagttattagtggcttaccgtccataggtcccagggcaatgtctgaaagcaaataaacaaaaatactgttagttatacaaatctaaaacataaaaaaatgctgaggtgacaaaagttcttgaaatcataagcattttttaagcattttgtacagtactgttcaataaaactttttttggtgaaggaaatgatccatatctgtgcttatccagtatggtagccaccagtcacatgtggctattgagcacttgaaatgtgctagggtaacaaaaccacattttaaattttacataattgtattatacttaatataagcttaaatggcacttagctttggatagcacaggtctaatcaatctcaactttcactatgtgagtagaaaactatatttgaaacacaaatgaggttattttaatacacacacacacacacacacacacacacacacacacctcattaaaatgaagtaaacaaggtgtccaaattttagagcttgtcacatctttgaggaaatgcaggccctaatcactgctaatgctatttccttcccatctcattcaagaggatgtaggatgaccagcttaatggtaaatgagccccagaaaaatagttcttcaatatgttaaattagatgataacacactgctcaatgaattggtaatcatacaaattggcagagcaccccctaagacatgaatgaattacacttactactggtattttaattataaagcttatgaatcccggggagtgaggccagatggttcaaatggcttccactatgggtgaggggagcagggaagacttctctttcttatttcctttatgattgagaattgctgctaaagccacatccgattatgcccatgtctttgtgactagaatggatccacgtttatgcacttattttgaactactaaatgtcaacagcaaactagagagcctggcattgccaccttaaaaatatgatggttttcggttgagattgcagaggcctcatttgggctccgtattatagaaagcaggccctgtggttctgatacccacccacctggttgggtcccattctaaccgttctgcatggcctgccttgcatctccatgcagcctgcctggtctcttgcttagcattttctcgtaggatgactaagacaggagagaacagctccatggaaagccacagttttttgtacatggatctaatatatgttttctgattatctagatgattctcatttcattgcttcatagccacttaagaatcaaagatcatggccgggcgcggtggctcacgcctgtaatcccagcactttgggaggccgaggcgggcggatcacgaggtcaggagatcgagaccatcccggctaaaacggtgaaaccccgtctctactaaaaatacaaaaaattagccgggcgtagtggcgggcgcctgtagtcccagctacttgggaggctgaggcaggagaatggcatgaacccgggaggcggagcttgcagtgagccgagatcctgccactgcactccagcctgggcaacagagcgagactccgtctcaaaaaaaaaaaaaaaaaaaaaagaatcaaagatcataaaagctagtgcatgtctctgtataatgcacacatcaccagttattttctttaaaaggaaggcaggaaatatgaaatgtcatgtttatcagtcctcaggatcatgaaaggatgcgttagcgtgcacagatactgcagagatcacaagatgaggtgttctgctagcagcaagaacaccacttgaaaacatggggtcaggtgatgggtaaaggaggtcattttgagtgaagaggaaagaaaccaggcagacctaacagtgctatgctttttttgtcattcagtcaagacttttgttcttagcaaaagaggagaggtatgatcaaagctggactgcaggacaactatagtgtaatgactcagttatggccaccaggaggctagagggttttattacctggccctgaggaagagcacagggacacacacagcttgccgtcactgcggtgatatatgtccttcagaactaaaacttttgaagattaaaccaaggtcatttttgtttaattttgaagaatctcttagtcataaggccacacacagtttcatgatttatggattaatgtaatcatgaattaacataaaagaggtttctctcctgattcaaacttgtagacagaaatgctatgaaatctcacccactaatcattccagcatccactgcagaaactttgcatctgccacaaaagaaatgaagcatgggccgggcatggtggctcatgcctgtaatcccagcactttgggaggccgaggtgggcagatcacgcggtcaggagatcgagaccatcctggcaaacatggtgaaaccccacctctactaaaaatacaaaaaattagccagtcgtggtggcaggcgcctgtagtcccaactactcgggaggctgaggcaggagaatggcgtgaaccagggaggtgaagcttgcagtgagccaagatcgcaccactgcactccagcctgggcatcagagtaagactccatctcaaagaaaaaaaaaaaaaaagaagcatggagagtaaggcagaggaaatcctgtgaattctgcaggctgtctatataatgagaaatctctgagaaggaagtatattcaattatatgtacattcactttgtacttttcttggtcaccaaggtggaaccctcaaacttgttgacaatactttagcatttctcaaaatattgttttagagaacattccaatgaatattaagaaaagtgtagttaacatagatttctgtggtcaaacaaatttgggaaactctaagttaaacaaatataaacagtttttttaaattgcagaacttctcagcctttaatattctaatgcacatcatgaatcttctagaagagagttaatacaggaggcttcctggaactttcacctaagagacccttttgttttttgcaaagcatcttcaaggctagtgtttagactattaatttcttactttattaacaccttggacatttattgttcatattgcacaacaggaaagcctttagaagcccaatcacattctagaaaaaagcatggactagacataatccttatttattaaggttcatattgagccatttattccctagcagtttactgtgatataccaagaaggcttcaaggccagggaatcaagctaggtcttaattcctaggttgaatgttacaatattcttgtactaattcatttgaagcatactctagcaactttggatttgcctaaattcatatgtggggctccaaccatatgcaaagtacttatataaacagtttctgttttgtcaaattttgagttaacttccttctattagcacagacagttgtaaactaactatatttcagaggacctacccacaggtcattatggcacctaccaccagtatcctctgacagagaatgtaatgacagttactataagaaaggaagaaatatggagtgtgagggagtggtgagcaaaaaggcttggggaagcaaggcgactctccatcaaaccataaccatgatcacaggaggggagcttcttcaatggggaggatgaacacagcatcatcaagttcagaacgatcaacactgaaaacggcttctgctggcccgtgctttcatggtcattgcaaacacactttaacttgcaaagtatgaggaagggaagtagagaaaagagcaagaagagtaaacccaaaaccaaaagaaagagcttcatccagggaaaccataaaatgtatcctgtaaacctgaacagttctgagtgcaacgtgggcactggtaacaattactctgggggagaaaacaggaatgtatggttatgccagctctatgggtagagaaagctgatggcatgggagtcttagaataactgatatagataaggtcccctttctacccctctttcctattaggaaatatctgtcaaccaaaaataaaaatagatagtagtcatgaaaggtatagggatcattggttaccacactgagcttactgaggtttatgaaatatctccaaacatccaaaaagcacctgatacctgagacatgggtgagtgggtcactccagcagaacctgcaggtgtcacctcgggcttgaaaggatcaaagtccagatccagcaaagtctcctctttcttcacctcagggacttcattctgttaaagcaaacaacaaaacaaaataaaacatgtattagcttgaatctgataagaccatgatatagcccatgtatactctctctaatattattattgagtatctccaaaacacacttttataagcatggtggctcacccatatgcacccagtcactcagctaaatgcagtgagaaggaaataactaactctggccaagtataacctaagttgccctggaatgtgtcccaggctctagctcttgtcctttgtctagctccaagtccagtcaacagagagaatgttccaaggatgtatcctaatataccaagatgcaaggagtctcctctgtcagctcagagaacttggatcaagaaattacagatgacccaatcgataaaatgggccaagatctggactcattatagcaatactgctgatgttcttctgggaagctaaaattttaaaaggaaggtgccattgtgtactgctgaccacatcccaacggcctcattccctcactggtaccctaccccttgatttggttatcatttgatccagtcttcatccatagcattgttagtttcaattgtgtatgtgtatgagtgagggtgaacgggagggagagaggagagagacagccatgcctcccaacatttgctgcaaaatgagctcccattaataatatttttggattagaaagaaggtaagccaaataagacacaggacgaaagtcctgctttgataatacaaaaaaatctataatactaaacattatcatttgttcatttatttgtggtatcataatacatgaaaacaatgtgggcttgaagtcagcataacccaggctcaagttacacagtaaagggccaggctaagacaaagtcccataaagtacatcacagaaaagggagttggggtcagttttcatacaatttaaattacatgtgtttagcattcaatataaaattctttttaaaaaaactttgttgcctagaaattgaaacgtcaaaccaatgggtaaagtatacataaaaacagatttttggagacagatttttgaagaataggagttattctaattaatattcatcacagacattaaaaactgagaaatgtatgaaaagtgagggccagacacagtggctcatgcctgtaatcccagcactttgggaggccgaggtgggcagatcaggaggtgaagagattgagaccatcctggctaacatggtgaaaccctgtctctactaaaaatacaaaaaaaaaaaaaaaaaagaaaagaaaaattagttgggcatggtggtgcatgaccgtagtcccagctacttgggaggctgaggcaggagaatcgcttgaacctgggagacgaaggttgcagtgagctgagatcatgccactgcactccagcctgggtgatggaccaaggctccattcccccccaaaaataaaaaaaataaaaataaagaaaagcgaggtggtataacctaaatactttccttagcatatccgtactcattgcagaagaaagctgctaatatgtcatgctattagccttgcattttctattctgcagcacagtaactccccatatatactttttaaaaatttcacaaggataatgcccttctgagagctctactttctttactaattacaatcacaaaactatcaaccgattccctattcaaaatctgcataagctttgtttttccccaacttttatgtaggtaaaaattatatttttaaaatgtagtaaacatattatacttggagtatgataggcactgttcgaagaactttacacatatgaacattacctcatgttaacacactttggtgcaatctaatgttgacaacactttattgcctttaaagcatttatcttgccatgttctccagactgcattgtacctgccttttcaaatataatccttacaaaaaattgagggagagatggcagcaattctccatttgggagaatgaagagaattggctgaatggtgatctattgtcatggcccccagctgccatgtagcagaggtaagactgtagttggtacctctgactccaatgcctgccaggctgtcaactgatgccccagacccaagtttcttaattaggaaccccaaaaatctgcagaggaattctcaaagttctgcaagttctccataaaattttaggtcatgggaatatattcattatttccttttaagcataatgaatccccttaaggaagctcaaatgggaatttagagatgaaggatgaaatgaggcatcagactataatgggctatgctcagactttgattgagatcaatctgtggttataccccaattttaccacttgctagctgtctctccctggccaattaattgagcttctttgagcctcggtttcttcatgaataaaatgggattaataagacctaataggattaccatgagtagtaaagatgataaatgcacatgtacgtaatgtctaggaaatactcaaaatggaaatggaagctaatgttattaattaccattagcaacaatgcatacatgtgattatagtttggctctgtgtccccactcaaatatcattcagattgtaatccccatgtttggtcaagggaggaacctggtgagaggtgactggatcatgggggtagtttccccaatgctgttctcacaatagtgaatgagttctcatgagagttgatggttttaaagtgtggcacttcccccctgctgtctctctcctgccaccatttaagatgtgccttgcttccccataaccttctgccatgattgaaagtttccagaggcctccctagtcatgtggaactgtgagtcaatgaaacctttttttctttataaatgactcagtctcaggcaattctttatagcagtgtgaaaatggactaatacaacatgtgaatatgtaaaattactgtcatcaaatatccataatgccaattggactgccttcaaaatatgtggctggttttttcaggctcaacttctacttagctttgccctcttaatcttgagaattatcccttaaggtactcatgtcaaagaatattctggtaaagctacaaacatagcaaaaggattttgccagcttatatagtattcctttttaaaagggcaggaacgtactcacaactctgtcaccacatgttgaaacacagaaaagtgtaattttccttaacaagacaaatgaatcctgtacaccttcatcacaattagagtacacatggtatggtctcaacattcttagctttttgggaacttgattgtaagtactgctttaccatcagaaatctacaaggggtgacttggaatgtgctcctaagaaaggagaccagctgtggaaaccacagtgggagaaaatcttccaataggaaaacattgccaattataatcatctgtactatgtttcatgaggtgtcttctacttgggacatctaagtttatcagtaaagtaccggacctcttccagtgcagatgtgcaatttgagcataatcggcatgcctagccttgccacggcttcgtgatagatggattttacttccccatcccttacgtggggttgaccatatgtcatgctttagctaatggatattagttaatgtaatgcaaacaaaggctggaaatgtgcttgcatgtttggttggttggtttgtattccgccattcaccgtgaaaagtagagccttgcatagctgctagtccaaaaagaatgagagacacatgaagcacatgtggaccaatcataatctaattttctaatcagtgttaaagataaattcataaaaagaaccagagaaaagaagacatttcactaacagaggaacaacatgaaggtagcagtagatttctcaccagaaataatgaagcaaaaagacagtgaggcaaagtactgagaaaaagaaactgccaacttataattatatgccccttgaaaatactttctaaaataaaaattcaatgaagattttcagacaaacaaaatcagaaagaatacatcaccctcatatacacactacaactaatgtggaagatatctttcaggcaagggaaaaatgataacagaactatgcatctacacaaaggaggagaaccagaaatagtaactgcctaggtaactatatgtgagtttttattatttaaatcttttaaaaagataattggctgcttatacaaaaataataacaaaataatgtgaagtttaaaacgtagataaactaaaatcaatgacaaaaattgcataaaaaacagaagtggagaaatgtgagtatattatcattagatttttatactgtaccttaaatgacatcatataattgaaagttagactgtgataaattaaaatgtacactaaaaccctaaagtaacaactaaaatgacaaaacaatgttatagctaataagtaaataaagaaaattaaagagaataaaaaatgttcaattaatacaaaagaaagcagaaatggaagggttaaatgaacagagagacaatggaaaacaagtgatcaatgtgctagatttaaacttcaccatatgaataataaccttaaatgaaaatagtctaaatcatgcaattaaaaggcagagattatctaattgtacaaaaaagcaagacccaactagatactgtctataagaaactaacttgaagtatgtagacacaaataggttcaaagtaaaaggatataaaggatgcaccatgccaatctaacaaaaagaaagctgtagtaattacattaacaataaaaaaagtagatctcaaatcaaagaatattgtcatggataaagaggatcattgcctaaacatttatgcactcaattagagagcttcaacataaagcaaaaaccaagaaagctgtaaagaaaaataaaaaagcacacacacttttataggaaagacttcaatattcctcattcaataattgaaagaacaaatggagagaaaataagcaatggtataaaagatttagataacactgtgactaaatttgacctaatttacacttataacattctatccaacaacagcagaatatatattcttttcaagtgcacatggaaatgtaacatgataagcagtattctgggtcatcaaataggtctcaactaattcttttttaaaggtcctatctgagattttatttccaaaaacaaacaaacaaatgaacaaataaacacaatggaacctctttcttgcacagacaccagagacaatgctaaagttcccagtataactctattataaagacacatgcatttgtgcgtttgtcgcagcaatattcacaacagcaaagacatggaatcaacataactacctatcaatgaaggcctggataaagaaaatgatatatatgacagatatatcatatatatatcatatatatgatatatatcatatatctgtcatatatatcatatatatatcatatatatcatatatcatatatatcatatatcatatatatcatatatatcatatatatcatatatatatcatatacatacacacacacacacgccatggaatactatgcagccataaaaagaatgagatcatgttctttgcaaggacatggatggaactggaggccattgtccttagcaaactaacacaggaacagcaaaccaaataccacatgttctcacaagtgagagctaaaggttgagaacacatggacacataaagggaaacaacacacactggggcctattggaagtggaaggtaggagaagggagaggatcagaaaaaatagctaatgggtactaggcttaatacttgggtgaggaagtgatctgtacaacaaacgcccatgacacaagtttatcttatgcaacaaacctacacttgtacccctgaacttaaaagtttaataaaaacttgccctgttaaagagtacagcatgaaggtggctgccatatgcttactcagtccactcttgtcctagtggcttcatcaagtgagatacagccttcctcctctccctggtagtctatcctttgttttaagaccccatgtgtcccagctggaaaaaactgtcactgaatcacttctgccttcaactaatttaaaaacattcaagccacataaagtatggtctctgactacactggaattaaattggaaattgttaacagaatggtctctagaaaatccacaaatattttaatcatccaaaatgatctctgcaaaatccacaaataatactcttctaaataattcaatgagtcaaaaaagaaatcaaagtggaaattggaaacctgaatggaaatgaaaacaatatatcaaaatgtatgggatgctgctaaagcagtacttacggaaaatttatagcactaaactcccatataagaaaacaaaaaggtccgaaattattaacctcaccttctttttaccctgaatataaaaaaaaaacataaacagagcaataaaacccaaagtagaaactggaaattatacagattagagtggaaatcagtgaaacagaaaacaaaagacagagtgagaacaagaaaaagagagaatcaataagaccacaggctagttatttgagacgatcaataaaattaatcaacatttagccagtctaattggagtaaaaagagagagtgaacaaggatgcagattaccaatattaggaatgagagagggaaacatcatcatagatattagagatatcaaaaaataatagtaaatatgatgaaccactgtactccaaatacatttggcaatttagatgaaatggacagatttcatgagaaacacaaactacaaatacaaaaatctcactcaagaaaaatagataccctgaactgctctatatctattatatagaaatatatcaaaacaaaagaaaacacaacaaaacagagcccagatgagttctccgatgaattctatcaaacctttaagcaacaaataataccaacacaaacttaaccagcaattgattttcagttcaattcattcaataccattaccctagtattaaatcataaaaacccttttcttaaaaaaaacctataaattaatattccccatgaacaggaatgtaaaaattctagaccgagctttagcaagctgactaaaagatacacagataaaaaggataacatatcatcaccaaatggggttcatcctaggacttcatggatggtttaccattggaaaaccaataagtataattcaccatattaacaaactataaagaaaactcatatgatcatcttaacagatgcagcagagcatttgagaaaatccacattaattcctgtttaaaactctttaagtaggaataaaaggctacttcctcaatctgataaaagccatctaataaaacctacaagtaacaaacaccatgtttaaaagtgaaatactacatgctcttcctctaagatcaagacaagggtgactgctttactacttttactcaatattattctggtggtacaagaatgaaataaggtaggaaaaataaataaaaggcaccgagattgcaaagagagaagtaaactttctttattcataaaagatatgataatatatatagaaaaatccaataaaatctacaaaaaagctatagaaactaataattcagtttagcaaagctgcagacacagcatcaatatacaaaaaccagttgtacttatagacaatagtgtgaacaaccagaaaaaacaaatttaaaaacatgatttataataacaatataaaatacttatggataaatccaacaaaagatgtataatgtctgtacattgcaaactgtaaaacatggcagagagaaattagagaagaccattaataaagggagagatatactgcgtctatgcgtcagatgactcacatatcattgatctatagactcggtgcaacatgattcaatatctgtactgctttgaatagtattttcccccaccccccaaatttcatgcctatctggaacctgtaagtgtgtccttaactgacaacagggtctgaaccaatgtaataaaataaagattttgattagagtgggtcctaatccaatgactggtggccctgtaagaagaggaaaatttggatatgtagacgcaaggagaatgccatgtgaagacacagagcccacagacacacagggaaaatgccatgtgatgaccaaggtgcatattggagtactggagtgatgtatctgcaagccaaggaaccccaaggactttcagcaaccaccagaggctaggagagaagaaaggattgattctcccctagagccttcagagagagcatgtccctactgacaccttgatctcagacatctagcagccaaaactgttagagaatttttttgtggggggttttgtatttaagccactcagttgtggtacagcagcccaggaaataatacaatatcaacttacagttgattctgaagttcatatggaaattcaaaggacctagaatagccaaaacaactctgaaaaagaacaaagttgaaagactaaccctactgaccctgatttcaagatatcataaaatgacaataatcaatatagcatgctactggcacaaaggtaagctaaaagatcaatggataatcacatggtccagaaatatatccatatatatacatatatatatatatatatatacacacacacacacggtatatacatatatatacatatatagatggtatatacatatatatatacacatatatacatggtatatacatatatattagatagatagataattggttgtctgattttccacaaaggtacaactaattttccacaaaggtacaaaggcaatttagtagagtaagaatacttttcaacaatggaatattcatttctaaagaaatgaattc

SEQ ID NO: 87 - DNA, 156260 bp, Homo sapiens
gaattcccatttttccagctgctgtttacttaccacgttgattttacagggcttaaaaactacataaacagagaaggatcatccactatctgcgtatcctcatagctttctgtttctgacactagtctgatgatcagggggcatcagtcctccctttatgtctggaatctggtccagatgttttgctcttaccaaaatacttccaatgccgtatttactgaccgcaagaatagaacaacataaaaatacaatggaaaacaggaacccatttgttcagattaggtgttagctgtagataaaatcaaggaaagagtaaaaaggttttcatcaatgaaagttatacctcttattattattgttgttgtcatgcatttcaatttgttagctatttgtagagctataaaagaaaaaacattttctatgctctgcttgctacagtacatgttatacctgctaggaaaaaccacaatgataaatgactaccatttgctttttaaaaaatgttactcacaaagaccagggactgaatctgctgaaagtacttcaagcctttcatacccagtgctatcaaatgtttctcttcactctaaatgttcagaaaaacacaattatcctatcttctgcccaacctatactatctattggtcaaatatatttatgggggaaacagctattgcaaacagagactaaaaatgttctccttgaccttgggcacatatttactatatccatgaggtctatgaggtgcagaaactaggagtattgctaaaccgcctgtccatcacacagaaatcacagcgaccagcacaaaaccttctggagagagtaggtggtggctctctgcaccatacatacctcattgctttcttttttctttctttttcttttttgaaatgaagtctcactcttgttgcccaggctggagtgcaatggtgtgatcttggctcactgcaacctccgccccccaggttcaagcgattttcctgcctcagtctcccgagtagctgggattacaggcacctgccaccacacctggctaatttttttgtattttgagtggagacagggtttcaccatgttggccaggctggtcttgaattcctgacctcaggcaatccacctgccttggcctcccaaagtgctgggattacaggaatgagccaccgtgcccagcccctcattgctttctaatcttctgtctcaatcatctccttagtggaaagccacataattatggcattcatgccagggtcccctaaacaccagtttaaatttgctttagcaaaattttctggaaatgtaatgacatgaatgaaatgcaacaatagcctaggttatcaatcatgtaaaatagggaaacacaactgggtgacagaaactagccagtcctgctatgagatggtgctatgaaagcaggtcaacaaggaccaagacccccaaacatgtcagagtagtgataggctcaagagaacttgtcgtctctgaggtttatgtcatgcattcatacattcattcactcatttatttacttatttgcttgttttctttgtgatattagctctgaccaatgcctgaaagtagtgtgtcaatcacgcaactggtcgggatgagacaattgaagatactttcattatccttctgcccagcatgaaattccatacttatttataaagtaggttattgtaactgatcataggcatttttctaataaagcaattaaaaaatttttttctaacaaattttaaaataataaaagaaataatttatggtaacattttgatatatttagttgtattcattttctaatcatacaagggtttatcttacaaaacatgagtcatgtttctgagaaaagttatagtaatggatatataatactttattgcttattctatttatcaagttatttaacagttctattagcattaaacactagttggtttcatttttaaatgttactctaacactgtgagaaagatctttggtttgtaacccaacaattattaggttacacatttcaataatttaaatactaaacactgctctatttctttatgatgtctccattaaacatgttttgggggtttctgctcaacattataagaaatttttaaaaaatttcaaaaacatagaatcatacaatgaacttccaagtgcccaccacctaggatcctcaatagacatgtcaccacatttgctttatcacgtcttcccacctatctgccttgatttgagtcatcttccagtcaattgcaatatagcttcataaaatgctttttaggaattctatggaaagtctctagcaccttatgtaattggtaatgtctttctgctgctttcctacatgaccaactattgacttggggtagaattactgtattgtgtttctttgtgctcaaaatttgtatgttgttctaatagcttctgacctttagtactgatatggataagtcagagaacaacctaattgttgttcatttgtagtgctttcttatttccaacctagatgcttgcagaactttttttttaaactttaaactcaaatatttaaaagaatacatttcaatgtagtctctccccattaagtttgctttttttggtgatttcttatgatccacatgcaggaattccatcaactaggaaaacttcagtttgagcatgtttttttctattatactggccacttctgcttctgtaacattcttatagtctcttcttcaggatgaacttctacccatgagctgtatcttcactccttggtccctaaatctatcatctttgcttgtgcttctctttatgtgttgggagaactcctccagcttgtcctcatatcactaaatcgattctctatagtgttgcttctcgtctttaccacatctcatgcaaattttaattctaatattacatttcctccccttaaaatcttttctcatgttattgagttcccttttcatctgcctttcaaagtgactttcttttcttctcaatatggttgccttatcatctcacccttcatcttttgtttcacctatcgaggtcatcttgagttttactgacaacaaaaaggaaggcaattttcaaattttgtctttgtatgtcaggtaatttttgttattgttgcatgttctctaaagaaacttttaactctggcatgcaataattattttttcttttgtattgctctataggtgtttgctaatctaaaaatgtatttacttgcttagttttctcaaatcaggagaaatctctataggcttgatgtttacagtagacgtggaaacattttctttgttccattttactcgctatctggggactcttagatatccttttcagaacaggagctggagagggatttatcaagtcttgacatagaatcacctgctctgaatcccctaaatatatgtgtcaaaggatatacttctgtgagagtagcagcaggccccaaatggcctggatgcttcagaaaggaatcccatactcatggcggggtagatgcgagttgtctctgatcgagggtggagatggatgacactctcagatattttcccttgcctggctcaggtattatgcgtcaaggatccatttatactttgttttatggaaaattatcttgggtttagctaacatttctagaatatacttttgaaatgttgactttctttttctatatgctgggttttttctttaagagtaaaatcattaaaatgaaaacaaaaaaaactagtaatagtgaatctgattttttgagtgatttttaagtgttttcagctttctcgtgaatcttcttttacacatcccaatgataaatttcatttttttaaaaaaatgctccaaggtttttttgttgttgttgttgttttttccaagatggctgactggagacgtcagaagccagttctcttcagaaaggggatcaaagttacagacgagtggccatgatctgaatggaaagctgagagaagagagccaggacctgttggagttcccatggaaataagctggggtgtagaaaaaggaaagctacgagagtctggcagagactgactcttaaggaacttagaattcggcagaaagggtaggtgggggtgcttctctactcccctcccttctgtgacaaactgctgaccactaaattgtcagagagcacctctgcccttgtgaccttcggcaatgctgttggtggcaatctgagaacttcctgaggacagagcagcagtggccagctcctccaggtgcactcggactccccgcaggcctgcactgaaatggcaggtgccataccggctgtgcacccagtgtaggtcactgcctgcctgaagaacctgcctgtctgtgtcaccagacccctgcaaacataccttagaacccactctgacttggcaatgataggggactgatagggaggatgctgggaagctctgggtactccagagagctagctcttggcagaggccgccccgagggaagggggaatacggcctgccaaagtgccccttggaacaaaggaaatgcaggcatggtgctgatttctgaaaggggtagcaccagtggctgggaaagatcatggaaaagaggccatttcccacttcccccacccaccattgtggatgcagagcagacttcccctactggggccttgggcaagtgcacttggagaaagccttttcagtgcatttccagatggccgcacccccagtgaaagtgagcctatgccatttgggtttgcacaaagggcagagcccatcttcccctccctaaacagagtgggcagcatggtggcaacagaggacagacaagtcacagagctgtctgctctggattgggggaagaagctgtgccccaaggccattttgctgatagccaccagagaggtcctttcacagacctcagtcacactgcagactggagtcaaaggacagcatctatgtgaactgaaggtcacgagtcctgcaacaggaaagtgaatcacatccctgcctatctaggatgggaagctgctgcagccccctaacccttatccccaagagctcagcacatcctcctcctgtcacccttgtcagggcaggtgcctccattcatcatccagctacccaagggtaagccagctgtcatccttaagtgccacctactggactggagactgaagaccaaataaaaaacctgctgcagaagggcatagtgctaatgtatgagataaacttcttgagacctccacactcccagccccacagaagacagtgtatcagttcatacacccaatatactgctacaacaagcagtgtttgagaaagccaccacacaacagatatccataaccaaggaacccatgtagagccttggcctcctgaaagcacctagaaacaaagccaaacaatcatatacaacaaactccacagccatatcctcaagggaaaaaagagtaaaaatttaaatgtcccatccaaaggatgactaatttaaaaataagaagtgacagcttcttcacatgagaaagaatcagcagaagaactctggcaatacaaaaagacagagtgttttgacaccttcaaaggagtgcagtatgttccctcaaacatatttgagggaatgattcagaaaagttttcctgatcttgatagagaagtatttattcagatacaaaaaactcagagaacatctgggaggtactatatgagattaacatcatcaagaaatataatcaacagagtatccaagatcaacactaaagaaaaaatcttaaaggcagctagagagaagtgtcaaatttacctgcaaaggaaattccaacagactaacagtcaacttctcagcagaaaccttataagccagaaaagattcggggcctatttttagccttcttaaagaaaaaaaaaatgccagccaagaattttatatcttgtcaagctaagcttcataaacgaaggagaaataaagtctttcccagacaaacaaatgttaaaagaatttgtcaccactagactggtcatacaagaaatgctgaaaggagttctcaacatggaaggggaaggatgataccaccataaaagcacacataagtacaaagttcacacatcctataaagcaattacacaactgagattataatgcaactagctgataacactatgataggaacaaaacctcacatgtcaatattaaacttgagcataaatagccttaatgttccacttatagattagaaaattggattaaaaaaacaaaacccaaccatctgctgcatacaagacacccatctaacatgtaatgacacccacaggctccaagtaaaggggctggaaatgatatatgatgcaactggaaacaaaaagagcaggagttgctatccttatgtcagataaaacagactttaagccaataacattaaaaagacaaagacagcattatatcataacaagagttcaattcaacaagaagatttaactatcctatatatatatatgtagatatatagagagatacatatacatccaacaccagagcacccagatttataaaataaatgctactagacctgagaaaagagatagtcatcactacaataataatggaggacttcaataccccactgatagcatcagactgatcaccaaggcagaaaactaacacagaaactctggacataaatgtacttctaaccaaatggacttaatagacatctatagaacattccacccaacaactgcagaatatacaatcttttatctgcacatggaacattctccaaaatcaaccatatgcttagccataaagcaagtctcaataaattcaaagtcctgaaatcataccaagcatcttctcagaccacagtggaataaaattagaaataaataccaggagaaactctaaaaaccacacaaatacttgggaattaaacaacttgctcctgaataacttttgggtaaataagaaattaaggtaaaaataaaaaaatagaaacaaatgaaaatagagacacaacatatcaaaacttctgggatacagcaacagcaatgctaagaggaaagtttatactgttaaaatacttacatcaaaaagatataaagatctcaaattaacaatctaacgtcacacctcaaggaactagaaaaataagaacaaaccaaacctaaagctagcagaagaaaagacataacaaagatcagagcggaactaaatgaaattgaaaattaaaaaaaatcttacgaaggatcaacaaaacagaaagctggttatttaaaaggataaataaaatttatagactgctataataattaatattaggtgtcaacttgactggattgagggatgcctagatggttggtgaagtattgtttctaggtgtgtctgtgaggttggtgccagaggagactgacatttgagtcagtggactgggagaggaagacccctcctcaatgtgaatgggcaccatccaatcagctgccagcatggctggaacaccaagtagaagagggggataagcttgcttgctctgagttctctctcctctcctctctctctccctttccctctctctctctctctctctctctctctctctctctctctctctcgtgctggatgcctgctttctctcctactgcccaaaactcaaggttttgggacttaacaccagtggcctcttgggggttctcaggcctttggcatcacacagagcttcattgtcagcttccctggtttgaagctttcagacttaggctgagccttgctactggtttctctctgtccccagcttgcagatggccaatcgtgggactttgccttgtaattgcataagccaattttccctaatagactcctctctctctctctctctctctctctctatatatatatatatatatatatatatatgtgtgtgtgtgtgtgtgtgtgtgtgtgtgtgtgtgtgtataaatatatagacatagatagatagctatagagatatatctatctatatctatctatctagcatccagcaattactctctctccctctctctatatctatctatagatagatagatatagagatatatctgtatctaactatctatctatctagctagctagctttctatctatatagagagagagagagacagagagagaggaatctattagggaaaatctctctctctctctctttctccctataaaagtgagaacaccacatgttctcacttttgagtagaaactaaccagtggatacacattgacataaagatggaaataataggcattggagctccaaaagtggagacggagaggaggctgaaggttggaaaattatctattgggtataaagttcactatttgggtgatggtttaatagaagcccaaatcttaccattgcacaatataaccatataataaacctgcacatgtaccctctggatctaaaataaaatttaaaaattttaaattaaaaaaattcaaaaaattaaatatacactaaggtaaattatacaagccataagtacagaataaagacatatatattttaaattttagccaaatgatattcttccatggctatggaacactttatactacagttagagaacagccatcttcctggcatttgctcttacagagacatttgactacaggaccactgaattcaaggcttactgatttaccccaaagatggagaataataattctgattctgattcataagcaggtttctgcttgacagttttgatatatgcacattctgtagactgagggggaaatggatatttatcatgaatttacaattttccagactgtatctcaggtggtttacatttattacacattattcttccaacaaccctattaaatattcccccattttcaagaaaaattaactagtacttcaagtttaagtaactcacctagtcagtaaacaaggactgaaacagtttgtctaactctaaattctgtgttttctcacaccatcccataaccaagaagaccacacatctctcaagtaagggagttccacggaaattctgagacctcctaaataatctttggttcccaagtgatgtttgacaaagaatgtgagtgtattcttataaacagttgatacattcacttaaattgttggaatgctactctttaaagtgagatgcatagattataattttttttctttattcatgtacacatactatctgggcatcaaagcaaacatatcacaaaatgcctcttaatcaatagcaaattatacaataaaaagatatcaagaagagtttggtttgatagaatttctccacattacttaggccgggcgcagtggctcacgcttgtaatcccagcactttgggaggccgaggtgggtggatcacgaggtcaggagattgagaccatcctggctaacatggtcaaaccctgtctctactaaagatacaacggcgtggtggtgggtgcctgtagtcccagctactcagagaggctgaggcaggggaatggtgtgaactgggaggtggagcttgcagtgagccaagattgcgccactgcacttcagcctgggtgacagagcgagactccatcacaaaaaaaaaaaaaaaaaaagaatttctctacattacttttgcctactttattattctacattattttgtcctgtatttgttctatagatttcatttttgtcctgtggatttcatcgttaagttatgtacaggctggaaaagtggaaaagatgaccagttgatccattgcactacagaactacaactgagaacatttagaagtttcattgatagctatgttcacaagttagagattaatctgatcccatggctggaaggaccatagggcccaatgttctcattttagaagggaggaactattataaagtagaagcagcactagagacagactagagattgggttttagttttgactcttccactaatttgctatggagctggaggaagtccctttgggcctagctgtgtaaactcatggggaaaagtaacaaaggagaataaatacagcgggaattctggctgcagggcaccattgccttttcttgcccatctctaattctagatccaacttgagctcttgacttgtctgaagttccttggcattttaatgaaaatacagcattttcttcagaatccattttaaggaaaagcccaagaggtaggtagggtatccagatcctcattatggccccaaatagaagatgattggactatggcacaggctggtgactggtaaatctcttcacgtgaactatatttaaaacaattcaggtcataattttccttcagtgtgactgtaggggcaagctctctcatggtacccccggtccctagtagcgttcctttcaaagctggcacttgataccgcaaatttcatttgacacatttatgcgctttttttctaataaaggaatttagtggtgtccccctcacaaccttcagctcaatcatctttttcaatctgctctcctggtattgcctgcagtcctatcatgaaccctcagcagccgggtcccagagcaactcaactgcaggcagcactgttgccatggcaacgtctgttagaactagctccatcactttcttcaaaaattaaagtcttctacagagatcccaaagttaatgaatttttggttaatttggcctttaagtttgtgtcagtatatccaataataatacagatcagtatttaaagttttaattagtgatttatccgcaacgcataggggagaagtggataggaaaaggggacttatcttttaatgcaaacgtaaataccatgtattgttctctctcagagatgaggagataagcacatactagtttttggagcagccgccgtggacagcttcaatggggattgcaaatagtttgttaaagagattgcttaaggaagacacatttatggtacaataagcatttttctatggctggctatgtcatctttgaatgatatgtaaggtgcctgctgttacacctcaaactgccttctcctaagcaggcccaggctcaggttggcagaaggcagagggaaggctgccagacatacccagagactagactgagaaacagtgatctgcaaatcacctgaatgtcattacactttgttggcaaaactcccaaacctgaccctgtcaagcacgacatatatctcaccgtgcaacctgggacccaacccagatggcagtgtggggcctgaagcttgaggaggggcaggcagctgaaagtcacacttggaaggcctgactgccaacctctgagttcacagcctttgaactggccatggcattagtaagtaaaagccactccacaatgatatgtcatcccgatggcctagcaaacagaggctggaaaaaagccataaacacagggtgctcttgttactacaaagaattgttactacaaggaatttttaaagtaatacattttgattttgggggagcaggaagaggttatcatgtacaaccctcttaaaggaagaatgagaaaactggcacagagggtaaaatgatttccctaaggccacttcactggttgaccatgcagttagttccccatattcctaattcaaggtctttcaaatacatcccctttgaaatttgctttgccgccaaagtggaggattaggacacacattatctctgagaagctcaaggttgaggctgcacagagtttctgtttcatttcaactcctcagccacaaaccaggaacatccatcaagtctaagcattcgttgtgggaagtctttgtgtccacttggaccctaagttgtgaccctaacggctttagttagatgtgatatgagacgtgttgataaatatatttttataaaacctcctctttttaaaagcatctggagtagtcaggagatagacagctatggcttaaaataccaggatttgaatcacatgtcactactttctagatgtgtgatcttggttaatcaattaatctctttgtgtccgttttcttaatctgtaaaacgagggacctgatgcctaaataatcctatttcacgggactgctgtgagagaatgcatgacaatgctactgctccctagtatctcttatcacagtatggccttctttactatcaccttactctctttgatcatactccttcatttcaggacacacacagtagtcctcaaaggcagtatctgaactgcttgagcaccgatgctggaacacaaggcaacttgctggggaaaaggaagggatctctaatctcaaatcaagcactttttcctgatcatgtttaaggtccagctcatgtctgtggagggctagcaggagggattcatgcaagggcctttctatcgtgcaggtgagggatggacagaacaggaacaggcaagaagtgaatgagaactcagcacacatggtctagggggttggttccatattatccatggactaaacaaatcccaacactgccacctgtaggggaagaggagtgagccagtaagtagaacacatctgtaaggctcttgtaggtctaaattctgatttctggggtgggactgggcttcatattggggtggggctttattatctcaacagagttgtctttttaacatctgaatgggtctggtcttacataggctacccaattgtgttgatgaccaggaatggtttcaatgagggattatgaattgggcccaatacatattcagaagacagaataagagtttcttatcctgaagctaatgataactagtcatattaaatatatcaagctaaagctctagatttagtatgtgacaaaaagtatacaccaaggcagacacaaaaccatcttataatcatgtgttgtatgattccatttatatcagctctctagaatagataaatccatagcacattggcaggtaccaagggcctggggaggggaagatgggagtcactgcttaatggctatggggctgtgatttgaggtgatgaaaatgttttggaacgagatagaggtgatgactgtacaacactgtgaatgtactaagtgccagttaattgttacttgaaaatggttaattttattttatgtgaatttcacctcagaagaaaagtacatgccaaaagtaatacttaaaagtcactgggcatctatcacctaaaaatggctcctcaatagtggaagaacaacctgaatcttgagttcatgttcacatagatttataacaacactctgaataaacaatgacatttattaaaaagtctcacttggccctgtttgagatggggctttggaaatcacactccagaaggcagggaagatgccgctactagcagttggtaggtggttaatgaatacttaatatcagccacatctcaaaacagcagtggccccatatttcagagatggccacctacaaacccagatcaacctgctctgtgaggttgggggaactgatcactgtgttgttactttcactttattcttggctaattttatctcttccctatgacttcctgcaaagacagagagaaagatctaggttcagttacttgtatcagatttggatgtatcatgtttgtagatcatctgcccttctttttccttctacaaccacatggaaggaggacgcagctgagagggcactgccagttctctgaatactcacatctcctgggcaatgaagatagaaaaattccctattcattcactgagtatgaaggtgcctggaaaaggggaagtcttcttagaaaggacaaagaattttgatgggacacagcttgtttgggaaccacatggaaatttgtgttgatggagatctaacagggactgggtccattgccatttctgacatgaggcaacactggaagagggggctgttatctttgcctctgctgctttctcctccccagagtacatatttcacatgcttctgcttatttgcttctcaccaacttttcatgacgatgataacaataatgatatcaccaaactgtcattaactaataacctctgcacgacagatgttgaaactgacaacatgttttatttctaagccctcatgggaaacttttaaggtgattattattaactccattttatatttgaggtaagtggggcttaggtgtcacagagctgtggggcagaatgaaaaaactgacattgcttttgatcataataactggcttgcttttcctaaatataaaaaaagccaaagtatctgaatgaaaaaaaaaagagaaggaaaatgaccatatacatatttgtactttaagaaatcaaactgcagcccctttaaggaccccaagactgcactgtcaactaactaacaaatcaatgacttagaatttgatgggcatggattatgcactctgctgtgtgcttggtatcatgaacaagagagaaacagacacttatttagtttgaggggcattgaaaatgtaactatttgctaatgggaatacaatcaaactcagaaaataaccaattctgtgatttttttttctaagaaaggtaaacaggaacatccatctccaaggttctcataaaaaaaagaaaaatccatatgtatgtttcttgacatcttaaagcatgcttcagtgtaagcccttggagttggaagatcattctatgttaataagggcagacaataattcaagcttcctggcttcctctgatcttcaatgtcttcttctgacatactgagagatcacatctagaggcacaggggaaacgctagctctcatgtttactctgcaaaaggataaaacccaaatgctgtttcccgtgaacatgagtgtcactgaaggacacctcaacctctgtgtaacgtgcatctcaaccaccagtctgtggaaactaggaggcaggagccatatctatttaccacatctctgtattctccagatccagaacagagcctgacacctacagaggactcaaatatatctgtcaactgagtaaaagaggaagtgagcacatgcattctgttcagacagaaatattctagcaagatgaagttgatagactatagtctggcaattctgatatgtatatatttgttggtttaaattggtcttgacaagtttagtggtaaaatttttaaaaaacaaaacacagcaaaaaccaaagttgtccccagaataatgggtcaataatgtttcataatccaggattccccaacaattctaagaacgtctttaccacagtcttccttacatttatatgttctaaaaactatgctaactctaaatttaattacacggcattattttgaaaaaataataggcaaaaaagaacactggtataattcacatcatttaagcaaaatacaggcactgacagaaatttagagaaaattagaaggggcctctttagaaaaaaatggaataaatgtgggtaaaaatctaaccataattaattgtaaccaaataatacattatgaattggctctgtgctcatctttacctgctttacaacctgattctctaacacatattgaaacgaatattgaaatcatattgaatttttttttttttgagacagagtctcactctgtcgccctggttggagtgcaatggttaagatctcagctcactgcacctctgccttctgggttcaagtgattctcctgcctcagcctcccaagtagctgggattacaggcacctgccatcatgccaggctaatttttgtatttttgtagagatggggtttcatcatgttggccaggctggtcttgaactcctgacctcatgtgatttgcctgccttgccctcccaaagtgctgggattacaggcatgagccaccacacctggccccaaatcattttttttctaacaaatattttcattatttacataacatagaaacatctggaaaagtaaagacaagagtgttgtttttttaaatgcatcctgtagacataccagtaaaatttgatgttgttgggaaaaactgaagacaatactacctatatgagaaataaaacaacaaacaaaaatgtaataattaaacttttcttaaaagccctaggtttcttttggaaacaccgttaaaatttcccatgtttgaaattatacgtgcctctttacaaaaacaaaacaaaaaccaaacaaacaaaaaaaaccagaacaatcacaaacttcatctcaggtgaaatgcattctgtcaaaacttgaactaataattatggtgacatttcagtagtgaaagggattacctcaaaaggtcatgtcaactcaacgctgactgacgacaaccacagccagccaattaattaatgctagggacacaatgtggatttttgtttttacaactaaataccacgtatctagcaacctaatagacctttctccagagaaatataaccctaatattatgttagattattatgaccggaaggaagaagctataaatctactttaggaaacaaaaatacattttatctgattctattttcctaaggagaagggagaacgaggggaaaaattgatttcatccaagtatgtccatgttaaaaacatggaaggcagccactactgatgaccattaggcaaactaaattgctgtaaactgtctcctcttagttaacattgttactattatttttcagtccatatggagaaatgaacttgaattttttctctgtggaaagcgtggatcacactgtgagctctgcacctatgattcttgcatcacctatggatctcaggaagtgcctgaatccttcattagactgtaaattgccttatattttacaaggaatcaaaatttttgattctctacagttcacctgtgagcttcaggagaaaaggtattttcagaatgaagcattcttccaaacagctgcttacccaacatgagggaagctggtttgagtgatggttggtgcctgtgccacagggtgttgaatatttttcatattacccttagtttaaacaatgatcaaacatatgaatatatatatatatatatatatattagctattacatagtaggtacttaataattggtggccactaatattgtccactggaaaaccataaacctggattctgaaaaaaacaaaagcctacttagatcggtttgttgaaatgaggatgggtgtgggaggtatatgaacatgacactcttagaagggatcatagagaatcaacattcagccgtattgaacacagtagcttgtctattccacatttccaatctattgcacaacatccaatgctgcccctgctcatgggcatgatggcattaagccttacactgaatagtcttgggcataaaatcaatgaactagttttaaaacattggtgaagatgaagttggtgctgctgttcaaaatagggatttgatgagagctttttcagaatcaaaacaatttccctcaaaacctaaatcaatatctttttaactccctggcatcatccacattcctttaaaaataaattatcttcttaattataatagtaacgaaaaattaaactccatttttcccttcctttgttatttaaataatcttaaagctaaggtgagtagacagatcaccattggacaccaagtgaaaaagcactgtctgcatggacttgctgaaatctccagtgaatctgggagtggccctggacacagcactccctggtctaaagtccctgcaagcaatgcctctaggagagattcagtccagctttaagtattttccattactatcttgcactattatttatttttctacttgattaatgaactgttgatgtgacagatgacctaccattttccctgtaaaatgacttaaggcaccaacgacatgaagtaagactcatttctctaggtatctaatctagggaatgttatttttggtaatagagaaattgtttttcctatttgtacagtctatgaagggtaaatggtaccctgattgaaattgttggaagacatttttctgcatttcataaataaatgacttttcactcgccatgggtatttggtactctacactttcatgggtattacaatgtccaattctacttggtacatatcagagctcagcccagtttgcaatgtggtgttctttatggctgcatggattagggtaagagcaggtttccaggcagacaaatggatccccatcccagcacaaaaacaaaacatcctcaaggtccgtattattatgagtcatcagcagacttaattgtgagcaaatggtggtgcatataggaatccttacagattcatggagttgtgatatgggatttcaacacctcattggaccttaaccaacctatgaaactaatattgtaagtaatcaatatgtacacacaatgaacaaagttattattctgtttatcacatgcaagttccctaataaaggcacgtctccagctgtcacaggtagaacaaagcattaacaggtctgattactcgcaagttctacaacccttctactgtgctatacctgtggctatgtacagttttctttagatcataagatcagttatctggatatcttccttaataaaaaatgaaagagaacaggcatgaaggctatttgaacctgggagctacgacagatatggagcatgtttggcccaagtgaggcaaagatgagagcgatgcatatggtcatgagatgagcatggctgtggcagcgaggcagatggagggtgagagggaggtggtgctcaccactgcctcctccactggctcctcagcccgagtgtccattccaaggtccagaccaacggcaggtgtgacagcagccagaggctcctctgcttttggctctgtgggtggagcctgttcagattcagccttggagtgtttgttttgagggttagaggaaaaagattcaacaggtaaatagataacattacagaatactggacaattaagattttctttgtcatcccataggcaactagcttcatgaaatccgtgctggagaaaagcccccatttgccatcataggcttttagagaatggaaaagactagaaataaaatcttattaagcttctgctttaccatcatcaagactgtcatttcccttgaagtcaggcaagacttaccattttacctacccattttacttacttgcaacattttgactacccacttacctatgatagctataagaggttctgctattttccagagagagagagacagagacagagagagagagagagacagagatagagacagagacggaggcagagacagagagaaaggattctaggaggacccacaattacttgccagtgggaaggagtaaggaagaaatcgcagggcacacagttccagggcctttcagttttatgaatatgcattgcaccaaaaaaatcaaagagtcattctaatagtcagactaaaatgcattcatttgacccaacaggtcaccatgaagctagtgttccacttccaaggctgggaagaacagaatcagctacctggctatttgctactacaatcatagatactttactgccttgttgtaaattcctgttcagtccctttttccctttctccctccaacaaaatccttagtaatgcatttatttcatataatagttgtttaaagaaccacagggcagtattctccatggtttcaattataccccctgaattgtgtaggcagggtgaggtctttttgtcccaacaagacatataaacatcatcctgatttcaattacatatatgctgaatcaggcttctggcatctcttagatcaaggcctttttagttttaaaattagcaatataaactaacagcaagccattaaaagcaccacagccaatgcatgttactacaaatactgaaaatattccttctttttccattcttattaatataaataaacatatttatctagtatgattctttcactaaatgaatggccattagagggctcataagatccttttctatcaccagaacacttaaactaaaaaaagtttaaaagtgatttcccagtggagtaagaagtctctaattaatgctgtgattggagaaatcagtaacttctatccaactcaccataagcaatcaaaacacacctctatttgtcctgtacatttatctgagtcagtgcacatggcaagttccacagagaagtgctggaaaagttatgctgagataatacaaaatgaatatgaatagcctagtgttggacaaatacacaaagtatttgtcttatgtttcccaccaaatcattccatttttatgcatgccaggatcacacgactattcttttcaaaaggacataataaattcaagggactggtagacaagtgtgcagacatttgatttttatgggcttttttcagctttaagaggtggcctgacataatttttaaggaagaatgagataaaattcacactaatatgctctcaagagtcctttatggaaaaatacttcacttttattgtttgaaaagaattatcttcatagtggaacaagttttcataacagcaaatagatactgtaagtgctcagggaatgatcttaccatttgggaagtcaaggtgatttgctatgacagcctggtatcaaatgaccttcacaatgaaggataaaagggtaatttgagaaaacaccaagaaatccacgagcagatgctgttcactgcaaactgagtctactctatggaagaagtaagatcgaagccagatgagaagccaagagatgttttaaaacatgagccaaagaaatataacatcatatattttataaaatgcaaagatatcttaaaatgcaaaaaatatttgcaccagagtctgggtttcttagaagtctgaagaaattctgacattttttataaggcaagaataaatagctagggtgattttataaatgagcccaattgcatttgcttgttgaaatttgacagtgcagctgtggtctagtataaagagaacataggattgcttatgttccccacaagtcacaagatgtttcacatacgacaataacacatgaaattttacaatatggcattacaacttaacctaaattccaggaggatagtatagctcactaaatgatgagtaacaatgaagcatggttatatataaaatcagctacccaaatttagaaatagaggccacctttctattccaagataatgtaaaattctaagtattttgtcaagaaagagggaaaagcaaagataaaatgtgagcaaccgcttgtggagagatttaatatagtcctgtgggaattgtgccctaccttcactgtttttcctacaagatgcctcccttgaaagacattgcaaatgggttgatcccatgccacacctattttggagtgctgagaatgatttcctattgtttgcttcagtagcagtcattacacactcagagaagaggtacatcctttacagatattggtggcagcagatgccacaatggtttaactctgaggaccataaaccaattattcctttagaataaaatgaggagtgtagccttgcagcaccttttctggtatcctttgtgataagatgaaaggcgggtcaatacagaggaagaggagatgggttgggacagcaggggcagaagtctagtcacatccaatgtggccttgtatccagtttctccaatcctgagagaactaatttagtgagaactccaaagggctttagaggcaaccctgagccccgagcaagagttactgattcaaaagggtttaaacctgtactcaaaagatgtcctgcggggctgtatgatgcaggctgggagatgtacagctgattaccaacttcaccccctacctcgctcagaatagtcaatgagccaaacactggggcgttttcttgctcctgggaagatcgtgtacaatcacgactcactgggagacatcagttcactgtgatttcctagatcagagggcaggaccaaggttagcagcatttgcaatgctgaacatgacaaagctaagttccccatggaaagaaggggcaagatgtctgcttcagagaatacatacaaacagaagagaaagacaagcatggaagctcctaggaccagccatggatgacagggaaaggttcactgaaacttaaaaaccactgaattctagacctgaatcttttgcatccgtgtagtaggtgtgagtttaattataaccaattgcctttccttttatactggtatttctccatttctcataaaccattcatgattgataattaaaaattccgttctccatcttcatcactcagctggagaatcaccaatgaacatgaagaatgagcttcactggctccattactaacacaagtataatttgtatttgaaacatttaaatatttatttgcaggccagagagactctgcctttcagctggttgcccaaaaggcaaaagtgtgacaatctattgacaaggtatgagagacacacctgtctttgcaaatatatcaaaccagccttgaagacaaactttccagaagagaattccttacttaaaatagtttaaaagaaatcattctatttaatctcaattccaagcatccaatatgaaaggcaggagctaggataagtatgcactattcccatgagaaaaccatagtgctacaaataaccctcatgaactagtcctcaaagagcccaaatcctctgaagtgtagcaatgacatgctcaaaagtgatatctcttaaggtctcttcattcatctttactagtaagctttaagctgttgctaaaaatgtttcccatcataactgcaacactgatcttttaagaatcttctctaacgccaggagtaactatttctatttcttactcatcccctaactaagcttttctctctcttctcatttggtatcaaattaggaatcacaactctactatgcattactgctttctacctctcacaaagtggagggatgagatgataaatggggtagtttcacgttcaagaaacaaacaaggatttattttgaagcatgaattcttgagacaatttcactttaaatactggaacttaagttatattcacatggaaatatacatgtctttaatggattcactgtgttctgctggggttcatcattaggagactagtttttgctggaatcactgtgcctgtgtgaatagaaataaccaaatgcaaagtcacactgaggttttacagacacattctctcctgttttctagaaaagtacaggatccagaaaccacattctggatattcaaactctagacagcctagaatgatcagctttagaacattcagtgataactaacaacttcctgagagcacaaacccaaatcaacttaccaagttgcagatcatactctggtctgtctgcattgtgaataatgaagtatcctggggctgaaaatcaaggataaaaatagaagatgttttttaaagatatttaaatcagctaccatcaattgtgtctgcctacgtatctatctatctatctatctatctatctatctatctatctatctatccatctatctatcgacactctatctatctaatttttttttgagaaagggtctcctctgttccccaggctggagtatagtggtatgatcatgctcaccgcattctccacctccctgggctcaggcgatctacctcagcctcctgagtagctagaagtacaggcgcacatcaccacgcctggctaatttttgcatttttttgtatagacagcgtttcatcatgttgcccaagctggtctcgaatttctgggctcaagcaaactgccgagcttggcctcccagagtgctaggattacaggtgggagccaccatgcctggcctcaataaatattatttgaaacatgttcaagtccccttttattttaaatcattaagtcaaaacatgcaaaagtaagttttaataatagttattctaaatataagtctctgctagcagaatactatgagagtcattaaacagaggccactggcttcaggggcatctttagtccacagcttctcttctggccgttgatatcaaatcagaagttagtggttgaagctccaaaatttaaactttttaaatgttgtgaattcaatctcactatattacttaagtgttccttctatgggttatgtatgaaccatatgttaacatttcataaaatatgttcattgacctaaacaaatcaagctggaggaaatctaaaggaaaagtaatctctaaaggaaacttcatctctcattacattggtagccaggcttgcaccctccaaacaggagacccaggtgtctttcctgggaaatctgccagctcaaggaaaaaaacaaaatgcctgaagaaattgacatcaggggatgcctaacggaaaagatgagccagtgccttttggttgaagatggtgttttgaacacatgcagttgcctctgttacctcctgaatccaaactaaacaacaataaagggatttttaaggcatcaacctataagaatgaaaagaatgagaagaaagatagaaacaacaaaatgttgaaattggaaagcagatgaaagagtagtaacttggtagatcaaagaaatctgtatcctaaggtgatgctagaaatgctgcaaatcagtccgatttgttccttagaactcccagtggtgaaaaattagaagcataaagagccacaggaaacaggagtgagggtggtggtaacaacagaagaatagtaaaagtctattacaaagtcatcagacctcaagatattcttacctactaagaacaccaagcaacatccttgcctaccctagcagaagacttgagattaattatatagaggctgaaacagggtccctggactggggaacacacaggcacatcaggaaggtagaagcactgagtacttacataataaatattgagaccatgcacccctctctcgccactctgctcccattttttccccaatcacctccattacactagtagtcagacttgaacttcacagacaggagacaaaataaatcttccctgggaaatctggccagcccaaaggaaaaaaaatgcctaaagaatctgacttcagtggctccccaacagaaaagataagccagaaagtcctgcaacaatgcccacagtcaatgaactctatctacctgtacaaggttccagtcagcttttcagcatcccacttttaaatatgaatattcagtcaagatcaccaaacatttgagaagtctcaaatataaaagagagatggaatagaaagggttaagcaagaggaagaaacaaagattttgcaaaaataattcaaaatgattattaataccttcagagatataatggaagagaatcattcatgacacaagaagaagatgctattggaaaataaatatgcagtaaacaaaaagagttattggaaattgaaaaaattatagggtgaaaaacctgttagaatagttggcagagaaagtagagaaagacaacagagaaaaggaaacagcaaagaaacaataatagaatactagtcaggaagttaaaatatgaaaaagagaagtgttatggaatgagagaacaaaggaaaaaaaaagataaagccatgaaatatttttttaaaattctcccaaaccaaaacccataaattttgagattaaaaaggcttatacagtggatgaaaagagactcagaccatagcccatcattgaaacatttcagaaacactgaagtaaaaagaagatgctacaaagttccagagagaaagagagaaaaggaagatgaaagaggtaggaggagggagatagagagaaagaatgaggagaggaagcaggtttcttacaaaatatcaagaatcaaaatgacagtttcttgaaggcaacactaggtggtaggattgagtggagcgatggctgtaaaattataagggaaaatgatttacagcttcgaatataatacccaaactagcagtccagtatattaatatatatgtaggacatgttcagatgtgtaacgtcacaaatatacaccttctgtgtatgcacttttttcagaaagctactggaggttgtgctccacccaaatgaatgattaaaccacaaatgagaaaacttgcatcagaaaacagtggaaggacaggaaagagaggtgaaggcagtccccatgaccaacaggatggaagagccagtgagaacagctctacagcaagtcacagtcatagagtacccagttcagcccacagcagcccaggagaggaggacagataggcaatttcttcaagaagatgaaactgattgaatgtctagtgttttcagcaaaataggagatttgtataactatagagtatggggttgaatatgtgataagtacctagaaaactaagcatatcaatcaaaaggcaaataaattagacccacaatttttttataattaccacaaaggaaaacaaaaagttggcatgaaacaaaatgtgaaattcatgacttggctgttaatagcattttcatcactattacattaccacagattgcctggatggctttgatggaactctatcagaggaagggcaggaagcagaagagggggcgaattgggtgggtaggaggtggaaaatactttaagtcttcaccttccagagagatgagtcaatagataatactttagaaatcaagaagcagcattataagaaacccatgcacacatatagggcggaaacagagaatttgttgaaggaagtgaaactatttacctctaagaaacaggaaatgaagggagtgtatggtggtctgaagttttaaaataaaagcccttataaaagttgttacttttaaaattatgtgcattaataactctgatggaaatacaaacctgaaaagaatgagaaattgatgacagagcctatcataacctttcaaaggaattttctgaagatggaagagatgcattaacgtctctttgtatttgtgtgtatctgtatttggatgtgggaatatcagtgggtttttatctttttacaggtaacatgggaaaataatgaaacctttaaatacagaattctatttatgaatatattatgaatatatatttagagaattataaatgctaaattattagaaactgtgcatgtctgacattctgagacaaagcaggcatcacagacaagcctgtctgaggtctccattgaagaggttgtcagaactgatccaggagcctgagagccatgtggccggccttttacacaggttacacctgcctacctgttgggacatacacatacactgtcctaatgggacagttcatcttgtggtttctctttcacagactctcaagaaaaatactgccttattggacacaaccagcctatggtttctgatcttccaacagctccttcctggagaactgctgaagaggtaaggctctgtgcagtgtggctcctataggaatctctagaaggaagctcctaaaaccctctcacattttctaaagatccatctcattagttcaaaacaatcctagctcttctttagaacagctgaatccagtggatctctcagatcagaacaacttctaatttctagtagaggaatcggtagaaggtagaagcccatggtatagctaatcatattaataaaagctaaactaaagtcagggagaacttagtgtgtgctagcctgctgggctaaacactctgttgcatagctcatttaatcttcacaataatcatacaatgttgctactattctgtttccattactcagtctgtaagtagtggggtccaattttgtgctgatattcttaatcattacgctatactagtggcacagagaaccaaaccacattgaaaaaaatgtgcatcattctcagcagatggatcttgtaagaaaacagattccttacctgtgtgaatccattaaatgaaccaccagaagcctaaacagaaacgaaaatcagattgtgttattatttttcattatcattttgtaggaccagtaaatatccattagacaagttggaaagtaaagactatcacaagttttaaaataatacaaaaggttgctgtgcatgaaagaacttaggaaatgcaaaggccacactgtatgattttaaataggctgacaaaaaaaaaaagaaaggttaattttacaattattgctgctgcattattgcttggtgccaaccaaaacccactttctctataatgagaagatgattccagaaaagggccattaggagttaaattgcttgtttttcaggccattgatagaatctagaagaaacttctccagtgtttctacaatgcatcattttgatgaacagcaattatgatattttacagtttcagtgggcctgggttgaaacatttcgtgtgttctttttggagtggaaccacttcaggaacagtaaattagtctgtgctgctcttggtttagcacatttttagtacctgcatagtaaaagtgaaagtagggagaataaactcagaaaatgagatggtaacatagactgtcattaattcccaacacaatcattccgctttgtgtgtatgtgtctatgttgttgggttctttttgttgttgttgttgatgctgctgcttttttttttttttggtcaacctatttgtgtttggtttgcacagatttcaagaagtacatgacaatctgttagagagatcaggcctcctagaagatagtgatggataatgaagtaggtgacagacatgaggaaaaacagagcctacagaagtctttggctagtctatgctacagaccagggtaagtacctcgtctttgtcagcctctatttcttggtacaacaatccatatctctggttagcaatttcatcttcagataaatctgagttgttgatgtcctggtctcgggaactagcagaactctcagtgctagcattccaggaggtccccaaaatcaatggtcttgctatctcctggctttgttcccagcagctagcaatggcttgttccctacaatcacctgctagtaagtccaccttcagttcttccttgtgctcaactacatctgaatgtgtccagctattatctaagccttctgtatctctgataggccagtggttaatagaatccagacaactggcaaatccacttgcttggccatctggtataccagagaatcctgttatatccaaattattcattgctgaatccaagcttggctgccagatttgacctggatctgttccccaagagtctatctctgcaattcttggcaagttaacagtatgactacagttctcagttactgttctttcagacccttctattagtgaactttctgccttacatgaacataaatctcttctgtttgcatctcttcccagagaataattaaggtcagtcctagactgagcttctacttcaagttttattgataaaacagcctgatttttatccctgtcacctacaagagcatttaacacagtctcacactgaatttcttcagcatctgtactgtcttgtgctgggtaaaatatcatatcatggttgggagtgtctattgcatttttctttatgtcttttctagtcaaatcccatccctcagggctgccatcttcaatattagatacagagtaggtctggagagatggattcaagatatctgggtgattggcaggtttggctccaaagccttctatcattccacaattattgattaccttttgaattccatcatgtagaccttggtctctgtcactaagttcttttgccatatctcctccttccatgtccttttctaataggtcagttttctcaaaataattttcattggcgtttgtactttccttataccctgctcttagatcttttctagtttccacttcattaatttttaaggtcttatggtcttcctttcctatggtattaagaagttctaccactctgtttcctgtcctttcacatgctttctcttcaaattcctctgtaccttctagtgtcttgatatcaatagctccagtgtctaccttttgacacgcctccacacctgcccacagagaatcttccatcttctgtttctcttcctcttcatctgacttcttcatatcttcatgactttctttgaacaggccagctgtgtccatggctggcatgtctgagtcaagtgggtcatacagctgctccatctccacacaagcagcaatggcaactccagcctccggcgcaggctttgggggcagttgttcatttccacctggaaaggctggccccggggcatgctcactctcttcagctacagtgggccagtcagcagacgaaagcaggctggtggataatcttatgtcttgctctgtttcggagggacatgcagagtcttctccaaacccacctgaggtaacttcttggctgaccctgtctgtactagcgtcagggccccaagtaaatgcacctatatcattttgagatctttgaatttcttcggccaacccactgtctggagtttcctccatgatcaggttacacaaggaaagactttctgaagagtcagtctttaaagtatgcagaagagcaaaggaaaaaaaacaaaaacaaaagatgaaacagaacatggtaagatttgatgagaaacacaaagctcttcaggcgagtagcaccagtaaaaccaaactggaaagtgattacattcattggcttaaggtttaaatctatgactagcaatgccatggggaaacagttcattctagaaaatatactatgtatgtaatgcatatcaaataccaaaaaaatccagaatgatctggatatttacctaccggctgtaccaaatcagtgcttgtctgtatgggtaaagaaaatagtaacaataaggcgagagagaaaattcactaacacaataaaatcctatgctgtctagagtcaacattctgctgaaggctatagcttttactggtttaggaacaaattttacaacttgttttgtgataggaatgatttttgttccaaaattgtttaagaccaccatagaaaaggcacaaatgaaacacaaagaaagcctctttcactttctagcatcagcaaggatgttttatggctagtatatgacttctgctttagcagactctgaaatgctaagtttcaaacacataagcaagtttgagaacatcggaataagatcaagcactagaggtcaagaaattacacagtagcacacactttgacacagtatcagaagaaaatattccccaaactcatcctatacttggctctgtctttgagatgggtgtttagatggagaatggtctgatattaaccagtctgactgcctgcagagttctcttgatgtcattcccccaaattagcagccattttctccacataatgaaaaaatcttgcaaagttgagaagattaatagctgtgagcaactatgttcagaaagctgttgttttgcattttgatatcgctaccattcctagcaagtttgtcctctgaaacgttcaaaagctctttttagacgataccttcaccctctccataccctcccagcgagggaaggaaaatgtgttacagttccactaaagatataaaatattggaataacaaaaaatagcattgtctttttaatctccaaggaaattaacacagagttgaagttagaattcaaatgactcgaacatcaatccatgcatgcctttttgtgaatatatgagtaaaacttttcactagaaaagatataacttagtcattggtggtttcaatagacatttttaatctctcttcttgagcacttcccttgatgctccaaggatcttaaagagtgcagtatgagccctgcaactgcagaaggaagggacagacatctttttgttttgaagggagaaagaaagtggcaatgtcaattcagaagtggcattgcccatgaatagctagatctatcgaactttcctttttctgcctcacaataaaagaagaaaacatacaacttaagttgagttcttaagaccacatcaccagggcttttctaaaacaaagaccctgctccaagggatatgaggctgtagaggtgtgtgaccaatcacctaatttcacagcaccaatgagaccaccacaaagctctgtttgtgacactttcccaagtctaaattatggagtagttatccttacacatcagattagctgaaaaaacatcagtaataacatctaccttttattgatacacaccagacaccatgctacatactttacaattatcttatttaaacctcacacaaccttccgaggtaggcatcattacccttattttataaatgagaaaaaaatgatgcttagagagttttagaaattgctcaggctggccgcagtggctcacacctgtaatcccagcactttgggaggccgaggcgggcagatcacaaggtcagcagatcgagaccatcctggctaacacggtgaaaccccatctctactaaaaatacaaaaattagttgggcgcggtggcgggtgcctgtagtcccagctacttgggaggctgaggcaggagaagggtgtgaacccgggaggcggagcttgcagtgagccgagacagtgccattgcactccagcactcaatgaaacagcgagactccgtcttaaaaaaaaaaaaaaaaaaaagtaattgctcaaagtctcaaggttatgagtagtagagtttggactaaaatccagggctatctggctctaaaactcaagttcttattaacccaagcttcattgaatacaatcacttttttttaaaatggtaccatgtgccaagtagcccatctcttccattttctcattcacactttccttgtcttctatttaagtgtgtgtgtccttcactgcaacagctccttttgccaccaaccaccacagaaagaaacaaagggccaaactcttgaccattattcaaattattgaccattattcacccaggagtctggtccactgtactcttccttcaccatcatcttccggttctgataatgctcaagactttcagtggcctaatgatcattctaggggactatatcatcattaaatgtatgtgtcttctttctgttgcaaatgaaataaaatataacaaggtttccaaatttctggggatcaagatacatgaaaaaacagagttattagtggcttaccgtccataggtcccagggcaatgtctgaaagcaaataaacaaaaatactgttagttatacaaatctaaaacataaaaaaatgctgaggtgacaaaagttcttgaaatcataagcattttttaagcattttgtacagtactgttcaataaaactttttttggtgaaggaaatgatccatatctgtgcttatccagtatggtagccaccagtcacatgtggctattgagcacttgaaatgtgctagggtaacaaaaccacattttaaattttacataattgtattatacttaatataagcttaaatggcacttagctttggatagcacaggtctaatcaatctcaactttcactatgtgagtagaaaactatatttgaaacacaaatgaggttattttaatacacacacacacacacacacacacacacacacacacctcattaaaatgaagtaaacaaggtgtccaaattttagagcttgtcacatctttgaggaaatgcaggccctaatcactgctaatgctatttccttcccatctcattcaagaggatgtaggatgaccagcttaatggtaaatgagccccagaaaaatagttcttcaatatgttaaattagatgataacacactgctcaatgaattggtaatcatacaaattggcagagcaccccctaagacatgaatgaattacacttactactggtattttaattataaagcttatgaatcccggggagtgaggccagatggttcaaatggcttccactatgggtgaggggagcagggaagacttctctttcttatttcctttatgattgagaattgctgctaaagccacatccgattatgcccatgtctttgtgactagaatggatccacgtttatgcacttattttgaactactaaatgtcaacagcaaactagagagcctggcattgccaccttaaaaatatgatggttttcggttgagattgcagaggcctcatttgggctccgtattatagaaagcaggccctgtggttctgatacccacccacctggttgggtcccattctaaccgttctgcatggcctgccttgcatctccatgcagcctgcctggtctcttgcttagcattttctcgtaggatgactaagacaggagagaacagctccatggaaagccacagttttttgtacatggatctaatatatgttttctgattatctagatgattctcatttcattgcttcatagccacttaagaatcaaagatcatggccgggcgcggtggctcacgcctgtaatcccagcactttgggaggccgaggcgggcggatcacgaggtcaggagatcgagaccatcccggctaaaacggtgaaaccccgtctctactaaaaatacaaaaaattagccgggcgtagtggcgggcgcctgtagtcccagctacttgggaggctgaggcaggagaatggcatgaacccgggaggcggagcttgcagtgagccgagatcctgccactgcactccagcctgggcaacagagcgagactccgtctcaaaaaaaaaaaaaaaaaaaaaagaatcaaagatcataaaagctagtgcatgtctctgtataatgcacacatcaccagttattttctttaaaaggaaggcaggaaatatgaaatgtcatgtttatcagtcctcaggatcatgaaaggatgcgttagcgtgcacagatactgcagagatcacaagatgaggtgttctgctagcagcaagaacaccacttgaaaacatggggtcaggtgatgggtaaaggaggtcattttgagtgaagaggaaagaaaccaggcagacctaacagtgctatgctttttttgtcattcagtcaagacttttgttcttagcaaaagaggagaggtatgatcaaagctggactgcaggacaactatagtgtaatgactcagttatggccaccaggaggctagagggttttattacctggccctgaggaagagcacagggacacacacagcttgccgtcactgcggtgatatatgtccttcagaactaaaacttttgaagattaaaccaaggtcatttttgtttaattttgaagaatctcttagtcataaggccacacacagtttcatgatttatggattaatgtaatcatgaattaacataaaagaggtttctctcctgattcaaacttgtagacagaaatgctatgaaatctcacccactaatcattccagcatccactgcagaaactttgcatctgccacaaaagaaatgaagcatgggccgggcatggtggctcatgcctgtaatcccagcactttgggaggccgaggtgggcagatcacgcggtcaggagatcgagaccatcctggcaaacatggtgaaaccccacctctactaaaaatacaaaaaattagccagtcgtggtggcaggcgcctgtagtcccaactactcgggaggctgaggcaggagaatggcgtgaaccagggaggtgaagcttgcagtgagccaagatcgcaccactgcactccagcctgggcatcagagtaagactccatctcaaagaaaaaaaaaaaaaaagaagcatggagagtaaggcagaggaaatcctgtgaattctgcaggctgtctatataatgagaaatctctgagaaggaagtatattcaattatatgtacattcactttgtacttttcttggtcaccaaggtggaaccctcaaacttgttgacaatactttagcatttctcaaaatattgttttagagaacattccaatgaatattaagaaaagtgtagttaacatagatttctgtggtcaaacaaatttgggaaactctaagttaaacaaatataaacagtttttttaaattgcagaacttctcagcctttaatattctaatgcacatcatgaatcttctagaagagagttaatacaggaggcttcctggaactttcacctaagagacccttttgttttttgcaaagcatcttcaaggctagtgtttagactattaatttcttactttattaacaccttggacatttattgttcatattgcacaacaggaaagcctttagaagcccaatcacattctagaaaaaagcatggactagacataatccttatttattaaggttcatattgagccatttattccctagcagtttactgtgatataccaagaaggcttcaaggccagggaatcaagctaggtcttaattcctaggttgaatgttacaatattcttgtactaattcatttgaagcatactctagcaactttggatttgcctaaattcatatgtggggctccaaccatatgcaaagtacttatataaacagtttctgttttgtcaaattttgagttaacttccttctattagcacagacagttgtaaactaactatatttcagaggacctacccacaggtcattatggcacctaccaccagtatcctctgacagagaatgtaatgacagttactataagaaaggaagaaatatggagtgtgagggagtggtgagcaaaaaggcttggggaagcaaggcgactctccatcaaaccataaccatgatcacaggaggggagcttcttcaatggggaggatgaacacagcatcatcaagttcagaacgatcaacactgaaaacggcttctgctggcccgtgctttcatggtcattgcaaacacactttaacttgcaaagtatgaggaagggaagtagagaaaagagcaagaagagtaaacccaaaaccaaaagaaagagcttcatccagggaaaccataaaatgtatcctgtaaacctgaacagttctgagtgcaacgtgggcactggtaacaattactctgggggagaaaacaggaatgtatggttatgccagctctatgggtagagaaagctgatggcatgggagtcttagaataactgatatagataaggtcccctttctacccctctttcctattaggaaatatctgtcaaccaaaaataaaaatagatagtagtcatgaaaggtatagggatcattggttaccacactgagcttactgaggtttatgaaatatctccaaacatccaaaaagcacctgatacctgagacatgggtgagtgggtcactccagcagaacctgcaggtgtcacctcgggcttgaaaggatcaaagtccagatccagcaaagtctcctctttcttcacctcagggacttcattctgttaaagcaaacaacaaaacaaaataaaacatgtattagcttgaatctgataagaccatgatatagcccatgtatactctctctaatattattattgagtatctccaaaacacacttttataagcatggtggctcacccatatgcacccagtcactcagctaaatgcagtgagaaggaaataactaactctggccaagtataacctaagttgccctggaatgtgtcccaggctctagctcttgtcctttgtctagctccaagtccagtcaacagagagaatgttccaaggatgtatcctaatataccaagatgcaaggagtctcctctgtcagctcagagaacttggatcaagaaattacagatgacccaatcgataaaatgggccaagatctggactcattatagcaatactgctgatgttcttctgggaagctaaaattttaaaaggaaggtgccattgtgtactgctgaccacatcccaacggcctcattccctcactggtaccctaccccttgatttggttatcatttgatccagtcttcatccatagcattgttagtttcaattgtgtatgtgtatgagtgagggtgaacgggagggagagaggagagagacagccatgcctcccaacatttgctgcaaaatgagctcccattaataatatttttggattagaaagaaggtaagccaaataagacacaggacgaaagtcctgctttgataatacaaaaaaatctataatactaaacattatcatttgttcatttatttgtggtatcataatacatgaaaacaatgtgggcttgaagtcagcataacccaggctcaagttacacagtaaagggccaggctaagacaaagtcccataaagtacatcacagaaaagggagttggggtcagttttcatacaatttaaattacatgtgtttagcattcaatataaaattctttttaaaaaaactttgttgcctagaaattgaaacgtcaaaccaatgggtaaagtatacataaaaacagatttttggagacagatttttgaagaataggagttattctaattaatattcatcacagacattaaaaactgagaaatgtatgaaaagtgagggccagacacagtggctcatgcctgtaatcccagcactttgggaggccgaggtgggcagatcaggaggtgaagagattgagaccatcctggctaacatggtgaaaccctgtctctactaaaaatacaaaaaaaaaaaaaaaaaagaaaagaaaaattagttgggcatggtggtgcatgaccgtagtcccagctacttgggaggctgaggcaggagaatcgcttgaacctgggagacgaaggttgcagtgagctgagatcatgccactgcactccagcctgggtgatggaccaaggctccattcccccccaaaaataaaaaaaataaaaataaagaaaagcgaggtggtataacctaaatactttccttagcatatccgtactcattgcagaagaaagctgctaatatgtcatgctattagccttgcattttctattctgcagcacagtaactccccatatatactttttaaaaatttcacaaggataatgcccttctgagagctctactttctttactaattacaatcacaaaactatcaaccgattccctattcaaaatctgcataagctttgtttttccccaacttttatgtaggtaaaaattatatttttaaaatgtagtaaacatattatacttggagtatgataggcactgttcgaagaactttacacatatgaacattacctcatgttaacacactttggtgcaatctaatgttgacaacactttattgcctttaaagcatttatcttgccatgttctccagactgcattgtacctgccttttcaaatataatccttacaaaaaattgagggagagatggcagcaattctccatttgggagaatgaagagaattggctgaatggtgatctattgtcatggcccccagctgccatgtagcagaggtaagactgtagttggtacctctgactccaatgcctgccaggctgtcaactgatgccccagacccaagtttcttaattaggaaccccaaaaatctgcagaggaattctcaaagttctgcaagttctccataaaattttaggtcatgggaatatattcattatttccttttaagcataatgaatccccttaaggaagctcaaatgggaatttagagatgaaggatgaaatgaggcatcagactataatgggctatgctcagactttgattgagatcaatctgtggttataccccaattttaccacttgctagctgtctctccctggccaattaattgagcttctttgagcctcggtttcttcatgaataaaatgggattaataagacctaataggattaccatgagtagtaaagatgataaatgcacatgtacgtaatgtctaggaaatactcaaaatggaaatggaagctaatgttattaattaccattagcaacaatgcatacatgtgattatagtttggctctgtgtccccactcaaatatcattcagattgtaatccccatgtttggtcaagggaggaacctggtgagaggtgactggatcatgggggtagtttccccaatgctgttctcacaatagtgaatgagttctcatgagagttgatggttttaaagtgtggcacttcccccctgctgtctctctcctgccaccatttaagatgtgccttgcttccccataaccttctgccatgattgaaagtttccagaggcctccctagtcatgtggaactgtgagtcaatgaaacctttttttctttataaatgactcagtctcaggcaattctttatagcagtgtgaaaatggactaatacaacatgtgaatatgtaaaattactgtcatcaaatatccataatgccaattggactgccttcaaaatatgtggctggttttttcaggctcaacttctacttagctttgccctcttaatcttgagaattatcccttaaggtactcatgtcaaagaatattctggtaaagctacaaacatagcaaaaggattttgccagcttatatagtattcctttttaaaagggcaggaacgtactcacaactctgtcaccacatgttgaaacacagaaaagtgtaattttccttaacaagacaaatgaatcctgtacaccttcatcacaattagagtacacatggtatggtctcaacattcttagctttttgggaacttgattgtaagtactgctttaccatcagaaatctacaaggggtgacttggaatgtgctcctaagaaaggagaccagctgtggaaaccacagtgggagaaaatcttccaataggaaaacattgccaattataatcatctgtactatgtttcatgaggtgtcttctacttgggacatctaagtttatcagtaaagtaccggacctcttccagtgcagatgtgcaatttgagcataatcggcatgcctagccttgccacggcttcgtgatagatggattttacttccccatcccttacgtggggttgaccatatgtcatgctttagctaatggatattagttaatgtaatgcaaacaaaggctggaaatgtgcttgcatgtttggttggttggtttgtattccgccattcaccgtgaaaagtagagccttgcatagctgctagtccaaaaagaatgagagacacatgaagcacatgtggaccaatcataatctaattttctaatcagtgttaaagataaattcataaaaagaaccagagaaaagaagacatttcactaacagaggaacaacatgaaggtagcagtagatttctcaccagaaataatgaagcaaaaagacagtgaggcaaagtactgagaaaaagaaactgccaacttataattatatgccccttgaaaatactttctaaaataaaaattcaatgaagattttcagacaaacaaaatcagaaagaatacatcaccctcatatacacactacaactaatgtggaagatatctttcaggcaagggaaaaatgataacagaactatgcatctacacaaaggaggagaaccagaaatagtaactgcctaggtaactatatgtgagtttttattatttaaatcttttaaaaagataattggctgcttatacaaaaataataacaaaataatgtgaagtttaaaacgtagataaactaaaatcaatgacaaaaattgcataaaaaacagaagtggagaaatgtgagtatattatcattagatttttatactgtaccttaaatgacatcatataattgaaagttagactgtgataaattaaaatgtacactaaaaccctaaagtaacaactaaaatgacaaaacaatgttatagctaataagtaaataaagaaaattaaagagaataaaaaatgttcaattaatacaaaagaaagcagaaatggaagggttaaatgaacagagagacaatggaaaacaagtgatcaatgtgctagatttaaacttcaccatatgaataataaccttaaatgaaaatagtctaaatcatgcaattaaaaggcagagattatctaattgtacaaaaaagcaagacccaactagatactgtctataagaaactaacttgaagtatgtagacacaaataggttcaaagtaaaaggatataaaggatgcaccatgccaatctaacaaaaagaaagctgtagtaattacattaacaataaaaaaagtagatctcaaatcaaagaatattgtcatggataaagaggatcattgcctaaacatttatgcactcaattagagagcttcaacataaagcaaaaaccaagaaagctgtaaagaaaaataaaaaagcacacacacttttataggaaagacttcaatattcctcattcaataattgaaagaacaaatggagagaaaataagcaatggtataaaagatttagataacactgtgactaaatttgacctaatttacacttataacattctatccaacaacagcagaatatatattcttttcaagtgcacatggaaatgtaacatgataagcagtattctgggtcatcaaataggtctcaactaattcttttttaaaggtcctatctgagattttatttccaaaaacaaacaaacaaatgaacaaataaacacaatggaacctctttcttgcacagacaccagagacaatgctaaagttcccagtataactctattataaagacacatgcatttgtgcgtttgtcgcagcaatattcacaacagcaaagacatggaatcaacataactacctatcaatgaaggcctggataaagaaaatgatatatatgacagatatatcatatatatatcatatatatgatatatatcatatatctgtcatatatatcatatatatatcatatatatcatatatcatatatatcatatatcatatatatcatatatatcatatatatcatatatatatcatatacatacacacacacacacgccatggaatactatgcagccataaaaagaatgagatcatgttctttgcaaggacatggatggaactggaggccattgtccttagcaaactaacacaggaacagcaaaccaaataccacatgttctcacaagtgagagctaaaggttgagaacacatggacacataaagggaaacaacacacactggggcctattggaagtggaaggtaggagaagggagaggatcagaaaaaatagctaatgggtactaggcttaatacttgggtgaggaagtgatctgtacaacaaacgcccatgacacaagtttatcttatgcaacaaacctacacttgtacccctgaacttaaaagtttaataaaaacttgccctgttaaagagtacagcatgaaggtggctgccatatgcttactcagtccactcttgtcctagtggcttcatcaagtgagatacagccttcctcctctccctggtagtctatcctttgttttaagaccccatgtgtcccagctggaaaaaactgtcactgaatcacttctgccttcaactaatttaaaaacattcaagccacataaagtatggtctctgactacactggaattaaattggaaattgttaacagaatggtctctagaaaatccacaaatattttaatcatccaaaatgatctctgcaaaatccacaaataatactcttctaaataattcaatgagtcaaaaaagaaatcaaagtggaaattggaaacctgaatggaaatgaaaacaatatatcaaaatgtatgggatgctgctaaagcagtacttacggaaaatttatagcactaaactcccatataagaaaacaaaaaggtccgaaattattaacctcaccttctttttaccctgaatataaaaaaaaaacataaacagagcaataaaacccaaagtagaaactggaaattatacagattagagtggaaatcagtgaaacagaaaacaaaagacagagtgagaacaagaaaaagagagaatcaataagaccacaggctagttatttgagacgatcaataaaattaatcaacatttagccagtctaattggagtaaaaagagagagtgaacaaggatgcagattaccaatattaggaatgagagagggaaacatcatcatagatattagagatatcaaaaaataatagtaaatatgatgaaccactgtactccaaatacatttggcaatttagatgaaatggacagatttcatgagaaacacaaactacaaatacaaaaatctcactcaagaaaaatagataccctgaactgctctatatctattatatagaaatatatcaaaacaaaagaaaacacaacaaaacagagcccagatgagttctccgatgaattctatcaaacctttaagcaacaaataataccaacacaaacttaaccagcaattgattttcagttcaattcattcaataccattaccctagtattaaatcataaaaacccttttcttaaaaaaaacctataaattaatattccccatgaacaggaatgtaaaaattctagaccgagctttagcaagctgactaaaagatacacagataaaaaggataacatatcatcaccaaatggggttcatcctaggacttcatggatggtttaccattggaaaaccaataagtataattcaccatattaacaaactataaagaaaactcatatgatcatcttaacagatgcagcagagcatttgagaaaatccacattaattcctgtttaaaactctttaagtaggaataaaaggctacttcctcaatctgataaaagccatctaataaaacctacaagtaacaaacaccatgtttaaaagtgaaatactacatgctcttcctctaagatcaagacaagggtgactgctttactacttttactcaatattattctggtggtacaagaatgaaataaggtaggaaaaataaataaaaggcaccgagattgcaaagagagaagtaaactttctttattcataaaagatatgataatatatatagaaaaatccaataaaatctacaaaaaagctatagaaactaataattcagtttagcaaagctgcagacacagcatcaatatacaaaaaccagttgtacttatagacaatagtgtgaacaaccagaaaaaacaaatttaaaaacatgatttataataacaatataaaatacttatggataaatccaacaaaagatgtataatgtctgtacattgcaaactgtaaaacatggcagagagaaattagagaagaccattaataaagggagagatatactgcgtctatgcgtcagatgactcacatatcattgatctatagactcggtgcaacatgattcaatatctgtactgctttgaatagtattttcccccaccccccaaatttcatgcctatctggaacctgtaagtgtgtccttaactgacaacagggtctgaaccaatgtaataaaataaagattttgattagagtgggtcctaatccaatgactggtggccctgtaagaagaggaaaatttggatatgtagacgcaaggagaatgccatgtgaagacacagagcccacagacacacagggaaaatgccatgtgatgaccaaggtgcatattggagtactggagtgatgtatctgcaagccaaggaaccccaaggactttcagcaaccaccagaggctaggagagaagaaaggattgattctcccctagagccttcagagagagcatgtccctactgacaccttgatctcagacatctagcagccaaaactgttagagaatttttttgtggggggttttgtatttaagccactcagttgtggtacagcagcccaggaaataatacaatatcaacttacagttgattctgaagttcatatggaaattcaaaggacctagaatagccaaaacaactctgaaaaagaacaaagttgaaagactaaccctactgaccctgatttcaagatatcataaaatgacaataatcaatatagcatgctactggcacaaaggtaagctaaaagatcaatggataatcacatggtccagaaatatatccatatatatacatatatatatatatatatatacacacacacacacggtatatacatatatatacatatatagatggtatatacatatatatatacacatatatacatggtatatacatatatattagatagatagataattggttgtctgattttccacaaaggtacaactaattttccacaaaggtacaaaggcaatttagtagagtaagaatacttttcaacaatggaatattcatttctaaagaaatgaattccaacacacactttgtaccacataaaaaaattaactccaaattggtcacaggcctaaatgtaacacctgaaaataaaacttctaaaaaatattaagagaaaaccttgcgatttttatcttgggttaggcaaagaccttttagatgttacatgaaatatataatccagaaaaaaatggataaattggatttcatcaaataaaacatttctactctccaaattacactgccaagagaatgaaaagaaagccacatgctgggagacagtatttgcaaatcttatctaatgagggagttgtatacagaatggataaagaggtcccaaaactcagttaaaaaataaatacacgagaaaaagtttttaacaggcacttcaccaaagaagatatatgggtgttaaataagtacatgaaaaaatacttaacaccactagtcatttgggaaatgcaaattaaatcaaaatgaaataccactatcacttactagaatagctaaaattaaaaacactaaccgatacggtttggatttgtgtccccactcaaatctcatgtcaacttgttatcccagtgttagaggtagggtctggtgggagatgactggatcatgggggcggagttttcatgaatggtttagcaccatcctcccttggtactgtatagtgagtgagtgtcaagagatctggttgtttaaaagtgtgttacacctccctcctctctctcttcctcctgctcctgccatgttagacacctgctcttgctttgcctttgccatgaataaaagctcgctgaggcctccccagaagcaaatgctgccatgcttcctgtaaagcttgcagaaccataagccaattaaatctcttctctttataaattacccagtctcaggtatttctttatagccatgtgagaatggcctaatacattaaccatgccaactgttggcaaagatgtggaagaactagaactcttatgcgatgctgatgaaaatagaaaatggtacaaacacttcagaaaatctgtcaattttttaaaaaattaaatttattcctaacatatgatctagctagtttatccctaggtattcgcccaagagaaatgaaagcatgcatgcacacaaatatttgtatacaagtgcttatagtgcctttgtttataatagtcaaaaattggaaacaactcaaacatccatcagataacttgtgatatatccatacaatggaatactactcaataaggaggaatgatatgtgctacaacattaatgaatttcgtaatccaaaaactatgctttctgatactatatgattccatttatataaaattctagaaaatgcaaactaatgtatagcaacagaaagatgagtgtttgcctagagatgctggcgccaatggggaggagcaagagaaattaaaaagtggctcagaaaacttctaaacttcttggggtgacatatattcattatcttgattctggtaatggtttaatagtatatacatatgtgcaaactcatcaaatatgtgcatatgtaaacatgtacagtttattgtagatcaatcacacatcaatagagcttactaataacattaaaaaaaatctaatagtgggagatgggttaaacctaccatagcacattctcttaacacagtgctctgctgctatttaaaataataaaataaatactaaattgacatggaaatacttttgttatatttgtactaaaaatcataaattaaaaacctgacatagaatgatcacatttccaaaaatatacattttggttactattttttttttttgtttgtttgagacggagtttcactcttgttgcccaggttggagtgcaatggcacaatcttggctcactgcaacctccgcctcctgggttcaagcgattctcctgcctccgcctctcaagtagctgggattacaggcatgtgccaccatgcccagtcaattttgtatttttagtagagacagaatttctccatgttagccaggttggtcttgaactcccaatctcaggtgatccgctcaccttggcctcccaaagtgctgggagtacaggcatgagctaccacgcccggccacatttcagttactatttaaatggaaaaaagtggcattttacacacaaaattagtaaaagtgagttttgctggggaatagacttttacttttgaagttttactttttgcttctctgtaatttactatttttttacattaactatgcatccttttgggcatcatttttataagcatatcaggtaaaagagatttcaatatataactatagccataaaacatttagtagtgatgcatctgtaggtagtttgcaagtatttgattgacccagaaatctagcctccagagcacacacacaacacattttctgaggatcttaacctttagaatttgaataaaatgtataaaatctgtaaacacctcaaaaaaaccacttagaagtaaaacatatagtctccaaatcatcctcatggctgcatgcaaacagacagataaacacacacacacacacacacacacacacccatacacaaaatttctttaatcataacacagtattatagtaagccagattaccatgagggcatagagattttcatcttttcttcttctagagattttcatcttttattctttcattaaacatattttgaaaacctttactatatcctaagtattgtgctggacacttgtgacttcccaatgaggcaaaagaggtagagtaggaagcttaagacagagaggttaaataaaatctttaggaacaaggccaatcagaagttatcttttatgtaatagaaatacctttcatgtaaaagtcacaatttacaatttctaacagtgagtaaagttttagcatttcatcaacaattacaatgaagcagtggcctaggaaagtttaccttcgtggttagaagcttataacaagattgctccagatgggtacattacagttaatgtgagtcatatagcacatggacagggttcaagtgctttatattgcagtcttagaatggaaaatcgttcagtcatttaaaatgatgttgccaagtatttgttccacaaagtttattgtagtatactagtccttccttatttggaggagttatgttccaagatccccaggggatgcctgaaaccacaaatggtacagatagtactgaaccctatacacactatgttttttcctatacatacatacctatgataaagttgaagttatcaattaggcatagtaagagattgatgacaacagctaacagtaaaatagaacaatgataacaatatactgtaataaaggtgaatgtagtgtgaatgtgaatatagtctctcgctcgcttgctctctccaaatatcttactgttatgtagtatttttggatcatggttgaccatgggtaactgaaaccatggaaagtgaaactgtggataaggggagactgctgaacagagaattaaaaggatagtataatgcagatccctttactcacaatctagacctatcgattgttctctcacatttgctttatgtgcatacctatatttacataatcctgaaatgctctaggaatgagttgacacacaataaactagaccttctaggaaattgttttcctactttgttttgttttgactttgttttttattagaacaagttggtaggctgcaaaatcattcctagtgtagcacgtgggttttgttcattgcttttacatatattatgactaattgtataaaggctgacagtcatgagaatagagtcagcaaggaagagggatagggcctatgcttataatgaggttctactctgactagtggaaagacagatgactaaactggttgagtaaaggccctcctaccactatatcatggtatttaccaataatgcactgatatgtaacaacctgaagaactttgctaatatcaacactcaaacgagttctagagaacctgcatcctggatactaaggatagaaagagtgatatcgatttgttcatttactgaatgcccggtactgctctctttcgggtgcttacaatgctgtcacacatagcctacagcattctgctttccacttctgcactaggagaggcaaggttcagcagaaagacggcaggtttgctcttctagaaagtaggactaatgacatgtaaatcacaggattgatgtcaaggttaaactgaatgagaccttgcagaaagatatttagtagctttccctgttctgtagacagaaaaagcctaggcactgttagcagctctggagtcagaaccttgaaagatagtgaagcctaatgacccaatgattttaaaacattttcagaataccagatgatacataaactgcactgcttggttactcctgctcaaggaatggaacaatgatgttggtaatccaccagggcaatgaactgactaaatttgggcttgaaatgcactgtgtggtttttcttccttctaattttcatcttactaattctttctgtcttaaaataatgttaacatgtttactttgaaaaatagcaagagaaagaagaggcagctggtccagaaatatgttatgttgaaaagccagtgtggtatttagaaccaggttacagatacccagtaagtgagagatgcatatgttcataactgcaggctggcctctcaggattacatgggtgaaaaaaccatttcatggactgattctgcaagttgaattctatttcagttcaattggctagggaaaacagcatgatttaatgaacttaacaagtaagatgcagtattaggctggaaaacagagacataagggtagaaaagccaatggtgctcaattggtcccaacactcaggattgaaaggctgtgctcatgtctgcatgggagcatggtaggcattcctatggcgtgataagcagggcttggagaaataagcttggatgttcaagggataattcctctggatttgtaaaggggaaatctttgatcagagaaaatatgcaatatcatagttggagaaagatttaggaaaaatagttgggggtatctgctatgaaaaaatcctgagacaggcaatattttcttcctctctgccactggacacaaagatagactctggcaaagagggaccctgccccaagccctgaatctaaggggaccgtcatgcttttgagcacctttcttacagtttcctaagtcttcctctggcagaagggaccagctgcagctgcagtgccatctggtcagggcatcctgagagcctgtaccaggactgggctttggttgccatatctccccttcggagcactccccaacactactccatgtgtacggtcgattatatgcttctggaactctagggctcctatccacaaaggtgttgtgagcatgaagatggggcctgtttccaggagggtgagtggtaagatggtgagactgttctttttggtcagcttggcatttcacttatggaaacccctgagactggccatcagaatgttgctgataagcttatttcaagtgactccaactttttatatggaagaggtccccagcaaaaaatatttgctcagggccataatcctaaagggagggtgaacattggatttaaaatccagtcatcaagttagaagaaaagccaatccaaaacactttcttttttttttttttgagacagggtctcgctcttgtcacctaggctggaatgcagtactgtgatcatagctcactgtaacctcgacctcctgggctcaagagatccacctgcctctcagccttctgagcagctgggactacagacacatactgccatgcccagctatttttttttttttttgtagagacagggtctcactgtgttgcctagactggtcccaaacacctggcctcaagcaatcctcctgctttggcctcccaaagtgttgagattacagatgtgagtcaccatgtctggccccaaaacattttctgaggacaagaattgaaaaagagagagaaataaccttgcacatacacacatatttatgtgtgcatatacatgtatatatacacatgcacacatatatacgtgtgtatatacacatatatacacatgtatatatacatatatacgttatatacacgtatatatatgtgtatatacacatgtatatatacatatacgtgtgtatatacacacatacatgattgctttattttttgtcttgatctcttgttagaatcatatttatatggaatagatttgatttccagggacaaaatatcttttaaatctttatttcttaaagtgttttaccaaacacccatttcctaggaaagcatattttgggggtgaaggagagactgagaaattcttccctaaacaaagttgaatggaactttgttacagaacttttcagagccttaaacatgccgatgtaaactgtgaaaaatcaaaagggatgtagcccctcagtctcatgtaaacagagactcccttttcaaagcatctaatgatactagttttcctcataaacatgctttggaaaatgctgttttaaaagaataatgtagggacacaaacacacaaagaggaagggaaagaaaaagagagagaatggatttctaagttcttaggatggaaaaatagggaacaattttttggacctttggaagatctgtttttgtaaacacaaaaccagaaaagcaagtaaaccattgggtcataaccacggggcatctccctacaagcagataagaacatttaccagaaaaaattctatgctacatttaaagtttgggccattagagggctctccagatctaatggatttctgtcttcaatcccaggacacactcaggagagaatcatcaccgtgatggtgcttggtggaggagacaaacaaatccatctgagactgggtacatttcagtcattacattttgagcttctgggcaggaataacacaaatgcttttcttcccccattaagtgcatgataaaaatagcaagctggggacatagatcaatcttctaaatgtaaatgactcatttaaaaaaattaaaataaatgtagacggatcatcctatattgctatatgtgtcagagaaaaccttttcaggtacatcaaagctgtctagttttcaatgctgtacttccttgcagttagcatctcatttttcccaggtattgttatttattctcttttatctatttatctgtagattatcaaatacattattgtctggatgatacagttcattcacttataatacgtagctcgacctataatctgatcaacacatctaaggttataagcactcatgtgtatgtgtatgtgtccaactaccctaaatatggaagactttgagtcacactagttttgaagggagcagttatgaatggtcagtcatagcacacacttgactcagctgggtatttctctggaataaatctattaattcactgtggtgctttgttaatggtcactgattagtgccatgtggaatcctgataactttaaacagtggctcccacagtgtggtgccaacaccagcagcattagcagcattttcctcagaaatgcagattcctgacctcatcccagacctgccaaatcagaaactgctggatgggctgaagtaacataaaatggctatttatagctacagaggaacaagccactgaagaaactgccaagatgcttcagggagagacagcatctgtatatttttaattaaagccagattatgtcactcaataaaccagaaagcagacagaaatataaatccctgtttcactcccgcttttgacatcttgacatgagacaaatggtcatttaatccatggaaacactccaagtcatactctgtggtccagctgctagagccatgtcgcttttcagatttagaaaaatggcagaaacccctttctgactcctccccagattagaagaaaacaatataaataaggctgtgcccccgaaaatgcactcctataatgtctctggtgcttagttcttccaaaattgcctggaagactgaaggatgtgacacacagccagtgagatataagaggtattgatggagagacactgaaagctcccacattcctttcccagcagccttggggttatgcataaagcactagcaaagcctaggcaagcagacccgggaatagtgtcctcacaggagctgcagctggaacatgcttctgtttggaaaggcacttcctctgccccagttcttaacttttcccatcactctcactcaacagtaccagcaaaagcgaatgctcttttaagtacttaggggactctcctggcatctgtaattttcaaaagtgctttgatcctttttccccccaccatcaagtgtccttacctatgagccagcaaattacaaatacaaagaaaaaacatttaaaaagaaagaacacttctgaacctcatctttacttcacaatgagtctgcatgtcatgttgtctctacttcagttgccttgtctaccaaatggggatgtcctcagctaagcacacaaggcttctaggtgaccaaagtctctatttgtgatggaactgagaggatgctcttggagggtccaggtcaaagcaactgagtaagggtattgttgccttaaaacactcccagttcgaaaattcatgtagcgaacaaagagaatgaagctgggcagtagcaaatgcaaagggactgtacaactttggaaattagaattgctcaagtttgtcccaggacaactgggagatgctgggtaagatcctttggcactaagacagctatccctggcggcatctcggtatccacagacatacaatctggccatgcaccgataaacaccattctcaaaggagctgctaaatcacatctcaagccccagttaattttatcaaactcagcatcttatgcatacaacagaagaaagaaaacaatagctcaaagcattttgcctattgataagtgtgcttgaaaagaatgaaaaatcatgatttgccactgcattgtgtctgagtttttattttctgaggtccctattattatcaatacaccatctctgctattattaatatgatgtgattataatcggcatattacgcatagtgtagtgattgatgtactcagtaattatagtactgcattagcacctcttgtaaaatgtaaatattattccagaccctgagaacactgagaagaaatagtatcaccatgacttctgtatggtcttttacttgtagaaaaaagagatagtttcagtgacactagaggcagctctggaagtcatgataattcttgagtcaattaaaaaaaaaaacacaaaaaacagccactagcaggaacaggcctgcaagtagctgcggtgggatatgtgaacccaggtatattcaaaatcagtaggaacactgactttcatttgccaattcatgtaaataatatgcccctgttgaaggacaaaagacttaaaattattcacctctttcaatttcatttcctatctctactaagaatcaatagaagacataaacatgaaataatatataaagagatgtttatcgaagtgctggtgaagcaacaaaaaagttggaagcaacttgtggccaataatcaggggttggtacaaccaactgagagaatactatgggcaaatatgtttttgcaaacacaatattatgacatgaaaatatgctcaataaaattaagtagaaaggtcagaaatacatgatagtacagtctcaattttatagtgcaaaattgatatatactcagtgatttgggaagactaaaagaagacagaccaaagggcactagtggtcatgtcagagtggtatgatttaagtgattattaaaattcttttttttttttcctgagatggagttttgctctcgttgcccaggctggagtgcaacggcacaatcttggttcaccgcaacctccgcctcccacctcctcctgcctcagccttccgagtagctgggattacaggcatgcaccaccatgcccggctaatttttgtatttttagtagcgacagggtttccccttgttggtcagacttgtctcgaactcctgacttcaggtgatctgcccgccttggcctcccaaaatgctgggattacaggtgtgagccactgcgcccagcctacaattctttattctgggagattctcaagatggccgactaaagaaaactagtacatgcttcttccacagagcggaagcaaaatagcaagtagatgttcacactgtgaatagatcacctaagagagaacactgggattcaacagagaagtgatgggaagcactgaaagcaagcaaggagagggcagcaaggctttcctcagctgggatccaggagaagctcccagatgtgaggaaaagataagtgagaattcccaggactccacatacccaccaccatctttttacaaccctagctatgggagaacccctcaactgatatgggcttcaagatttacatgggtagctgcctagggaccacacagagacattgttccagagagagaactcacaaggagccccataggcaaccatgtcctgagtggctgcagcttgtaggcattctgagctaagcccccaaaaggactgcattctgctctggggcagatactgccactgtcatggccaggccaagaagggagaggagaggcctcgcactttcatgtactgctaggagaaatcctatgcacctctgagggctgctgtggaaccaagaaatgagaaaactgcactccccacagacccacagctacctgcctatactacaccaccttagaggggcccccaccttccccagttgcagtgggtgccattctgaaagcctagcttccaaaggtctgcatccctccctggggccaaggctgatgctactgctgctaccaccaggccaaagagggagaggggaagccaggcacttgcagacactttgtggacaaatcccactgctgctgctgcaggttgcagcgggaccaaggcacaaggaaactacgtgtcccacagctacctccctacactgctcccaccatgagaggctttgacctccctaatagcaggtccgcagggcagtgtggtgcctcctacacctgaacattttgtcagcaggctggaaaccaccctacccagcatgtcacaaccagtgtcaatgtagcttgacctcaggacaagctattggatcaatcttgtcaccccagtgcttcagcatgctgttcaggggcctggaaatctcccagcccagtctaccactgttggcacctgaatattcctcctgggtctgagattgggccagcccaacctgccaaagctaccacaggtggcacccaccagaatgcaccagcagcaggccaagggactggcacaccccacctgtcatagctatcaccaacaccagagtggaccacttgggttcccgtgggttactccaccaccgctactgacatcacccacatcacagcagctgcccagagatttgagaacctgaccacacactcaacctactgctgccactaccaatatctgagcaagccacctggagcccaagaatcagcctgtctggactcactaacactggagctagtgtaacccacattggagccaagcacaagcaatgctcagtctaccactgcctccactggggcccaaagactggtcaacctggcatccttgtcctcagcaaaactttaccctggccccctgctagcaaatgcaccctaagtcattgaggaaatcacaagtacaactgacactatttacagccaaataaattatacaaagatcacactactacatgtggccaaaatcaaagccaaaatgtccgacccaaccaacaacatatatacatcttcagagaaaagccctcccctacaaaaaccaatttcaaagaattggaagaagcaaccagattggaaattggaagttataccagatgcacagatatcaacacaatgaaacagaatcataaaacagcaaggaaatatgacacttccaaagaaacaagataaagaattcaaaatattgcttttaaagaagctcagtgagatacaagaaaattttgaaaaacaaagaaatcagaaaaacattttaggatatgaatgaaaaatttaccaaagagatattttttaaaagaaacaaatagaaattctggaactgaagaatttgttgactgaaatacaaaacacatttggaagtttcaaccagaggctagatcaaacagatgaaagcatctcagaactttaagacaggtctttgaaataacccagtgagacaaaaataaataaaaaagaatggacaaagccttcctgatatttgggacaatataatgcaatgaaatatttgaattattcgtgtccttgagggccaagagagaacaaatgggctagaaaatctatttaatgaagtattaggttgaaaacatcccaagtctagcaagagacctagccatccagatataagaagcccaaatatccttaaacagatacaatgcaaaaaggtcttctcaatgctatattacagtcagactatgtactaaggcaaaaataaaagacagaatcctaagaacagcaagagaaaagcatctgtttatttagtcagtttatcttttaatttaatctgttttctttcaaggctattactaatatgtgaagttttgtgactgtcataatgttaattgttttctggtcattttgtatgtgtgtgtgtatatatgtcacatatatatgtcatacaatgacatatatgtcaccatggtttggtagtatactgcagtagtaccacttgagtcattcctcttcctcatttgtgtgtttggtctcacaaaaagattgcggagggatggagggaggtgggcaaaggtaaaatactacctactagggactatgttcactatctgggtgatgagatcattagaagctcaaacctcagcatcacgcaatatctccatgttacaaaactccacatgtatcccctgaatctataataaaataaaaataaagaagtctcccaacaaacagaagcctagaattagttgaattcacagcccaaccctatcaataccagtcctcctgaaactattccaaaaaactgaagaggaaagaactctccctaactcattctacaaggccagcactatcttaataccaaaaccaaacaaaaacaccaacaacaaaaagaaaactataagcaaatattcatgataaacataaatgcaaaaatccttaacaaaatactagcaaaccaaatccaacagcacatcaaacagatgacacaccacgaccaagtgggatttatatcagggatctaaggatagtttaacttatgcaaaacaataaacctaatatatcacatcaacagaattaagcacaaatctacatgattatctcaatagattgagaaaaagcatttgataaaattcaacactgcttcatgatgaaaactctcaaccaactaggaaatagaaggaactgacctcaaaataacaaaggccatatatgacaaaagcacaggtagcatcatagtgaatgggagaaaagctgaaagcctttcttctatgaacaagataaggaacaagataaggatgcccactttcacctctcccattcaatatagcactggaagtcctagccagagcaatcaggcaagataaagaaataaaaggcattcaaattggataagaagaagccaaattgttcctctttgctgatagtatgaccttatagctagaaaaaatgaaagaatccacccaaaaaaaacctcctaaatttgataaataagttcagtaaagttgcaggatatgtaaaaaaaatcaacatacaaaaatcggtagcatttctgtacaccaataaagagccagaagggaaagaaatcaatatggcaataccatttacaacagctacaacaaaataaaatacctaggaagaaatttagccaaggaagtgaaagatctgtatgaggaaaactacaaaatactgatgaaagaaaattaaaaggacaaggatcagaaaaattaatattgtaaaaataaccataatgcccaaagcaatctacagatacaatgcaacgcctaccaaaataccaacaacattttcagcagaattagaaaaaatcataaaatttgtatgaaaccaaaaaaagagccaaaatagccaaagcaattctgagctacaagaacaaagctggaggcatcacattacctgacttctaaacatattacaagtctatagtaaccaaaacagcatgacattggtataaaaatagacacgtagaccaatggaacaaaatacaaagcccagtaataaatccacattttgacagccaactcattttcagtaaaggtatcaagaacatatactggggaaaggacaccttcaataaatagtgctgggaaaattggatatctatatgcagaaaaataaaactggatccctgtctctcctgatatataaaaatcaacttaagatgaattaaaggcttagacataagacccaaaactataaaacaactagaaaaggacatagggaaacacctcaagacatcagtttaaggaaaattgcatgggtaagacctcaaaagcacagataactataataataatagaaaaaatgaggctatattaaactaaatggcatctgcacacaaaggaaacaataaatagggtgaaaagacaacctgttgaatgggagaaaatatttacagacagacattcaacaagggaataatattcagaatgtacaaggaactcaactcaataattaaaaaaacaaataatcccatgaaaaagtgggctaaggacataaatagacatttctcaaaagaaaacatacaaatggccaacagatatataaaaacatgcttagcatcactaagtatcagagaaatccaaatcaaaaccaaattgagatgtcatcgtaccccagttagaatggctattattaaaagaacaaaacataatagatgctggcaaggatatggagaaaaaggaactcttatacagtgttggtgggaatagaattggtgcaactagtacagaaaacagtagggagattcctcaaaaaaactaaaaatagaactaccataagatccagcaatcccattattgggtacttatccaaaagaaaagaaatgtgtatatcaaaggaatacctgcacttgcatggttatcacagcactattgataacagtaaagatagagaatcaacctaagtgtccattgatgggcaaatggatatagaaaatgtggtatagacacacaatggtatagacacacacacactactgaatcaaaaaagaatgaaataatgttgtttgcaataacatggatggagctggaggtcattatgttaagtgaaataagccaggcacagaaaagacagatgccacaaattaataatatatgggagcttagaaacaatcgatctcatggagatagaggatagaataatagataccagaggctgagaaggatgtgtgggtggaaggaggagataaagagaggttggttagtggatgcaaacatacagttagattgaacaaataagccccaatattcaatagcagattagggtgactgtagtcagcaacactgtattaggtatttcaaagtagctagaagagacgacttgaaatgttaccaatgcatagaaatgataaatgctcaaggtgatagataccccaaataccctaactcgatcattccacatcctatgcatataacaaatacatgtgtcccataaatatgtaaaatatttggtatcaataaaacaatttttaaaaataagataaattattcattttacacttttcaatatttttccaattttctataagtatatactacccttaattaaaaaaaagataattttcaaataccgtacatctcccatgtaagaatgcttcagactaaccaagtaattaaaacaagcctgaatgacaattaaaattatgttgttggttctggaaccgccactttctttagggctagcccctgagagtccttccaccatgggactttcatggacataccagccctgaaccaggcacttacctgggaaggtgttgtcacactgatttctggaacaaagttgtcctcaaagaaactgatgatgttctcctgctgcagttcctttgtcggggtgactttaggtagaggtgggacaggaggccctttccttgtctaggaagcattaaatacaaacattaatccagccaaagacaatgtgtcagacacgaagaaaggtcacatgaacagagctacatggacagattgagctctgattgaaacttgtatctgcatatagcagcaagcctatctgatacaggtaaagaatgctgtctacttgtgaggctctctgagccctgataagccatggttcaaggcaaaaacaaaactgaggctataagagtccattcatctcaactcaagtacaatacacagagctgtagggccaggcacatatactttaaaggttaaactagggcaataccctcttctgaactaaactgaaaataatttctcattttggaaataaattaaaatttcaaaactaaagcagcttttcatttgaattggtgagacctactataggcagcttacatttcactttccattcaaggattttgaaaagtagaaaactttaaaggtctgtttaatgcatgtatcttcccaagactttccttagttcaactacatatagatggtcctcaacttatgatggttcaatctatgatttttttggactttaggaaagtgtaaaagcaataggcattcagcagaatgtgtgaaaacactctctcatgaggcggggcagtggcagtgaaccacacttcccagttagccctgtgatcacgagggtaaatgactgctattatgttctacagtgtactatagtcagtaaattacacaagatattcaacacggttataaaataggctttgtgttacataactttgtctaactgtaggctaatgttaagcgttctcggcgcgtttaaggtaggctgggctaagtcatgatgctcaacaggttaggtgtatttaatgcattttaacttgcaatattttctacttacgatgggtttatcaggacacaacccctttgtaaggcaagcagcatctgtacaagaaagcttgaactggactggggactataaatttttctacagaaatttcattttcacccaacatagggagaataaaggtggtagtttctctctacagttacctttgcccagcccttattgtttctcttcaattatttcttcaattcaattttattaagtggccactcatatgcaagtgtgtgtactaaaaaatgtccaggtgtaccaaaaaatgtgagatgacatataaacataaccgcttttcttggcagtacctgccaactctaaaccactaggagagggaaggtttcatgcagaggtaggatttaaatggagcattgaaagaaaagagttttgtagcaagagataggagaagagagagcatgctcgcctgagcatgccgagaacgtggtaagaagtcccaaaaaacttgaatatagggcatgtgaggaaatatcaagtcaaataagaaaagcaggtggataccttcatgacaatcacaatgcctaaagcctcacatctcagtctccctaactggaaacttctcttaaagccccggcaccgtgggattatcctagatggggccaccttcatctcatcatgagctctatcccccaatatatttgacctcttcctacctgtgaaggtgaccgaggccgtgctggtgcgggagacgcaggtgctaatgtatgatttggacttgctgtcgggctcgggaggggtgaaggctcctcaggcggtgatggtgtctttgcaatgcggagaggacccgaatcactagaggaacacaggggattgggcaaggggccttctcaagaacagtattcatctaatcaggggttttccatttcagagaaacccagaagcctaacaggtactgtctgttgtcctgctctccccttccaggttaattctggttaattgcaacagtgatggtgataactggtaccatttatttgcactacagagacctcattcatgtattatcttttgtcttcacagtagccatgttttattgtccccactttacaagtagtaaagtggggcatagataggttaaaaataaaaactctaaaatcacccagccatttagtgaatctgaattcaggtcttagtaatgcaagccctctgttctttcaaacaagttctgcaagaatcttccaaacataagctgaattgattttactcgtttcactttctatttacaagagaatcttgccatgtcacaatctataaaaaactatgaaaattgtaacttttatattaaaaggtaaccttaggatagtgttagtaaggattttgtagaagtgctttctaataacatttggaaataaactcactaattatttctctttctagaccttataaataactactcaactcaggcatcttgaaatgtgcaacaaaatcagacaagattcagtttcgtttactaagaacccaccatgttcctggcatgcggccagacgctcgggaacagcccaaatgtgatgactaagaagcactcaggacacatcctactctctaagaatttctaaagtctacagctcgaagaaacagagtctgtaccccaaaataaaagagcatgtacacagcagcatggtctacatattcaaagggctgaggaaactgggtcctttagcgagaacacagacatgccacatgattggggtcatatgccagcaatcatggcctcagatggaaacatagccccaatctaagcttaatagagatgccactgagctcactcaccacctcattctgcagaggaatgttgaaaaaaagtgaaaggaacattcattaagtggtcatggccccgctttttcttcactgtatctcatttggcaacattacaattttcagatgaatttgtccctttcatttccatgtaagggaacaaccctaaattttttcatgcacttcatttttaaaacactcaaatatcattctgatattcccattccaattcttccttcgtgcctagccccatactgaaataaccatactgaaaacagtaactctgcctctcttatgtattctttcaggcaatattctttcccttagaaagagaagatatactactgcttacatagtatagaaaccatagcagaacctataagtagggctaatccaaagagcagggaataagaaaattaacaatctctagagggatccaaacattaacatatgtagaagttggttcatgtgtatgactatgtgtgttttcataaatgtatgcaaataagtgtttgtattaaaatggcaaatatagaatgtcaggactgtatattaccttggaaaccatgtagttcaatagtatctttttttttctattgaattaaaaaaaatgagacctctaaccagagaggttttgaacttactcaaggaaggcaaagcaagttaactgcaaaatcagaaaaccgaaagctgggtcttctgactcccagctcactagccttcaatctctgagtacgtaaagtctacgaaggatggaataaaaaggattccagaatcactggagaaagctggtgtgcagccgaaccctggcaaggtagacaggtcacctatggatcattggggctccggggtatttgactggcatactcataatgcaacgtgcaataaaacaaaaacagcacagtgttcaccagatcaagagtcaggaggtaagaggaagatgagatctcacctacttcctctttcctttcccaaaatggattcatgaaagacgtcagcatcaatgataacaatcaagacaaactgtcataaactttgggaattcctttcttctccggagaaaatattaagtgcataacaaattatatattacaacaagcatatacattatatattaaaatttcacactgttgctatcaggcctcatggaaagcagagagaggcagagaggcagaaagtcaatgctgttgtgacaagaagaagaatcctagttgggtcactgaaggccagacataaatgtaaaagcacaaaaataaaattagtgtcagcttctagggtgaaaaggctcctgtgggacttttgtaggataaataaaatagtacaggctggtccacagattgaagaaattttagcaagcaggacattacaggtgctccaatgagcaggggcctacctgggcgctccttggatggtgaaggccttgtcggcgtgctggtcacccagttttgtcatcacttcatacagtttgtggcaaagctaaggggacagaggccacttgtctattagtcacatgtcattctggtgccaattcaggctattctccccaagaaagaaattgcttattgagaagctataaattttatgatagcttggatggcctcaggataactgaaattctgtatacggttcaaatttaaaatctatgtcaaaactgaaacaaacgaaacacgagtaaactaaatatatatgtatatatttattaaccagagtacagggcagaaaacaaaagcttactgtttacattgactccacccttttgaacaacaacaacaaaaagcaatcaacaacagagttgattatctaaatactttgagagcaatttttcattagcctaaaataccactgggaattccaactttataaactgcctggtaaaagaaacaacactgtaaaactgtggcaaaatcttcaaaagatacaaagaactatgtgatcactatgaaaaaccgtagaaatgttatcgagggtaataacacactgctaaaagaaacatacaaaagggtgaattctttggataattctatcccatttcatttgcttccaaaataaaccttcctttactttatattccatatgcaaaaattatcgtcatgactcaccaccgcaatttccttatgaaacttggcttcaaggctggagacgtttttgaaagtattaacataaaatccaactcgtctgccatgtggaaacacaaagaggaaagaagagagagggaaagaccagtcagtaaaaataattttaatagcaatgaaatgtatgaaaacccaggtttcttttacaccattttgaataactttggactaaataaaatactgaacccaaagcaagcccaacatttcctcatctgttaatgaacaaaaacaagtatcttttggcatagagcatgacctctcctaaaattcagtgccttaagacagtgattctcaaactttagtgtgcatgagaaccacctgaagggtgtgtttctgatctagtaggtctgaacatgaagactgagaatttgtatttctgatgagtttctaggtgataactgatgctgctgattcagagacaacgcttatggaacccccgccctgagaacttatttatattttagttactgtttcttgctttcaagatttgagaagttcattattaacttttataaactataaatggtctagttattattatgtgtttggactctgaaatttgtttcatagaaggaaatacaaaacccgtaaattaattctaactgctcatcaaaaataagagcgtgtcatcactgagtaaatgaaaacataagctgccccttcataatagcaatgagattaacttcttctatggcttatctttacttaaatccctaacatatttgacttaatcttaaatttctatacctacagtgatcatgtgaccctgacttcatatatttttcttttaattgattttaaaagatcatatacttattcataaatacatgtgcatatacctattcatatgcatacaaatacacatgcatatagacatctattcattaataaagaaaatcctccacagtgtgtttgggaaatggtaagcccccaggaagatcagaccagagcctgggagaggaaagcctagtgaggaagcagatggttctctggggcagaggtccttgccagaccacgaagcacaatatttattggcaggcagtgggcaaaccctagatgtgtctgagatagggcaaaggagaacacttgcacctgtatttgaggaagctaattaaggcagcagcttgacaggcaaggagagaccctacaggctacctatacattatgcagagggaccccactcgcagtgtttgcagagaagtcttctggggtactttgagtggcaactcatgaccccttctccaaggccccaatcaactgggacagtaattcttaacacttttcttccttcaattacttccttcaattactcaacaaaggacctatccaactctgggtacatgcacagtggtaggtgaacatgtctctaggaacgtacaatccagttagagaagcatccagaggggctgctctatttatacttacaatggaaatatgtgtgtgtgtgtgtgtgtgtgtgtaagagaaataagcagattttatatatatgtgtatatatatatattagaaataagcagcttataaaaccacatgggaatgttaagttacaacaagaaggcatacatgattacatatcaaaagtgagtggatatgggcagaaacagagaaactgagaagagaggagagcaatgggccctgtgacagctgcaaacatctgcttaagaggacaaacttgggctgcagaaagaagtgtccaatttaaatagaaggtgggtacagatggaagaggtgtgtaagctgaacttcactggagagtattattttatttttattaatttttttctatggtaaataaaaccctaatgaatatctatgattaaggttttgtacacagcttattcatttccttaggacagatttcttgaaggtatttgctggtaaaaggagtgaaccaaataagcactgatgttcaccgtcagactgctcaactggtcgcactagactgggccacttatagtcccttacattaccttacatacaacctttataaatatgatagccaaaagttagcatctcactgactttgaagtttatatttcttcaattaaagttaacactttcattcatttatttattgctcatttgtattccttcttttgtgaatcacctattcaaatttttttatttcttagtattgtttttcttatcaatatgtaatggcacttctattaaacatatttaactttggatgcattaggcaaaaacaaaaaagaagtcccattcttctatatttcaattttgttttctgatatacagcatatcttaagttgtcaaatcaattattatcctgagaaaatggtatagtatcagaaatatcttatttagaataactaaacatctatttctaatattttgttttttaatttagaaattaactagcatgtatttaattaggataaagtgtccaacatttttgatacaactgatagtgattttctccaatttatgaagtcagagatcctgcaaagaggggaatgcctttaactagttcactattacagccctagcacctagtacacggcaagcatgagtaaatgaataaattccataaatgaacaaacaagccagtgaatgaagaaacttggcactcattccactataagagcatattccgatgtgaccctggcttgtaaaaacttaatgtaaccagcagtagaacatacagacggccgggcgcggtggctcacgcctgtaatcccagcactttgggaggccgaggcgggtggatcacgaggtcaggagatcgagaccatcccggctaaaacggtgaaaccccgtctctactaaaaatacaaaaaattagccgggcgtagtggcgggcgcctgtagtcccagctactcgggaggctgaggcaggagaatggcgtgaacccgggaggcggagcttgcagtgagccgagatcccgccactgcactccagcctgggcgacagagcgagactccgcctcaaaaaaaaaaaaaaaaaaaaaaaaaaaaaaaaaaagaacatacagacacagagtaccagcataccaggctcttgattctgatattatctgcttaaaagtttcattttgcacagggactctgagacatcaccatttccccaaatgtggcatcctcaggacacttcttattagctgtcaaaaccaacttaatttctttattaagatgtttctttgttctcagaaataaaggaaaaattaagttgagcttatcacagctacagattgcagacctgagcactctccccttcgcaatgccctaaggaaatctgcctccctggaggggagtgtcagtgcttcctgcagaccctcttgcagtggaggaggcaacccttgctgtccttcacttactatggagatggagtatgaggaagagttttttcctagctctcttctgatcctctaagctcatttacactccatttcaggattaatggcactcatattaaacctcttcaaagcttaatatcaacctctcagcaagactcctcaaccccaaccacaatccacaatggcatgcctcatggtttcccctctctccctcaccaaatcctaacactaacacagtagatctcaacaaccctatgactatccagccaaaacatgagccctctaactagggaccccagcattctatttatacacattctgcattggcctctgacatcttggatcttgccatgactcacaactatttcacctctgaaatggggcagattagtggcccacccactaacctaatttcctgggccatgagctccctcattcattcatttccattccacctgcttctttcaaaacctctgtgagatcaatgcacttttcttccaggccactacccttgatcaggttgaacatcctgctttatcaagcttgggccctgtggtatacccctcaacactctctggtcagtcctatcaacacccttcctccttgtcctgatcccctgtttgccccacatatcttcagtcctaaattattccacctttaccacaactatgccatcttctcaaaatgacaaaagttatttttagaaagctccccttgccctctaatttccctataccagctgccacaattcctcaggcccatcatagttagaatcctcaaaataacagacactgttgctgcttcctcatctccaatggagtctccaatgcctataatcaagcttctgatcccaacatctactgaaacccctctggacgtttaccaaaggtgatgcctctttagtcctcatctgcttgatacctctattgtaaatgatagtcctggcactcctcatttttaaaattctctccattcttgcctttttgagatatccctctgtcatggctccttctacatctctgattaatttttggaaggcttttccacagtcccctcttcttttgcacattccataaaatattagtgctctcaaaggttctgctttgatcctcatcttgccatttgatctatccgaccatctaattcatcaactctcatggcatcattaccacccatatggtaatgactcccaaacctctcttcaagctttagacttagcttaatagacatatctttttgaatttcctaatgattcttcaactcaacatatataagccagactcaatcttcccaaaatttccttttctttacatattgtctatctgtttgagggacaacttccctaaacatccaaactatagtctgagttacaccatctcatgtcactctctactaaattatcgttttttaaaattttttctgcattgaacttattgtctgatatcttatttttcatttcttttaaagataactgcctttccctgtccttcaatataagctccaagcaaacaaaaactttcagtacagaatctttaacatctaacagagttcttcacacacagtaggtggtcaataaatatttgttgaatgcatgataaatgtatctgatccctatctttctcctgcttcatcaccacaagcccctcctagacactatcactctgaccctgagttacattagactaaagttccatgaacccagatatctgcttcaacccacaggcctttattcatactctatgtcagcctagaatatccttttcactaaatggtggttttacttattttacaagatttacctcaagaattctctttagagtccttccttcttggtgataccactctatcatctctatctatataatctataagctcctttacaacctgcaatcatattctagtatttccttttttaaaattgaacctgcatccccctctaagcagtagttccatttctccctcatgaactactaatctttgaagatcagtttaaatccaaaaatttgaaagttttctacacttggcagtaatggaggaatagagaaacaaaaaagacataaggcacacgaagcaattaccaaaatagtagacagaaaagcctacattttggtaactatataaaggtaaatggactgagcacagcaatcgaaaggcagaggctggcagaatggataaaacacacaccatgtgcacacacaaatgatccaactaaatactgcctacaagagacacaatttaaattcaagataggtagaaagtttaaaaatggaaaaaataatattccatgcaaagagtaatgaaaagagagcttgaatggctatagtaatatcagacaaaatagtcaaaattattagagacaaagaaggacagtttataaagaaaaaacagtcaatccatcaagaagatatacaagttataaacatatatacacctaacaaaagagccctaaaatacattaagcaaaagctgacagaaatgaagacagaaataagcccaataatggtgggagacttcaatatctcactttcaacaaggcagaagatagtaaggaaatagaaaacttgaacaacatatagtcaacctgaacctcacaggcatatatagaacattccactcaacattctgaaggattataaatagtttgatgcattaataactaacatgtaatatgtttattacttcatacccagtattatgcatttcctcataggaggcaaagaagatacaaaatactaatttcaatttcaaggttgagtaatatggcttgttaaagaacatatgtatttatggaataacttgaaaaattatgactaaatgcaatctcattttagataaagagaggccctagataaaagcagcaggattcacatgaaaacaaaacaaaacaccaaagtgtttttaaatgctacctttaggatttacaagcttaacaacctaaggtaaggtatttaattaatatgatctttagcttctcatctgtgaaatggagagatctgtaattgtaatgattagaggttatacatgtaaagtacataaaatgacagctagcaaatagaaagtattccaaaaaatgatctttggtatacagcatacacaatgcacacaattattatggttgagtaatctggatttcattaagaaatatgctacatagaaaggaaggcctaagtcaggttttgatcgaaaggcaggatctggattgaaaaactagttttgactgatgttatttcctaagtgccagagtgagacattagattgatttcaaaagcattgaaacatttatactgcgtatgaccagaaaaggggaaaggtttctttccaaaattatccctcagatattccctttgtttttaagtccctacaaagtctttcacgctacgagacactccaacaattactttactttgaataaccaaatacaacttaggaagggcacaaaagactgaaataacatcaatgctagttttggatgtagtagagatcactagaaaaaccttagttatatacccaatacatattaaggcaaataataaatatctgtctcttggcaattctggcaatttccccaaagtttcataattggcactggcaatttcccaggggtattatctcataattgaaagccttgaacactgtggtacccaagactttttgaagatcagtttaaaaagcgattaagcaattacattagaaatcataaaaaattcctttacaggggaaataaaaagtataactgtcttaattgtatgtaaatgacaacctgtgtttggaactaaatagctgttgaagatgatgataagctctggagaactactagttgagatgatgagtatcttaagtaaggacaaaaacaagtgatgctaaagatatatgtaaagattttggataaaagtattccatgaaggccgggcgcggtggctcacgcctgtaatcccagcactttgggaggccgaggcgggtggatcatgaggtcaggagatcgagaccatcctggctaacaaggtgaaaccccgtctctactaaaaatacaaaaaattagccgggcgcggtggcgggcgcctgtagtcccagctactcgggaggctgaggcaggagaatggcgtgaacccgggaagcggagcttgcagtgagccgagattgcgccactgcagtccgcagtccgacctgggcgacagagcgagactccgtctcaaaaaaaaaaaaaaaaaaaaaaaaaaaaaaaaaaaaagtattccatgaaatgtaagagcaaaaaagtaatatctgtattttttaaaaaaaagccatagcatcatataatttgtgattttaaataaatgtgaataactaaataaattcaaatcataaatagatatttgttttatctctatccctaaaagttgtatatattcaggttgtttaaatcctctctgggggagagaagaggtcttctttaggcacatacagtgaggtcctaagcaggccacagagatgtcaaggtggagcttctgaaagaaaaggtgtacagcaagaggtcaaagaaagaaatgtaagggcaagactaccatcataatacacaacaggatgacgagggttagggtggggacagtgggaccagagaaagggagagtgatccagaagcccacaccaaaaaatgatagattgattattttgatggctctttggtttcctgtaggtaacaattgcaaagctttgaggtttcggaacccagaaataatggcaccaaaaaaataaaataaaataaaataaaatgaaataaataaaaagaaaaagaaatgcagatgtagagagaatgagtaaattcagatgaacaatgacataatttcacatgttggactttgggtgatggctggacactgaggtaaaaactagccaaaatttcatccagatatttcagttcagagagaaacacagagtgccttttattggcaaaaattaaaaacactagcgatgaacacaaaaatgggcaaactttagtatagaccctcaaaatgcttacaattttggtgggtaaatagaagctctagaatttgtatataggaaggctttagaggcaaatccatctagttggaagttaagaaatagaggacctgatttaaaataacgtggcattattttaagcacaactctggctaatttggggtgggagcatgaggatgctgacagagattaaggatcataaggtcctatttcatccaacaacttctttgttctaccactgagtaggaaaaacagaacaactatttcaaaatgcacgtaattccacgagaaatgcagagtaacgtgtaagtaagaatatctggtgcttaaaatacaaatacagttcagatttaaaagtcagggcttaaagtagaggcttaccatctaagccagatgactagatgagctcttggaataaaggaagttcctccaagaactgaaaggatattattgttaagtttcaagatgaagggcagtcctcctaatgcctctaattgagatttaggtctccacttgagaaatagatcaaggtctaaaattgtgtcatcctatatggcagctactagccacaggtggttatttaaatataaataaattagaacaaaataaattaagtttaaaatttagttcctcctttttaatcctagccatattccaagcaatcaatacccactggtgacaagtagctaccatactggaaagcgcagataaagaacactttcactggacagtgttgaaatgtcacagtaataataaagacaagataagggatattcactgatcttgaatttctaaaaggaacatgtgcaacccatagagaaacatttttaccttgaccataatgatggtaactcttcttgtaagtcaacgttaaactcttcaaacactttctgtgctttctgaaattcttcttctgcctaggaatgaaacataacatgtgtttacactaagaaagaccatttctatacacaacagcatcatttaatgtaaaataagaatagtcttatggcatcttggaaatattttgagaaggagagtatttggttaaaagcatatccttgtttttcaattaaacatgaaacactaagactccctaaaactggaaaccggattgattacaatggttgctcttgcagtttctggctgattcatttattctacaaaaatgtgttagctgcctgccatgtagacagctctgctatggatactgaacatgaatgcatccccaggaaattcccagcctagtggaaagtctaaataattacattacaggatgtatttacaaaagggacttacaatgtgttatagagcatgctatatggaaggtggtgcagagaagagagaaggtaattttttaactgaatcctaaagaatcagaaaatgtttgctaaaggagggggtaagaaagacattacaatacataaaggtggaaagccttgaaatggaattccagcttaccatgtgaacttgtcagactgctttaccactgtgtacctcacaggttgttttgagtattaaggaaagttaatgtagatgaagtgttgaacagagtgcctggtatccaggaggcctctcatgaagggcatttgttattgtgaactgctcagaaactgatgtgtagttctggctcatggtatgtttatggaagaaggcgaggaggggaaaggagacttgaaagttgatcaggatggacaggtgagttacagccaaattgtgaggatcttttatgctgtactaagaaataaagtattttttgtagaggcaatagaaaccattaaaagacttaagcagttgagaaacatatctcgatgtagaaagaccattcaggcagctgtgtgtaggcacataggaaaaggcatgactggaagaagagggtatagttaggaggtgacttcagttagtcggcatctgtaacttgctgacatacatggtgaaagctactaaaaaatgttttctaacagaaaatttgttttatgcaaatccacacatccgtactctcagacaatcaaaagtcacctctgagaatttcagcttggtgtcccatctgcatctgcatttcagcactgagggtggaccacaaccatctaaggaagtgcagacacactactttctttgatcccgcaacattgtaggtcaaagtttattctgatcaaaatgtgtgagtcagtatcccccatatgaactgtacaatataatgaaaagccttattttaattaaaaataataaaaagcactatgtttcagtttaaattctgttcagattccaatctccttttatagaggaggcatttaattttaaaaagtaaagctgcaacaggtcataaaatacggagagtggtattcaccatgggctcaatccctaccttagagattcgactctcatccttcctcttggagctctgcagagcttccagatggtggcgggcactgtcatagtccactagcttcctgctgcgcttggcgatgcgattctgtcaacaggaaatgcactcactaagaaagaagcatggacataagagtctccctttgacagccaggtgccaaaatgctttccttggccagagctgctgaggatcttgactggagatcaagatgggctggagtttcactagctaagtgactcctgaaaatcagatgaacacctccaatcctttgtgttgaagccattagataaatatcttcccttttgataataattaggctaatcacaagcagctgagggcagagtttgcagtcaaagaccagaaaataatccagaattggtcagggagagaaggcaaaactatactcattattctctagtcgaaatctttaaatgttctattctgaagatagtgggaaactatgttagatttggttttataattctgataacactcacaccaacagcaattctataaaaacagatttacttcccaagaaatctcttttcctacaagtgattctcaatactttgttcattagaatcccctggactaatgtgtcatttggaatagctggtggccaaagacacagggccaaaggcacagattgtgctaatgggcaagctctttcccatgggtcaacattggaagccatgagaaagtctgagaacaagacattcccttgcagtgtggatgagaatgaggtgatatatggctgctaggggataggcgtaaagccctgctcatttctatggaacatttcctcttaacaacaacaacaacaacaaccacaaaaacaaaaagctttaagccgcttgaggagggggcaccaaacccttctacccacaggtgcaagcaaagatctactgcttctcggggagcaataaaagtaaaaccaatgtggctctggtagagatggagagccttctgacctctagattttaggcaaaaataattgctgtaggcaaaagggtaaaagaaaaagtctcaaggggcataaaagcttcctaggcccaagacctgactcctacaacaagtagtggactgctccaacttgggcagggaaggaaactctcgctcaaatccaaccacagatatgaggctgactttgcctaaaacaaggccgggaaaggatttaaaacaaacaaacaaacaaacaaacaaacaaaacaacaacaacaaaaacagccctaactccactacaagctataacactaaaaaacaagcaatagtggcctaccactggaggaggacagtgcaaggagagagaccccttctgcagaggggtctctacaggcatacaaagacaactaaaatctaataagcagcagccacactgagagaaaccctccagcacctaagggcccccaagtcaggcttcaacctaagaatttgaaaatattacagatattaaaatataagtacaaggcattagcagtccaattctggaggaatttgaaagctgcggtgcactgaagtaacaatagcaaaaataaagacccaatgcagctcaggtcctgattaattgattccaactctcacattaacggcctgacaaaaaggctggccaatttccagacataaatattatttcagtactcactatcctatacatgatgtctggcattcaatcaaaaattacaaaatacacaaaaacaaaaaaacaacaatccatgagaaaaggtaaagcaaacaacagagacagactcagacatgactcagatgttggaagtaacaaacaggaattttaaaatgactacgactaatatgttaaagtatctagtttgaaaaagtcaacaacaaagataatcagatggggaatttcagaagagatatagaaacgttaatggtcaaatagaaatcaaatggaaacactagaaattttaaaaatgttatcagagaggaaaaattgattcagtgggcccattactaaactcgaaaaagctgaggaaataaatagtgtacttgaagacaggtcacaataaattatttccattaaaacacaaaaaggaaaaagaattgaagaaaacagagaattgagcatctaagacctacaatgtaatataaaatggtctaacataatataattgaggtctcaaaaagagatgagagaataataagcaatatttcaagagataatggctgaaaattttttttaaataatgaagacatcaaagtatagatgcaagaaactcagagaataccaaaaaggaaaaataccaaacaatacacatctaaatacatcatagtcaaactacttaacatcaagaataaaagaaaagcatacaataaaaaggtaagaattacgggatgctaatcttcagaaaccatgcaaaccagaacacattggatgatatatttacagtactgaaaaataaaagttaaaagaaatctgccaactcagaattccacacccaatgaaaatatttacaaaagtgaagatgaaatattttttttcagacaaacaaaggctgagggaattcattgccagcataagaattttaatatgaagtggagctacacagaaaaatgagtaccagaaatgataaaaatcaatgtaaaatataaaagattttgttttcctacttttaattgcttgaaaaggtaactgatcattcagagcaaaaaaacataactaatgtattgtggggtttataacatgtaaaagaaaaatgtatgacaataacagtgcaaaggaaaggaggtgggaactgaaagtgtactgttgtactgttcttaaataatacatgaagtaatacatcatttcaagttaaacctaatatgttaaagatgtatattatacattataaggcagcaactaagaaataaattaataaagaagtatctacgtgccccataaatatgaacaattattatatgccaattaaataaattgttatacatcaaataaatgagaaaaatgtaaaaataagtagaacgaataaggaagtatcataaaatatattgactcctgagccctacactaagagattctgatttaattagactgaggcaagccctagatatctacagtttaaaaaaaatcttccccgtagtccagttatgcccagctatttgaaaaataagaactaacccaggaggagatgctttaaaaaatttgatatggtaggaaaaagaaaaaaaaaacacaataatataaatggttatggcttacaaggcattgtcacatctgatggatccttctagcaacctacagaatgagtgtttcagggattatctccattttacttttaggaaatgtggagctgcatgagataacctctaatttgtccgaaattgctcagcaagtctgtggcaaaagtgaactgaattagaagttggccccagtgaccagcgccaggagtagggtgaggcaggtgagacagggcacaaaatttaagaaggccccttactctcagggtcatgtgagtgcagggttagcaacttcctccctctaatttgcaccacgggttctttgctcacctcatccaatctcatccctgcttctcagtctcggttagtgcttcttccaacagctcccaccatttctctgacagactttatgagtcaactacaacctgtcactctatgctattcttctacacacccttcaggactggtgagaggtgggttggggcagttaacctctttggctatttctaattgctttcattttccctgcacctaccacttacaactagtatactagcagaaagcatggagatacacacccagtcactcaaagtatgcaatgagttagcctaggcagagtagagtggaaacccttcaattaggtatggtgaacaccatgtgcctataaggtgacaaggctcattacttttagcaaaaatgtgttaccttcaaaggaggctatcccttgaagcagtggcctacgtaactatatgcaaactcttataaagctcttccttatggacttgccttctagcctggggcattcctttaatatcttccaagtagcaaatcttgattctctgaagatgaatttgatttttgaaagcatctatgaatcaataacttttaagtcttagaataagatggaagagtgcactgggtaatcttatttttgttcaaaaacaagaagcaaagtaaataatgtgactcattttcttatgtaatttttaagtcaattacaaggatagcttaccatggtagaaatgactattttgaagaatatcactcattttgatgcatacattttggggttagaaaagataaatcaatcttatttccttacctatctgatatttgggaaacttggggggaaaacccaaatctcctaaataagggtaaggttgacacacattagctttttttaatggaaaattatataattctcttatttaaccatccaataggaaacttaattaaattacattataaatttaacttacatttcttgaaaagagaaaaagaagttgttgagatttctcattgtgcactgaacctctatagttaaaaaataagttattatacattttttaaacttccataataatcccaaattggaattcattttggtacactgcagtaaatacatgcttagttgctcatgcatggctgccaagatagaatccaaactatattttacaataactgctcacagctgtaagcctgcctgggttggtgacaagcaggctcttattataacagtgatttcagatgtcaatgctgcataacagaaaccataacgcagggtatcccgccaatcacagctggaaaagttaaacatcatcccctcatgaatggtccttcatagccctcactgatgggctcaagtaaatatttggaaatttgcctgaggttttaactgcacatggcctgttgatttcaataggaggcaaggaagtcaactgtgttccatgctttaaaaattctccactgagtatttttgtaaaatactccaccgagtattctactaataattactttaaatgtaagttgattaatcttcctttccatcatagctcattcattacataatcactcaacactatttttataaagtgatggagtctatatctacttctaacttcccttcactgaataaaggcagacagaataacttaagtccattttcacagaaaaacttctttcaaatattaaatacagctatcttctcactttccaattccaaattatctcctttccaagttaatagcatagctattacaagttaatagcattttgatttcctcaactgttacttgtgttatatggcttcacaattatctatcttggttgatagcctctatgtatgctccagtttcctaaatgtggcttgagggagacagagagagagagattcagcctctttccatgatacatagaaaaccttaacgtatatttaccttaccttcagggcatccagcaaaagatctagatgatattgtttccaaatctctacatggttcagaaactgcaggatcatctttgtatatgacctcaaccatggacctcaataaaagaattgctcaaggaaaagttatattgagctcttcatctttctgacatggaataaactgagaagaccagccaatataatctgtcataattttattttaatctttctgtgtttcaataaacgtaattctgtatgtgcttgtattctgaaattacatgctcctagacagtgtggccaatttctaaatatagtacaataactaagatcttcccattttattaatgatactaagtttttgttcctgaaactcaaaaaactttcagatgtttgcttctctagttagtcacagcctttatttgcttagctaagtcatactatgaacatatatcatatgaataatttgaacaagttgtaagctgctttggaattttcaggtaggaagacacaatttaacctcttctgatttcttaagtattgcttttaaggagattaaattaccatgcaataaaggtgatggtagcaagatggaagaataggaagccctggactctccttccccacaaacatacagatttaataccaacacaggaatcaatttttgtttgtaagacacccagaaactcgttgaatagctccttaacccttggcaagtgcaaatccagccacattgaaacaagcaggaaaaggggagctacattcttgctatccctagcacagtgccatataatgaagagggaacctccagctacctacttctcagtgaagagtgaagaaataggacagcacatctagcatcccaacttttctgacttctacccaagggagtgccttctacttgcctgtctgggatagctgtcaggtccagcatacactagtccctggggtctacagagaataaacagaggtttgaacatgaatgcaggcacttgccatggctcctctccctaggttagtgtagagcaagcaggaggaaacaaataagcaaataaaaacacacttctaagtagtatggcctaccatacaactagttgccacagcccctcccctcaactgagggataaaacaaacaaacagtaaaaaacacccagtttcctgcttctatctatgcagggaaagagttgaacaagcatccaacgatacaacctttgggggcttcccaagaaaatggcttccaaagaaaatgagtcttgcttgtctcagagcactgaaatgacccagcattctctagatgcctagggggtgctaagaacaaagaaaactgtcagaatagtcaaaagtttgagaggcttccaaaatctatgactgggatgattggtgaaggtcttctcctatatggagctagtccacaaagattaaaagaggtggctgttttgtctaatatgaagatatcaacatagagaaccaaggtaaatttaaaaacagggaaatatgtttcaaacaaagaaacaaaataaatttacaaatatcaaccctaatgaaatggagatatatgatgtgcctgacagagaattcaaagtaactgtcactcagatcaggaaaataatgtatccgcaaagtgagaaattaaacaaagtgatatagaaaatatcaaacagaaatgacagaactgaaaaatacaataagtgaactgaaaaattcactgggggggcgttcagtagaatattagatcaagcagaaaaaaggatcaataaactcagacaggtcattaagaatcatttggtcagaggaacaaaaagaaaaacaaatgcaaaatagtgaaaacagtttaagggatttatgggacaccattacataaaccaatttatgcattatgggagtcccagaaggagaagacaaaaataatcagaaagctattgaaagaaataatgactgaaaacctcccaaaactgggaaagaaaatgttcattcaaattcaggaagcccaaaaactccaaataaaatgaacccctaaaagtctacacagggacacattataatcaattgtcaaagacaaatatggaatttcaaagtagcaagagaaaagtgacttgctcacatacaagggaatctctgtaatactattagtggatttttagcagaagcaggccagaagggcgtcagatgacgtatttaaagtgatgaaagaacgaaaaaactgtgaaacaagaatacttgtttcttgcattcttaaagaagagataaagacattgctagacaaaccaaagctgaaggaggtcatcaccattaggcctaccttataaaaaatgctaaacagatttctttaacatgaaattaaaggacactaaacagcaaacaatagcataaaaaagtataacatttgttggtaaatgtaaatatatagacaaatacagaatactttattactgtaacagtggtgggtaaatcactttcaattctagtataaaagtcaaaaagacaaaaacgctaagcataactataactaaaaaatatatttatggaaacacaatataaatatatgcaaattttgacaatataaagtatacatgtggtgaaaataaaagtatagagtttttataggtgattgatgttaatttagttcttagcttaaaatagactgttataaaatattttatctaaattctgtaataaccacaaaaatgcatatggaagttacacgaaagtaaaacaaaaaaatcaaagcatatcaatacaaagaaacaacaaaatacaacagaaattagcaagagaggaaaagaggaacaaatgaacaataagacaaacagaaaacaatgaacaaaatggtaacagtaaatcctttcctactaataattactttaaatgtaagttaattaaattcccagtcaaaagacatagagtggctaaatgaatttaaataaaaaaagatccaactatttattgtctacaagagatttactttagattatagaacacacttggctgaaaataaagagatgcaaaaagatattccatgcaaatggtaaccagaaaagattagggatggctgtccttatcagacaaaataaatctaaattccaaaactgtcacaagagaaatggaaggacatgtaatgataaaaaggtcagtccctcaggaagatacagcaattataaatataaagcatctatatatgtaaagcaaaatgacaaactgaagaaagaaacagacggcaatataataataatacaaaaccttaatacccctctttcaattatagatagaaccacaatttcaattacaatttcaattatagacacaatatcaacaaagaaacagtagacctgagcaactatcaaatggacctaacagacatatacagaatattcaatccaacaacagcagaatacacatatttcttaagttgcacatggaagatttttcagtatagaaagtatgaagggtcacaaaacaagtcttaacaaatttaagaagactgaaattataccaggtatcttttccaaccacaataaaataaactagaaatcaatagcagaaagaaaactgaaaaactcacaaatgtgtggaaattaaacaacacaattttgaacgaccaatgggtccaaaaagatatcaaaatggatattaaaaagtatctcagcacaaatgaaaactaaaacaagtagcagaaaaagctgtactaagtggaaagttttagtgataaacgcatacattaaaaggaaagatctcaaataaacaacctaactctacatctcaaggaactaagaaaagaacaaatgaaaccccaaattggcaaaagaaaggaaagataaagattagagtggaaataagtgaaataaagattagaaaaacaacaggaaaaatcaaggtaactatgagttttttttttttttgagcagataaaattaacaaacttttatctaaactaaataagatagaagactcacataaataaaatcagaaatgaaaggtgatatattacaactgatgccatagaaataaaaaggttaagagactaatatgaacagtatatactggcaaactgaataatatagaagagacagataaattactagatacatacaacctaggaagactgaatcatgaagaaatggaaggtttgaacacatctttaagtagtaaggagatttaataggcaaccaaatacctcccaacaacaacaaaaccaagaccagatagcttcattggcaaattctaccaaacatttaaaaaagaattaatgccaattcttctcaagctcttccaaaaagattgcaggggagagaacacttcaaacctcattttctaagtccctgatatcaaagtcagacaaagacaccacaagaaaagaaaactacagaccagtttcgtgattaacatagatgcaaaaaaccgctacaaaataccagcaaactgaattcgacagcagatcaaaaggatcacccatcatgaccaagtaggattcattcctgggatgcaagaatggtttaacatatgagaatcaattaatgtgatacaccacattaatagaatgaaagataagaatcgcataatcctttcagtagatgtagaaaatgcatttgataaaattcattatcctttcacgataaaatgctcagcaaactagaaatagagggaaagtaccccaacatatcaaaggccatatatgaaaagcttacagttaacatcatatccagtagtgaaaaagtgaaagctttccactgacatcagaaacaagacaaggatgcccaccctcaccacttcttttcaaacgaaaaaattaggcaagaaagagaaataaaattcatccagattggaaaggaagaagtaaaattgtacctgttggcagatactatgaggttctacatggaaaacccgaaaggctctacaaaaaaactgccagaactactaaacaaataagaatagttgcaggatacaaaatcaacataaagtaattagttgtctttcatcatactacctgacttcaaactatactacaaggctactgtaaccaaaacagcattgtaccggtaccaaaagagatatatagaccaatggaacagaacagaggcctcagaaataatgccatacatctacaaccatctgatctttgacaaatctgacaaaaacaagcaatgaggaaaggattccctatttaataaatagtgttgggaaaactggctagctatatgcagaaaactgaaactggaccccttctttataccttatacaaaaattaactcaagatagattaaagacttaaacataagacctaaaactataaaaaccctagaagaaaacctaggcaataccattcaggacataggcatgggcaaagactgcacgactaaaacaccaaaagcaattgcaacaaaagccaaaattgacgaatggggtctaattaaactaaagagcttctgcacagcaaaagaaactatcatcagagtaaacagacaacctacagaataggagaaaaattttgcaatctatctatctgacaaagggctaatatccagaatctacaaagaacttaaacaaatttacaagaagaaaccaaacgaccccatcaaaaagtgggcaaaggctatgaacagacacttctcaaaagaagacatttatgcagccaacaaacatatgaaaaaaagctcatcatcattggtcattagagaaatgcaaatcaaaaccacaatgagataccatctcatgccagttagaatggcgatcaataaaaagtcaggaaacaacagatgctggagaggatgtggagaaataggaacgcttttacactgttggtgggagtgtaaattcgttcaaccattctggaagacagtgtggcaattcctcaaggatctagaaccagaaataccatttgatgcagcaatcccattactgggtatatacccaaaggattataactcattctacaataaagacacatgcacacgtatgtttattgcagtgctattcacaacagcaaagacttggaaccaacccaaatgcccatcaatgatagactggataaagaaaatgtggcacatatacaccatggaatactatgaagccataaaaaaggatgagttcatgtcctttgcagggacatggatgaagctggaaaccaacattctcagccaactaacacaggaacagaaaactgaacacctcatgttctcactcataagtgggggctgaacaatgaaaacatggacacggagtggaacatcacacaccggggcctgtcggggggtggggggctaggggagggatagccttaggagaaatacctaatgcagatgatgcgttgatgggtgcggcaaaccaccatggcacacgtatacctatgtaacaaacctgcacattctgcacatgcatcccagaacttaaaatataataaaaaaattattagttgcctttctatacactggtaacaacctgagaaagaagttacgagagcaataccaattacaatagcatccaagatactaaaatacttaagaataaacctaactgtggaagtgaaaggatttatacactgaaaactatacaatattcaaaaataaattaaagaaggcacaaacaaatggaatggcatcctgggtgcacagactgaaagacttactattgttaaaatacccatactacccaaagtgatctacagattcaatgcaatccctatcaaaatcttaatggaatttttaacagaaagttttttttaattctaaaattcacatggaagcacaaaagatcccaaatagccaaaacaactttgaagaagaaggataaagctagaggcattacacttcttatttcaaaatttgttacaaacctcagtaattaaaacagcattgtcctggcataaagacagttatacagacctctgaaacagaatataaagcccagaagtaaatccacaaatattcagtcaactgatcttcaaaaagggtgccaagaatacagaactgggaacaggcagtctcctcaataaatggtgctgggaaaactggatatttacatgccaaaaaattaaattggacctttatcttataccatacacaaaaatcaactaaaaatggattaaagacctgaattgtaagctctgaaactgtaaaactcctagaagaaaagttgagggggggggaagcttcattttctaaatgaagatgttttaaaataaacattggtgttagcaatgatttcttggacttgacaccaaaaagataggcaacaaaagcaaaaatagacaagaggaactgcatcaaagtaaaaagcttctgctcagcaaaagaaacaatcaagagtaaaatgcaagctatagaaatggagaaaagatctgcaaaccacatgtttgatgaggagttaatttccaaaatatacaaaggaacacccagagctcaatagaaaaaataactaataatctgacttaaaaatcggcaatggactagaatagacatttctccaaagacctacaaacaacctcagagaagcaaagaatacatagaatgatggttgccaagggctagagagagttggaaaatgacagttgctaattaatgggtataaaatttcagttacgtaagatgaataggttctagagatctgctgtgcctacagataacaatactgtattgtgcagttcaaaatctgtcaaagggtatatctcatgtcatatgttcttaccgcaataaagtacaaaatataaattaaataaaataattttgaaaataatttgccatgcaataaacagtactctgaagtgattactattgtgagactgtctgctccacaaacattacaaatcccaaggcaaaaattgagtgactaatcaaaattatctgaagatgtctcaaaacatgttccctggtgcacatggtcttacagaatttttaacaatttaaatttttaatttctcagagaatttttaaaacccaattcacacctgttaattaggttgcatttgcccaactacttagtaaagcactttgctgcctaatatggtaacatcatcgaaaatctactgtttggatttgctctatgtggcattttgtcaataggtctaacacatttagtcagatccatttagtttcatttaccatataccaaccctgatagtttaaaagccatctttacctccagagtcaattccaaatctacaatattcaatccttcacttgtccatttacctctgtaatagattcaagggtcaaataagatcaatgtttcagacacaatatttttaggtccagatgcaaatgtatttaaaatgcttatatcttaacactttaacttcaacctgaaaatttcagtgagagaaaaactatccaggttcactataaatgcatgcaaaatagacagtaaagaaggaaagatcaggttttgctctcatatttacaatgaaatttctcacttccttgtgaccactggttattctaatggaaatccctgtcaaatgctatataataaaagttttgattataaagaagattggaacttttggtagctctggtttatgattttatatctataggtttaaaaagacttctgtagaataataaaagctgaagcagttcactaaaagcgaaatgtgatttctgtaatgacgtttcttttcaaactgataggaacaacataaaaatcccacgcttaaataaatgaaaagttaccaactatctttgatgtcagtttgaggacttgtaataattcttctcttgcccatgtttcaataactacatgaccccactcaatccttccctttatagacacagagtaaaatacctttatgtcaggaaattgccccaggtaggtatccagtgttagcaaggacccatccacgagtttttgatggaagtcttcccacagcacatcacatttctaaaagaaataaagagaccactgctgaattattttaattggatacctttcaccaaacttctaaaaaaatctgaaactataaaattagacaagtaatactttcccagatatgagatgctaggggaaaaatgagaatcatttaataatgcaataaaattttaaggcaatttggccactggttctagttaacaaaacaggctagctcagagctcagctcattaaaactgtatttctgattctaaattactaaagaatgcagaaacttcaaaagatccccataaccctatagatggactttggggctaagagactgagaataattccactaagacagtttgcttttgacgcactccatgaaatcagaaaaaaatccaccactgaaacaaacaacaaatcatttctgaagcctccccagggaaaacagaaaagttacagtcatattgggaaaggtcttaccatttatggagtatcaattatgttaaacgtacaatgaatattaggtattactattattacaactagtattcctactgtcactatgttaaggcattctcaaaaattgttttatgagaaaagactttgttatttccacaatacagaagaggacactgaagcccagagatgtcacataacttggccaaggttataaagttgataaatgacagacacaggcttcaactcagatttgtctccttgaactcaaagccatgatatgaaagtcaggaaatgactatcacaccaggctgcctcaccagaggactttttatcccagctgtgtgactttggggaactagacctccctgaatttcaattcccccagttatatgagttggcaatgtaaagtgcttcacagaatttcaggcaaatagcaggtactcaagaatgtcatcttcacatttctctcactagcacattccaggtctcttgacacagtctgctatttgtcaccaatctctaccctttcttccttcctactaactgaacctcccattttagctcggcccttggccacctaggataaagactccacttcccagactcctttgcaaccaggtgtggtcatgtggctgtgttctagacaatgggatgtactttcaggaagtgtcctgaaaaagagggaaggagtgggctgtcttccagacttcatcctccttgctaactggcatgcagaaatgagagctgatggccagtgctcagagagtcaccttgcccgtgaaggcatgctaaaaatggcaaacttgggcccctcatacttgtggggccaatatgcaacacctggactgccgacctttaaattcctctatgtgacacataagttttcatcttgttaaaacacacacacacacttttaaaatttgcttttgtttctttctcacactttgaaaagtagtcctaatttttacaaatctcaattcaagaatttcatgcaaaccaaaacatttaaatccactgtttagaaaggctcaactgctgacgtgagtagaccctctgaacatgcagtattcagtttcttcatcatcacaagagcctatgtttgcatgtgcaactgaggattccaaaaaaccgggcagctgcaagaaccaaggtaggataacagtcatttcctttaaaaaagaaatggcaatagtgacctttgccacacatagaaggtaacatggtgttctgaaaagttattaacacaagtttctattatttccttaaaaattatttttttgtgatgaatttttagttataccactaattagaaatttacaaagtatttagcaacatgatgttgaaatactgtgttttaattgaagaaatgtgagaagatgcaattacttaataattgcatctgaaagtaatgtgtgcggtctgctttggccaaatctacatcctgaaagtttttgaaagatgtaaaggagccaacaaatgctttcctcataaataaatctctgttagcatctcagttataagaagattatgaagctcaatgtcagggtgtcagaatatccatggagcagcctaggactccactgttaacgcaggttttccaaggctgcacagacattcagtgcatcacctatcagaccttcccctgagctctggctgccacatcaaatttaggtcgtctgtgcctaaatgagctgcaataactcacctggagtagaggacatgacaaacaactgctcttcgttttaacaaagaacttggatgtgagacaatctgtgactggcagttgtctcacatcagtaatcataatatgtaccaaacactgagtaggtagaggacatccacacaaaggcaataagtgtcttattagtagatacattttttttttattttgtagatgaggaaactaaagcctaagaagatcaaagaactggtccaacgtcacacagcgctactcagtctctggtccattctgctttccagagaacaaaacccacttgctcactcctgtcagccagaagcctgatttcaagtgttaagacatgtctagggccaaagccttcctgaagtcaaattccttttcacagtctgactttgtgcttgtcttcgtgaagtgaagatttgtgaacggactagctggtattaaagtggaatggatgctcttctgaactcctgtccctgcatttggggaggcatagtcaatagggggattgagatgaacgggtgaagttgggacaacacaaatcacaccatgatccatgtctgctagaaatgggctgttaaggcttgtagtgaggacagaaaaatgatattgttattttgcaaaaaggaatcttaaaacactgctctctacccaagtggttttatgatcatcttcacttttcttttattttcttcgagatggagtcttgctctgttgcccaggctggagtacagtggtgcgatcttggctcactgcaacctccacctcctgggtccaagcaattctcctgcctcagcttcctgagtagctgagattacaggcgtgtgccaccatgcccggctaatttttttgtatttttagtggagacgaggtttcactattttggccaggctgatcttgaactcctgacctcaggcaattcacccgcctcgtcctcccaaagtgttgggattacaggcatgagccaccgcacctggcccatcttcacttttcactctaagtttggaatcatcaggcagcagaactgcacagtgccttctgagcacactgtcttgcctcatgattaagactgtgaagtggaaagagcaagtcaggggacaggtggactgagcaagggtcgtgggagcctcatggaagccaccccagctcttacctcaccaaccattttcacatcttcccgcccataccagtcaggctcatagacttcatgcagcgactctgtgagcttcatggaggcctcctgcatgcctagtgttggagagaaacaactcccgttacacagaaatgagtgaggattctcttctcccttcctccactttcttaagtgagagaaaaatattgtacttgctaaacatttaaggaaaaactataaaggcacaactgctgcttgtatctgctgttgtatctttctttgagggtctctaagacttatcacattgcacattttctattattcacttgataatgatagatatggggtctcgggaaagatcaacaagtatcctactctgaaaactacaataatcatagtgtgtcctattacgtgtgctatcacttgccaagtggtatcagatgctaagaacactggtccataaaactgcagagttctcaaactaaaattagtcctaaatgaatttaaatacatggcataaagcatttttagaagggactagaagtaaaaatcaataggattatagggcataacagtcaaaagtggttaagtggcctaaaatggtaaacacggttaaagtggttaaatggttaagttttaagtggcctaaaatttttacaaagaacaaagaaaaaaagtttgtcattttccagtatagtaagtccttacttaatgtcatctataggttcttgcaaagtgtgactttaattgatacgatgaataatgaaaccaattttacccaaggctaattcatataaataagagttaagttaccaggacatatttttcgtcacagacacatcacaaaacttctaactaaatgtcaaaacacttctaatattgaacattgaaataaatgagagcagtacacacatttaaggaagattaataaaaacaagtaagataattatttacttacttactccagtttagggtcatgggtgaccagatcctctcctagaggctcagagcacaagatgggaaccagccctggacaagatgcatatcatcgcagggtgcacttacaaacccacactcactgacatgccagtaaacttcacctgtatatctttgggacgtgggaggaagtcaaagtaccgagagaaaactcagtgtacaaattccatacggacagtggccctggctgagattttttttttttttctcatcattattgtaacaaaatgatgttgaatgaaacaatgctatttgaagatctgctgtattatttaaaactatgaatgaagttttaaatcaaaactcttagaaattttagggttcctaagcctttgggtctgaattttcattagggatacatttgatatgttgcaaaactatggtttgcaacattaaagaatagcattaaagatatatgcttctgagcacaacatggtgacataaagtatcacccagtccttttagtctctcccaaggaccccctgcacaaaggttaatgaatgtactgaaaagccacgaagacagctcatggctgagagcaaaacaaggggccaggaagagctggggacttggagatgcgcctccggcagaagactctccccgacagccggaaggtgggacctggccacattgatgtcttggcctttgtcactacgggggataaaagggggctggaaacagggagaggagaggaaaatcagagcactgtcatgagaaataaaaaacacatcctgtaaacttaaggtcagtgaatcctaagataaaaatcatttgttaaactgaaaactcaacattcttgctggattggaggtagctaattctgggttcaactgtgagagaaaaggacaaactaaaagatgtctgaaatgacagaagtacatccttgaggagtatgtataaaagtccacatgtaacttggtgtttcatagcacttgtgctctctttagacacagccaacatctcccttccctcagagcatcgctgggcacattccacgaagcccttgacaatgaggtgtcctgcctacatgagctgaagagacttgaccaccatcggacgaagcccttgcagagtctggggtaggaaaaaaacagtatgactcaagactctggggactctgatgaaacagagtcgtgcaggtgaagggacagcaaataggagacaaaacctgaatccaacccatcgcactctgaatccaagcaaggggggatgcgttctctcatgatatggtcaacactgaggtggaagctacattatgccaagtgtccaaattcaccctcacccaagtacaagcaaatctctatcaagaaatatacccctcaaattcataacaagcgttagtcactagtggacccccttctataatccagatgccaaaaaacttctggcattttctttaaatctttgtcttaagtctgatggaaactatacacaactgtgtagataggtttttaacaatgtcttaagagaagaaaaagaaatttggcactgtagaccaaataatctttgtgatgaaaaataaaatcatgaatataaccttaaaataaaattatataagattttaatcatcaagactaaaagcatgatgttgcagtaaatatgtctattagcagccaaaagaactactaattacagggtggataagtggtgatggatcatttggacagaagccattttgacatggaaattgttttgagaacatctactccataggatgcactttgatggatacacaggtgaaaggcttcaagcctagctccagactggcagagcttttagggatttagggattactcttctgacagagtatgatgggcgaaaaaagctaaaatacaagttctcttcagagtaatttggaacatcaaagcagaaaaggtgctaaatgctacctccgagattgaataatatacaatatccaaaattttcttaaaagattagtgatttctaaaactgtaagacaaatgcccagcatcatatacagaagaattattattattttactactggatgggaaccacttcactcttttcaaaattttggaccttctccaagacatttcatataacattgtctattcccatttgcagccaaatttgtgagcttctattttcatcctttaagacttgttgcatagattgcactactttataagtactccttgcttaaatagcctgagagtatgtgttttagttaaaaataacatcagttaaaataaattacgatgataacaagcagcagcgataaaccattaaaagaacgtctaaaatactgcaagtatctagcagctttgtcccattgcttagacgagagctgtgtaaaaagacagcagctgcctcaaaggaaagcaagagtgggcatctttttcttagattcttaaggagagcaaggatgggaacaagagttggaataaaataggcagttggtgaggtagctcaagaatagtcaaccctaccccttagtcatgcctacacataagacacataaatgaagaactattaatgacaccacgtgcactgtgctccatttagagaaagatctggcatgttcatcatccctgtgtctggcctctgctgcacctgcatgccagtgactcccaattctaaattcctactggacatctccacttggatgtcttactaatacctcaaacttcacatgtcaaaaacaaactcttaattttcttgtccaaacctgcttcaactccttttctcagttctcatgaatgccatccagttgccccagttcaaaaactagaagttatcccagattcatcctcccaaagctgagtcaccaattccacctgattcttaaatctagccccttccttccctgcccactgcccttccctggattagatactcatcacctacgatttagattagataacctaatccacataacacgatttagcaaagtagttggcacaagcaaatgtccaactgtcagccatcacaatacaaaatatttttggaggcaacataacaaaataattaagactattatttgcaattaatcagcctttgttaaaagcttggttccattacatgtgattcatgtgattttaggcaaattattaatcatctataacctcagttttccaagaggtaaaatactaataaataaacctgccacaaggttgtagggaaaattacataaactgagacatgtcaatgcttatctcagtgcctagcatataagtgctcaataaatgttagctaatagtattattgaactattggactaaacttctactaaatctccatgcaatttcacttcttctagcctgaattccacacaatcacaataactatttttctaaaatgctaatctgatcatgggacgttttcccttgtctacaataactctaacaatgactctcctgtctattgatagaataaaatccccatatgatatgatacatgaagcacttctttatataaatgctgctgcctttccatgtttcatccagctcagttttctgcttgcatctcactgctctgtttgttccctcaagaacccgtgcttccttctgcttcctggcccagttgtttcttccacctgcaatgtccctctgaaatctatctttctctagaaaacctaatgacttgatggccacctatgaccccacttcttgggttcattcaagtgtaagttccttggaacaaccattcctgccccagtctcttgcctctcctaaggtgtgaatctgtcctctgttatgatggcactcaatgcacgtatctattaaaatacatattactatgcctatctggcctttttatttaagtgtcttctcactctgctgtgagctccttgcaagcaggcactatgtcttgttcatctctgcatctccctctcctagaacagtgtcaggtgcacaaatggagctccagagatgtttgctgctaaaatgaatgcaagcataagatctgcctcacaaagcctaagcatcagcagaaatcataaagacccatagaggggaagccacccagagatcagtcacaataaaatgattagaattcatttaacccaacttcacagaatcccagttttggggcctttaggggcttctgagagaactgaaacatttaatagatgaggaacccaaagcaactaagaggctcaatgattttcccacaattgccccaggacccatgaccctccagggccaaatatcactttctcctatgctgccctgatgctacctgtgttatagcaggattagtgagccagagttgtccttgggaaaacaagaaaaattgcccatgaaagcctttgaaaatgtaaattatgatctacttaaggcattgatatggtttggctctgtttccttacccaaatcccatcttgaactgtaataatctccatgtgttgtgggagggacctggtgggaagtaactgatcatgcgggcgggtttctcccgtgctgttctcgtgatagtgaataagtctcatgagatctgatggtttgataaaggggagttcccctgtacatactctcccttgcctgctgccacgcaagacatgcctttgctcctcctttgcctttgccatgattgtgaggcctctgcagccatgtggaactgtgagtccattaaccctctttttctttataaattacccagtctgggggcatgactttattagcagcgtgagaacggactaacacaggcatataccttgttttcaagtttggtcccaaaacccaaaatgtgttcccaggaacaatattcattcttcacgaggctttgagaagagagaagggtcctgcagtcaaataacttggaattcctgcctgtcccacaggacttctgagttgactttagcatattaagggctctgagaaactcagtagtagcctgtttaaaaattcattccaatcagctgtggacaaagtaatttaagcagagatctcttttttggagcatcgcttgttaacatagtcaatcagcaaacccaagatggggaaaagctgatagaattcctttctccgtcatatggagctgtggccactagccctggagtgcaggtgccgtctgccagaaaggcttatctgatgcttcacccagcttttctctggagctcaagcctcatcctcagggaattcttctagatcacattaaggaaaagaattatgccagtctctataagcagcacgctccacaccaaagaggcagcatagaccaaatcaaatagacttgggaaagagaactcactctttcattcaacaaacttatccacattttcaaaaaaatcaactaacccagaaaaagtcctgtgcttgaaatgacttccgtgttcaaatcctaaatcaataataaaagaaatacctagagtggcttctattttctgactgaactgttacaaatacttaaggttgatttgggagtaattaatgatgagctccatcaaactgtggaagttaaattctctgagacttacttctttgcaaatgtaaaatcaagttaatgacattgataatatggctatgttgggaagttagaaacaggtaatatgcctaaaatgcttagcacagactctaacacatagtaagtgctcatgaaaaagtaatagtagtaggttgccattattccattgtatagatgaactctgacttgtgaaaccaatgccttaccattggtcacgtagttcaaaggcagtaaaagacagtagataaaaccagggctctggagaaacacagaacgaaatatgcaatctggccctgttgtttccttggcatgcaaccttggatgagctatttaaactctattttaaaaaatcactttttcttttcctttttttgaacagggtctcactctttcacccaggctggagtgcagtggcatgatctccactcactgcaaccttcacctcccgggttcaagcaattctcctgcctaagcctcctgagtagctgggactacaggcatgcgccaccacacctgactaatttttgtattttcagtagggttttgccatgttgcccaggctcatcttgaactcctggcctaaagtgatccactcgcctcagcctcccaaagtgctcggattaaaggtggtgtgagccactgtgcctggctgtaactcactttcttatctataaaatgaagataataaaactacctgccttatagagctgccatgagaattaaaatgatatgcctggactataaaattcataaatatcttttagtttaaaaatcaattttgctaatttttattattttggccatttttaaattattgatatttttattatttcattatttaataacatgtttatattcagttctatacatccacattaaaactgtgagaataaattcttagaatgaaactggtatgttaaaaagcataccaaataaataaataaataaataaataaataaataaataaaagattttaccaaatgctctccagaaaagctatcctcccagcaatacatgaatggagtccacttcccagagctttaccaattctaaatatgacagtattttatttgtaatgtgtttgaacatttggaggaaaaatgataaaatcttcttttcaatgctacttaatattatttgattattcatgaggataaggcttttttgcgtttatcatccatctatagttctactttggctaattttcccttagagttttctgcccatttttaatttaaccaactgaccttcatttagtttactcactgagctctttatatcttgatttactttcactatgttgtcaaaatggtgtttttaaaaaacatattaagttttacatacttacgacatcaaatctcttcatctttatggagagatttatgggtttctgccttgcaagtaacccttataaagaccttctctacagcctagagactaaatttactgtattttattctagtactttagcacatttctttgcacagcgatgcatagcagacacacctgacagtgataacttaggcatcccctgagaatcaccctgtatggtagatgcacctgaatatgtgctcagagttctgagctaaggaatctgggagtggccaaccgagagattaattccttgtctacaaggaacacctgagccctgagcctgtcccattgaaggtgagtcatacaggggattgaggccatgtgttttgggttaaacgaaggttgccaggtggaggttgttaggtagaggatgctaagcaaaaatgttacagaaactgcattgctttttgcaaacggatgtagttctcctgcccagcctgccaccacttggctgtgcaatactcctgcccagccctgccatgactgggcccactctgtatgtaagtttcccactaataaaaccctgtgtcttgtttgctgactctgggtcccttcttcggccccttgaacctggtgccatccctactgaagttaatagagtccagtacaacaacatatttacatctttactatatctggaattaggaaggagggagtaaagcgtgaggttgagaatttcactctgttttctaagtgtttggccagttttcccaataccccttgtcagatgatccattctttccccacaaaatctgccttatgatacatcatatccgtgggcacacttggctgtgactcagggcaggcagcgtgatgatggatagcaggcacaggctgagccacctccctattgctctcttctccctcctccagtggcctcatttccttgccttacatggctgagtccagaaactcatgctagggcctctccatgcctgtgcattgcacgtcggtagggatgcaagcgctgctaatccacacaagtcaaagccagtccagggccatgtttgctgatcatcttccacctacctttgccaccatgtcttgccccttccagtgagagggcttaggtgcgtgtctgtgagtgctccactcttggcatgtggtctccctcaggaggtaagccggctgcagcttttcttaaacaaggtctcaagctcactctaagaaattttcctggaaatctctggcatgtgggtggcatttatttctagtttccagcataagggcacacatattttttccttatatattctgattatcatttcaatgggaatttggggcgggggggtgggtggtggaatggaacacctgtgttcaagcatccatcttgccaggaagccaaatggctttgtaattaacactcaatcctgtcactcatgaattccaagaacaacctgtgctaagtaacatgcagtaaacaactcatacacattacctttgattgctgctaaatatcctcggagttctcgctgaagtctggtaccctctgcctaaaaaacacaagcacagatgctaaatatctagtctatattctgcatgaaaacatgtaagaagtgctaagtctcaaagttactattgccagaagctcattcttggaaaaaaacataaatatgtggacacagactaaacaaggcaataatgtccatcagtctagatatttatagaaattttgttccacttcaaagagcaaaaggagaaggcaagattttgctaatagataatacaattcattacacatcttctaattcaagagctatcaaatttctagattttgacacatgggttataatagcagggaagtgatcaccattatctaacatggtagccacaagccacatatggctgttgagtacttgcaattgagatgtactgtaagggtattttccatttacagtgtaactgtattttatacaacatattttagagactgagtaccagaaaaacctcattaattttatatagattacatgttaaaacaataatattttgggtatattgagttaaactacattattaaaatttcatctctttcttttcactttaaggatgtagccactagaaaattctaaactatgtagtttgcattatatttttattggactgcattgaaatagagaaactgttaaattgtaaatgttgacatatgaatgcctgttttggtttggatacttttttagaaactccgagactctctgaaactaggatgagactgcaaatagtttaatttggagttagtcaaagaaatgccaataggagagtagagaagtgaggcagagaagggaagatagctgatacagacagcgttatcaagcaagttaccactgtgggcaactggacctcagttccactcgggaactctggaagacagtgtcaatgaaacaccctatagataccctaactgaaaggcgaggaagctgaggcgtttatccaatatctcctgtcagctatgtttctagagctgctcctaggggacattaattccccaatatatctatatagaagcagagagggctccagaaaccagagaagccctcaggcaaagagttgccaatgctggcacgtcagtcttgtgggctcagaaaaaggtactaggggcatatgtctgagcaccaacagtagctgctatgactctacaactgaaagtcgatttaaaacatgcatgcattttaattgcatagtcatttaacaaaattgcagagagctagcatacaggactccaccttgagctcaataataggacagcaacttcaatagccatgttcaatttaacaaacattgttagtatttgcccaaaagagtggtggtggggggaccctctttcctcattataatctagtgggggagctaaaatatataagcaaaaaacaaaacaattgcactgcaaggcatattacatttagcattgcaacagccattcaaagtgttgaagtacaaaaacaaaatgtccatcacatttaaagataatgattaatacaaataaactgacaagaaataattaagactatgcttgacggcaaaagggattctgaattaggatattttccatataacacttgcattgtgcaggtatagtggcattatttccttgaaatctatgtaacactcaggtgaggtattctgtatttgagttaagctcaggttatttttgcagctctataaacccggttactaccagacaaaagcttaggatgagtccatttgctggcacgtatgaacttcaaacagaatggttctattcagaatggcaaagcagaaatcaaagtgctaaacaattgactccctttctagtgtctcaacatggttttaaatcaaaactcaaggtttctattcccttgttgaaacatgcagaaagtttgtgtgatggcaaacttccatcagctagagaaaataaagcaaatcatggtggggttccaaacagcaaagtgtagtagaaaactatttccagagagaggaagaggagaataaagagaaaatgctgatgataaacacttgagtaaaagcagtcgatgaagaggacccagagaagtcaggatgaagttctcaataccaccaagaaaagcatattgcaacaaaagaagtgggtctttcccctactaaatatccattatatgagagcattgtgtcacattctgagtacataaatagtggaaaaaatatggctttggtagattttattgtcaatctatgctgcaactccctaccagatctgtcattggagaaagatcatacttcctgcctcagcgacatcaggcttggctgtaggactgtagacaatgaaacttaagtggaagtaacatgtgctactttcaagctgaagctataaaagccatcacatgctcctgccatttctttcctctccccatacagaatttgtttcttcaatctggatcccagagtgaagggaccacagagcacagccaccacctgcattttcatgagtgagaaactaacctctgttgttgaaagccactgagatgttgctaccatggcataacctagcccaaactgcccagtaaaatgattcaccatcaacagaggaaatgctgaaatgtggagagaggctgaaatctaaccacaacaataaaaagcccaatagaattagtgaacagaaaagaaataaaagcatttacagaaacatttcagaaaaatcaaactggaaagatgaaggacaaactgaacggttcacaaatggaagcccaagtggtggtcaagcaacggaaagagatagaatggaactgagagagaagcaagctccagaatcatttgtcccatcagatttcagataatttaagagagaataatatctgaaatttacctggacaaatatagacccaaaccaatctaaagcctaaaagccctaaaaggtacaattaggagggcttgaatccattaaggccacatttctcaaactagataattgtagaatctgggggcatttagtggtttgtctagggcacatacatccacaaaacaaagctaaaagatctgtctggaacatcaatttattgaggtgaagggaaagaaatggaagagaaaccattattttacaaccactaagccacctcttaagaagtcggataaaaaaatagcatggggatgaaacacagaacttcacagatttctgctgctttcagctgtctgctttaggattctgctgtaccagtcatggtccttccatggaaatgtgtgagggacaccgagttaagcaaggctcacttctcacccagaaggatgtgttccctcagttatacagagccggccatgaaaagggatggttatgagtcaccaggattgctcagaatatccagaaatagcaaaaaagtagcagggaagggcattcttttctcaaatgttcaaggaacaaagttatgtgaaattaaccccacaattaactaattgccttttccttcagtagaaataaagtgaaataattcaggctccaatccatatactggattcatcttgtcgaagggaaacactgcagagtttttttttaaatgaaataagaaatctagaagagattttttatataagagtggaacaaagttcaaaattgtacaataattgcttaataaatgagttcaaattaagcagataaactaaaggctgatttaaatgactttcttcttttccaattattaaaattcttaattttccccatgagtatttcggtttcatgaatcactcagtaatagccacactgaatttcatctaaaattctaccttaatcaaaaaggtaaaaagctctggagaaaaatcctccacctacaatatgccataaagtagtttctcctgtacaaaacttattgcacaataaaatttccttaagattgttattctgcaggaatagcagatgtttgaaattaaacaaattcttataacattgctcagatttcactgaatttgaagctgattccaaatccctttgtaaagtatcattttagtaattcagccgtgaattatgtattgcacatgtgtgtgcagaaaacaaagttctacacccttgagattatatgcctgtattttcccttcttgtttctttatatcattttctacaagacatcaggaaattattgttctatgtcctggtcacagggatcatggcaacaggagggcaggggagtctattataattaagttgtctgaattgcctagtaatactccttcttagagaagatccaactgcatgaaggtgcaacgggtgtgggaaattattgagtcaagctgttttttgtttagatacactaaattctgaagcgctgcaatatattaatattagtaaatacatatgccaagacttcaagagtctttaaaaaggtataattttgttagtttacctttaactcagttatttctgcccagaagaaaggagccatagttgaggcattaatttaatttagttgtggacaaaattcatagaatgaattaatgatttctaaggaactaaacttagggcagcagcaaccactgcacaatttaggggcaccattcccatgtactacctactaccatgtgcatgacaccccggggcaggggtgtgcatcactatggccccaaatgcacaagaaaaaacaaaccctgtggattttattattaaggttaagcaggtctggaaaatatctcaaagcaataggagtttaatacctgttaaataggcaatggcctgttgaattggcttgttaatatatggtcagtgtagcactaacttatgtttataagtaacttttgttataaaaagaaaaagaaagacaagaggaagaaaatatcacacacggtatggaaaaatttttcattaagttgcctctccaactcagaaactgtaagctgacattttgaaaagggctcaggtggaaagccagcagtactaacatctgcatgaaaggtggatcttaggagacataacttcataaagttgcaattttacaaaggtgagtcctgtcatctcatctgtgatcataagcctatagacattcccagagttacattattatttttggcctttgatgacatttttctcttgaaaatggctgaagtaacatatcaaaattaaaactggctcaatttctcagagttcagacaggttaactcaatcttgaaagcaatgataataaacttgctgatcatttttgaagcttagaagaaaattagattatcaaggagatgagatttaatgaggccataatcagcaccttgattaacagatgactaataacataatatttgaatccacttatgatcaaagacattaggccactgagcactacaggcactcctggcttactaagaaatagagctctccctatgaaaagttcaggtgctgttaaatgggaagatgtaaaagcgcccagggtctctgaaatttacatttctgtttccttgctttgagctctgtgcactattggagctgtctgtcattaagaacccagcactgacttcataaaacaattcctcttcttttatttctttttttcacagatattaatgcagaagatacaagataaagatgaaataagactggatatttgcagtcatattcctgggatgatgaggcagggagtgcatggaaggaagagaaatgtcaaagagaacatctcagtttccacagttttatccaagattcgtggcccaatttccaactatccctgtcaccaattccaggaatatctacgatctgaagactgatgatcacatactttctagcttcaacaaaacaaagttagaaatctagctaataatcatatgtacaatctctccatttatttcccttaagccaactaacttttttgagtttatacagatctccattcggatcttctggaaaagctaacccatagtgtgttaaaccgccatcaaatcatcacagcatgcagactggatacagctggaagatctgctttattgccttgaatttgtgacccttgaaaaaccactcagttgtttttctctctgtgtgtgaggagacttgacttataaggtgcatcatgggcattatttaaaatcttttcagcctttaccttaatagctagagcacagtatttaatatactggtaggggagaagcacggagagctgacccaaaaatcaagggcgactttaaaggagccccacttccagtagcaactcctcctgtgacttgctgttcggtgtctcctgctgtgggtatagatgctagctctatctataacattctatcgtgaccaaatcagacagcacgtacaaggactagaaaaacaactgctgtgtcaaggcacagagatgcactgatggtagagaaggaagggccttagctatcattactccaggcctaatcaacagccagaatgtttctgaaactgccatttatgatgtctgtattagtttgcttgggctgccacaacacaaaaccacagaccaagtggctttctcacagttctggaggctgaaagtccaagatcaaggtgttggtaggtgcagtttccccccgtggcctctctccttggcttgcagatgaccaccttcttgctgtgtcctcgtgtggctttttgtctgtgtgcgtgcgtccctgttgcctctccctcttcttatgaggacaccagtcctgctggattaaggctcacatatatgacctcacttaaccttaatcacctccttaatggccctatgtcccaaaacagtcacattctgaggtactggggattaggaattcagctaatgactctgaggagaacacaattcagtccatgatgtaacaatgaaagtttttgatctggcaaaataatcacaaagtctaacacctactgagtggccactttgatccaggcatggttctaagtttcacaattctggtagctcatactcctcacaataattgcatatggttggcacattattatgagaaaacagaggcacagaggctgagaacttgcccaaagtcacacatctaataggtggtaagccagaattggaattcaggcaggctgagttattttagccgtatgatccgcctcaagagcccaccagcttgacccctgctctcccacctctgtgccccaggctgtaaaggatgatgaaggataaagctgcccaacaagaagcaactgttgataaatgaggataatgtaaccaaaggcaccattctccatgctctcaggatacagtcctcatctgtgaataaagatatcaattgttcactagtttttctcaaagtcccataattccatggagtttattccatgtgattcatatcacagagtggttaagtctacaggctctgagatcacacttcctggccttaaaatctgagctctgccacttctaaccatgcaacttggggcaagttacttaatctctctaggcctccgattcctcatctattaaatgaggatgataacagtacccaccacctagagctatcatgaaggttgagggagacgagttacataaagtatctgctgagtgcctggcacatatcatgcactcaggaaatgctggataacactattatcactcaactaacactttgtaaatgataaattatgcaaagggtaggtgtttcataaatgcttgattgaccgaagttctgctacatgtcatactgcaaacgaatatcttcatgaggaagatgcatgatgaaaaaccctcccaaaacaagctacttgggaatttataatgcttccttgttttttcatttgtacttttaagtatcaaagacacagttatatttttcagaaagttattttatagctttgaatattgcagtaatagaggctcccagagtatacaagaacaatttatgcagatgtaaaagaaccaactaacaatggatatgagaaaaatcaacggaatatgataaactactgcctgaggaaacaagaaagcatgaatactaaaggaaaaaagaataagttcatttccaaaatgaaaatttttatgacagatactcagttttctcacgtaaaacagaattgtaattatggattgccatgagaatcaagtagataatatacaaaacgctttctaaatgtcaaagtcctttgtagaaagtcttcaatataaaaatactttgtcactgcttttgcctaagccagtcaaataaggcttggaaatttggaaattgttaaagccccttggaagattcttataactaatcaggtttgggaacatattccagcagatatgcaatcaaagaagccattatctttattatatgtgtgcaatctcaggcttatatccaagtggttaacatcatagaacgactctttagagacacaagtcaaatgtgtgacttgactcataagtctgaaataggacccaagaatctgtattttaaaaagcctccaggtgatggttattgggaaactttaatttttttcactgtgtctgtcacttaatggacacttaagtgtgtatgtagctctagtatgagatccctaaaaagacacttaaaaatatgtctggttccaggtttcagtcagtcaccataagacattccttctagtgtatgtccttcctttagattgctatgccaatggcaaaatccatgttggggcttacaaggtgacttataagagagaatcaccatcaatgggaaccaataaaactcatgcaaatctgaaaaccaactgcagctcatttctgcagttgttcaaaaccatttccgatagtctccctgggcttggatgagagatatgcctcattctctgcatcccattaccagaatggtacagtcaacctgggaatcattgagacagatgcatccaaactaaataatgagtttaattcacaaggggaagtggaaaatatatggaattagtctctaaataaatgctgaggaatgggactctaaaccctccctagttggcatggttaattaatattgtagggtaaaatgcaactaaagcgggtaacagaataggacagataaaaggaaaccatcagagaaataacatgaagagcttcctctaggagtgatttcttaaactggggacaggcttcataggaaatggcacagtaatgtctgtgacatctgcaatttgactgggtcaatttttagttccgcttaaattaaggcttttcatttagataggccagaactgaagagatgctcttactgatgaaataaaataaataagaataaagaggttaacagataaacaagttaaacaaatgtaacaagtttttgttttcttcctcctgtctggcaccatggacagcaacaccctacaattcccatgaagtaggcagacttacttgccagtgaggaaagaggagatttattggatgtgatggaaatgaaataaatagaaagactatagataaatgcagaacagtttgaaaagcaagggccgttacattcttttgacacctacaggtttccactatctgctccctcccacagaagtcaattttattggcaatcatagccgtttatacttatattttaaaaactttaaatcaagattgtgtaatcaaaacacatatttccaataagaataatattaccaaggagagtggcagtcttaactaagagctcagtggccacattctcttgttttttgccatataatgaatacaactatatctaaattaaactaagaatctcatagccaatcacacaacaatttcatactatttagcaagctatgtgaacagctttacagggtgatgatttttgcagaaacgaacaggagacacccattgaacctgggaagtctagctgaaaatgggattgtggaaaggtatagaaatcatttcttcaaagaataccaattgggttgagagaatactcatgcacaaatgacaagtgatgaaactaggatatcaaaatatatcataattatggaagtatagtgacatcatcaagagattctgtatcttttccctactactttaattgcttcaaaagaaagaagacttttgtgcactagaccacaagcttgaccaaaacagaaatttttctctaaattgttcatttctttcagtgccttgtacaatgccttgagtcaatgaagaatccttttgataaagatttgtgtatagggaatttattctctgttaccttaaaaaaagtgtcctgctcctagctcaagtcaattcctcagttgtgtattagatactttctcctcctgcctactcaagggaacagatcagctgttcttccctttgtctgatgaatcaccacattttcattctggtctaaatgagtccctttcacatatttctgccttcttaagaaaatgttcttttgaccctcactccttctcccagctatagtcttggtctttgacccccctttgcttcaaaaggcaaaacttgaaaattgctgcctccaggcctctaaataccattccctttgctctgcttattcttgccttacttggttttctttctatagctctcatcattttctagcagacagtataatctacttagtaattgtgctctatttattgtctgcctccctgttttggaatgtaagatccacaatggcaacgacctttgtctgtcttgttcactgaagtttctggaatagctagatcaattcctggcatgcagaacacactcagtaaatccatagcaaattcatgcctcaatagttacctgctattgttttaaatgggcctccacatgatatcatctatcaaataacctaaaaacttccttaaaagttaatactaagatgaaacactttaaaatttggaaaatatttacacaataagatggttttcaacattaaagaactcctgcagaaatttacagctacaactaagagtatatgctatggtttcaatgtccctgccaaaactcatgttgaaatttaattgccgttgtaacagtgttgagaggtaggatttttatgaggtgattaggccatgatggcttcaccttcatgaatggattaatgccattatcatgtgagtggcctagttatcatgggagtgggctcctggtattaaagatgagtttggcctgacttcttttccgttttgtgtacttgctttcaccttctgtccttctgccaatgtctgagcagatgctgatgccacgcccttggtcttcatagcctccagactgtgagaaataaatttttctttataaattacctggtcagtggtattctattgtagcagcagactgagacggaaaatttataccagaaagtggggctgttgctataacaaatacctgaaaatgcagaagaagctttagaattgggtaatggatagaggatggaagagtttggagcaggctaaaaagagcatttatggctgtgaacagagcattaagggtgattctcgtgagggctcagaagaggagagctataggaaaaacctaaatctccttagagattacttaggtggttgtgaccagaatcatagtaaaaatatggacagtaaaggccattctggtgatgtctcagacaaaaaagaggaacaaggcattggaacctgaagaaaagggaatccttgttatacagtaacaaagaccttagctgagttgtgtccatgcccagcggactttatggaatgtagaaattgagggtgattgatatggtgtggatttgtgtccacacccaaatctcatgttaaacaataatccccaatgttggaggagggacctgttgggagatgactggatcatgggggtggacttcccccttgctattctcataatagtgacttctcatgagatctgattgtttaaaagtgtgtagcacttcctccttcactctcttcctcctgctccagacaagtaagatatgcctccttccttttcaccctccaccatgattgtaagtttccagaggcctccccatccatgcttcctgtacagactgtggaactgtgaaccaatttaacctcttttctttataaattacccagtttcaggtagttcttcatagcagtgagagaatgaaataatatgaataattggcaccaagcagtggggcattgctataaagatacctgcaaatatggaagtaactttggaactgggtattgggtagaggttggaagaatgtggagggctcagaagaagacagaaagatgagggaaagtttggaacttcctagagactcattaaattgttgtaaccaaaattctgatagtgatatagtcaatgaagtccaggctgaggaggtctcagatggagatgaggaacttattaggaactggagcaaaggtcatttgtgtaatttgttagcaaagagatggcaggcattgtgcccctgccctacagagatgatttaaggtatctggtggaagaaatttctaagcagcaaaatgttcaagatttcacctggctgcttctagcagcctatgcttatattcatgagcaaagaaatgacctgaagctagaacttatgtttaaaagggaagtagactgtaaaagtttggaaaatttgcagcctggccatgtggtagaaaagaaaaacccattttctggagaagaattcaagttggctgcagaaatttgcataagtaaaaaggagccaagacaatggggaaaatgccttgaaggcattttttttcagagaccttcttggcagcgccttccatcacaggccctgaggcctagaaggaaagaatggttctgtgggctggcccagggccctactgccctgagcagcctcgggacactgctccatgcatcccagccactccagctccagtcatggttaaaagggccccagagaagtctcagaccactgctccagaggatgtaagctataaggcttgatgacttccatacagtgttatgcctgtaggtatgcagagggcaagagctgaggcatgggagcctctgcctagatttcagaggatgtatggaaacacctggtccaggcagaattttgctataggagcaaagctctcatggagaacctctactagggcagtgccaagaagaaatatgggattggactccttacacagatgccccactggggaactgcctagtggagctgtgagaagagggccacagtcctccagaccccacaatggcagatccactgacagcttgtaccctgcacctgcaaaagctgcaggcactcaacaccagccgatgaaagcagtctcaggaactgtgccctgcagagccacagaggcagagctgcccaaggccttgggagcccaccccttgtgtcagtgtcgcctgaatatgagacatggggtcaagggagattattttggacccttcagatttaatgactgccttgctgggtttcagacttgcatggggcccatagcccctttttttgatcaatttatcccttttggaatggatatatttacccaatgcctgtatctctattgtatcttggaagtaattaacttgttttctatttttacaggctcataggtggaagggtcttgctttgtctcagataagactttgaactgtggacttttgagttaatgctgaaatgagttaagacttgggggactgttgagaagaaattattgtattttaaaatgtgagaaggacatgagatttgggaggccagagaaggaatgatatggtttggattagtgtccccactcaaatttcatgtcaaattgtaaacccaagtgttggaggaggaacctggtgggaggtgattggatcatgggggtggacttcccccttgccattcttgccattctcataatagtgagtgagttctcatgagatctggctgtttaaaagtataaagcacttctcccttcactctcttcctcctgcttcagccatgtaagctgtacctccttcctcttcaccttctgccataattgtaagtttcctgagtgccccccatccatgcttcctgttcagcctgaggaatcatgagccaattaaacctcatttctttatgattacccagtctcaggtagttctttatagcagtgtgagagtggactaatacagtgatgcacaaggatatctggtggaagaaatatctaagcagcaaagcattcaggttgctgtgtggttactttcaactacatatagtggaatgctagagaaaagaaattacttaaatatgcaatttataattcaaaggaaacagaacaaaaagatttgaaaattcacagcctgactatgtaaagaataaaaagcatgtcagagagacaatgctaagggtatagccacgtgatcctttgttaaagagattaatatgaacaaaaagaagccaagtgctattcatcaagacaatgaaagaccccacaatcattctgaaaattttctaggctgcccctctcatcacagtctcagcgctctagaagggctgaacagttttgggagataggcctggggcaccctccaccctccacaggctcactgcccaggacaaccaagggactctgctccccacttctcagtgcagcactctttgcccagcccagctgtggctcaagtggccccaagagcagctcaacccactgctccacatgttacaaatggtaagccttagtagtgtccacatggtgataattctacaggtgcacagaatggaagaactttgaggaaatggcttcttcctcccataatatttcaaaggatttcataaaaagcttggaactcaggcagaaacttgccacagaagcagaggtgtcacagaatctctactagggcaatgtatagtggagccctggggtcagggctgccagtgaaaacatagaacttgtagggccaccagcatggaactccaacccattaaagctgggtgaactgagcctagcaaagtcacgggggcaggacttcctgaggccatgggggcccaaccccagccacagtgtatccggtaaatgggatatagagtcaagggtgattattctccagctttaacgtttaatgttttctctgttgggttttgggcttacctgggaccagttatctctttcttcttgtctatttatcccctttagaatgggaatgtctgtcctacgcctgtcccaccattgtattttataagtagataacttgttttgatttcacaggctcacagctgaaaggaattagcctcaggatgaatcatgcattcagtctcatccacatatgatttatacaggactctggactttgaacttttgaattgatgttggaataagttaagacttctggggctgttgggatggaataaatgtattttgaattgtgagaaggacatgagttttgagggaccaggaaggaattctatggtttgaacatccctgccaaaactcatcttgaaatttaattaccattgcaacagtgttgagaggcaggatctttaagagatgattaggtcatgcgggtttcacgctcataaatggattaatgccattatcatggcagcgagctagttatcatgggagtgggcttctgataaaaaggataagttcaacccaatttcctctgtgtcacgttaacttgcttctactttccacccatctgccatgggatggtcttcatcagatggcagagccaatgctggcaccacatccttggacttcccagcctccagaactgtgagaaatgaatttcctttctttataaattacccactctgtggtattctgctacagcagcaaaaaacagactaagacagcatctctaggtaaactttatttccagcgatgcagacatgcaccaattcacttatagaatactgcgcaattattgagtttaaagattaatggaaatccagtatgaattcaggcaacaaaactcataattacaaaagaagtttctcataccaattaattgatatcaattaaatatattaaggctctctggtaaaaatattatcccataagagaatagtcttactccaaaacccagtatattaaaaatattttaaaattgtacaaattgaagaacataacttggacttaaagacaagaaaaacattcttaggcataattaaaattatttattttattgtttgtaaatgcatgtaaaattcttagaagactgaaacaactgtgtccacagatacctatgggcatcatggaactagggcagcttttgaaccaggagtgaccaaaactttgctctagtctctgtagtccaggttaggatcaagcccaggccatgtcaggcattctccaatggataaaagaggtatagtaaatgacaatataaaaagaggggtgttgacaaatgcactcacatgttcattgcagtactattgacaacagcagatttatgaaattaacctaggtacctatcagttgtggattaaataaataaaatgtggtacatatacaccacagaatactatgcagccataaaaggaataaaattgtgcccatgaaccctctgaatctaagaagttgaaaaataaataaataaataaaaatcaaaaaaataaaaaatcatcttggctattataactcctttgcctttctctctctctctgtctctccccgtatgtgtgtatgtatatatatgtatatgcatataatcttagaatcagtttaactatatctataaaacattctgttggaattatgatttatatggcctaaattctattagacatcaacttatcaaaaaaaatgtattcatctgggaaacaaaccatctacattccaggaataaactctccctagtcatagtatattatcctcttaatatagtgatgacttcaatcttcaaagtttcatttataaatgttttgcatgtatagtcataaataaagtttacatagagtttttaaaaagagggctttgatattaaacgagtgaggcacataatatgcaaagcaaagggtaaatacagagaataagtgtgacaagcaggcaagtcaaaactgggatgtacttattaggcacctagcaagtactagaagccattgaaggtttgtaaaaatgactaaacgttgagtcttcctttaaatattttacaattgaatgagaacatagatacacagctaaattactatcatgtaagaaaactagataacaaataacgtactactgaagtaaacagaggaaaagagactcctgactgaggggatggggaaaataccactagaatattccttgtgagttgaccttaaagaagatgggacttgaacataaggagatggcagatccgggaaggaagggcagtcaaatcatatggaagtagctgcagtgagggaagtggaaaagagtttgaaagccagcaattcagtcccaaaattacactatcagacatagaccaccaactattcactgcaccaacttcctttctgcctttaattacatcagagcatcttaattcaaatcagcctccttaacgggatccctaaagagaaaagccatttacttggctgataagcagttgagctctgccaaaaactaaaaggggaagtgtgatcaaatccttagggatggccaaagaaagatttagtactatgaatgtgagagaaagcccaaagcaaactctaggtacaaataatttgtgtcctatagagtgggcactgaacaagtagaatttgctccaagtcatgtaaatatatattcttaagagggtatcttaaggaaactaccccagacaagaggtcagagatttttctgtgtaaaaatgtatgtgtgggccgggtgtggtggctcacaccggtaatcctagcactttgggaggccaaggcaggtcgaatcagttaaggtcagaggttcgagaccagcctggccaacatggcaaaacctgtctctaccaaaaacacaaaaattagtcaggcgtggtggcaggcacctgtaatcccacctactcaagaggctgaggcaggagaatcgcttgaacccggcgggcagaggttgcagtgaacagagatagcgccacttcactccagcctgggtgacagagcaagactctgtctcaaaacaaacaaacaaaaaagtatatgtggagccagatacattttttaacaaatgaaaaaaggtagagagatttttggaaaagtgcagattgagtagaacatacccctccatgcatcatctctttttttttaatacttcattaaaggaaaggaaatattatcatccaccccattcctatgttgctttcttgatctacagaattttcattctctgttggagggattcccatcccctcagtcaggagtctctcttcctctgtatacttcagtagtacattctttattatccagttttcttacatgatagtaatttagctgtgtatctatgtatctgagaccaggacattcagtaggcgcttcccatgtacactctttgctgaaatgtcaccagacattgaaaattctactgagatttccctcagtggaacaggggtaattaaggccaaatctaccaccctgtgaaatgtattactacagctatcataggaaactcctgatgaggtagagtaacactggttacaatgagctgcttgggatctgtggggtcactgcatgaggtggagaaaaaagagacctcaagcaaggatcttgtacttccaaaaaccaagaaccacattttaattcttttagagtaaatgcaaccaaaccatacattttatattgataactgccatcctattaaagcctaaaaagcaaactgctcgctaagttaatatggccatatattaactgttaccttttcctcggggcattaataatgcttatcctttagtacacttatatgtgtaataatgtttgtatgtttagtattgttatagcccatgggtcaaatttgttctattgacattgatttattttacagactccattatgaaattgaattaggtgccagtattttaaacaagcgggatacttcctgtgatgcacaggcagagtgagtgagtatagcggggagactctcagaaggcatggtgcaaggagtgagggcagagagaatgcagcaggcataccatcagcaagtgggaactcagctacggtgctaagcgggcagagattcttggtcagcaggcctccagaggggagagaaggggaaagtgtaggtgggtatgaatcagcctacagctagagagctagagagcaggggaccctggactggtgcagcacaggagacaaagagatggcccacatggtcaggaggctggttacataagggagactgcacaaataaatatacgtatattgaagataatgaaagcaggtttctcactctcaaagagggaagtacaaatctagaaagggggaaggcccagccaggcgtggtggctcacgcctgtaatccagcattttgggaggctgagacaggcagatcacaaggttaggagttcgagaccagcctggccaacatagtgaaacccccatctttactaaaaatacaaaaattagccgggcgtagtggtgggcgcctgtaatcccagctactcgggaggctgaggcaggagaatcgcttgaaaccagaaggcagaggttgcagtgagtggcgatcgcacctctgcactccagcctgggcaacaagagtgaaactctgtctaaaaaaaaaaaaaaagaaggtgggggagagcccaaataaagcaggagacactgaactgcagttggaagggtcacggtttcagatagatagataatatagatgtctgtgtgtataaatacttgtatatacacgtgttgtgtgtgtgtatacacacatatatatcctgtccacttagaaggcctagaagtatgataccctagaaacaaagaatatacctagaacccagatcttggtttctaaatcccagtctccaccaaaagaaaccaggatttcttggaaaaataactgattccaagctattttggcaagggaaagcacaacaagatcctgaaacatattgtaccaaaaaggtaaaaatgttgtcagagaatgatgcaggtctgtcaaaaggacaaaggagtcaactcctaggagcttccactggctaaatttggaggaactgcactccaaaatgacgaatagtaatgtattataacccagtgaataacataggaatccataagtacatgctgatataattaattaattaagaaagaaaaatttttaccaggagtgagggcagagataacaacattttgcgaaatgattgtacaatgtcacaatactcaaaaattttaccactgagtagaatgctaattaataagtttagaaggaattcaaaataattcaccatgtagcaagcatcagagtaacagctgatttaaagaagtagcactagtggataaaactagtaggtgacagtttgatgagaaacaggacatgtacagtctcaaactatatccccacaaaatatttattaatattacttattaaatatttattaattttgagagaaaatatttatgtattaactctatactagagatacctggcagatatcatcttatcttactagagatacctgcatatcatctgttgagctctgccattacaaagtgataaaagttagcatcactagcagtggcacaaattaacatgatgtgtgttctgacagcatacactgggcatcactttcttctgtagtaatcttcccagaagctaattattaacacgaagctaattatgagaaaagtatcgggcaaatccagagtgagggacactctacaaataaacactgggcagtactcctcagaagtgtcaagatcatgaaaggcaagaaaacactgaaacactcttccaacagagttagtttaaagaaactaatgaaacctgacaattaggggcaacaggtgaccctggattggatacaggccctttaaaaaacacaattagggcatatgttgcaaacattttctctgggcctctaacttgtcttttcatccccttcacagagtcttctgcatagcaaaagttttgtcataggcaaaatttggggatctgcaaattagatggtaatacgggatcaaaggtaattcactgactttgacagaaggaactactgctgtgtaggatagtgtcgtttttggatactaatggatggatggatggatgaatagatggttggaggcatggaggcatggaagcattcatatatagatagaatgatacagtaattgggaagtctaggtgaatggtacacagcagttctgtatactattattatagctttttgtaaggttaaaattacttctaaatttaaaatatacaaaataaaattgggaacttttattacaatatgaatttaatcttttcttgaaaatctgatgtggcaatatggggcccacatcctcctgagattcgtgtgcactggagttgacagctgcttctttaggtcccatgaatcctataattcagcacagtcctcaccactccttactgttttataccttgcctactcagcttgtttatgttccctgacacatcttggcaagaatgtgagtctgtggcttctgccttcaagtgtgtttgttctgacagaggcagtgaggcagtatgctttttctaggtaagcctatgaaaggggatatattttaaatgaagtttcaatgatgtaattatggaatcatttgcagttgtgtgtgtgtgtatatatatagttgtgttacttgtgtgtatatatatatatagttgtgtatatatatacacaatcttatatatcatctattatatataatatatagttgtgtatatatgtagttgtgtgtgtgtgtgtatatatatatatatatatagagagagagagagagagagagagagagagagagagggagcctttgcatcctgtactcagtcttccttcacagcgacattttacaaaattattgtacaatgtcacaacatagatgcaacctacccatcttattcagcttctcccagttttacctgtactcatttgtgcgtgtgtgtgtgtgtgtgtgtgtgtgtgtgtgtgtgtttagttttatgcgattttaccacatgtgtaggttcatgtatccatcaccacagtcaggatacagaactttccagtcaggacaagaatcccttgtattgactttttataaccacatcgaccccaaacccccctcactcactcttggcaaccaccaaactttactccatttctgaaattctgtcatgccgaaagagtcacataagtggaatcccacagtataaaaccttttagaattggattttttcactcagaataattccctggagattcaagcaggctttggtgtgtggccgtagttattttcttttcattgcttactagtattccatagtatggatatactacagtttgtttaactattcaccccctgaaggacatctggggtgttgccaatttggagctactataaataaagctgctaagggcatttgtgaacaatttttttgtgagaacatacattttcatttctatgggataaatgcataagagtgcagtttttgggttgtatggtatacatgtctaattttttaagaaatagccaaactgtttcccacagtggctatgaatcatttcacacaatgtatgagtgattcagtttctccaaatccttgccagcatttagcattgtcactagtttttattttagccatcctgagagatggatggtgatttcttgtgtggttttaatttgcatttctccgatggctaaataggtattaaaaatcttttcatattcttctttgccatccacatatctactgcaataaaatatatattcatggtttcttttctttttttttttttctgagatagagtctcactccgtcacccaggctggactgcagtggcatcatctcagctcactgcaacctccgcctccagggttcaagcaattctctcacctcagcctcgcaagtagctgggactgcaagcacccactaccatgcccggctttttttttttttttttttttcagtagagacggagttttgccatgttaaccaggttggtttcgaactcctgacctcaagtgatccacctacttcggcctcccaaagttctaggattacaggcgtgagccactgcacccggcctctattcatggattttgcccattttctaatggaactgtttaacttatttttactacggagttttaagtttcttttacgtattctggatactagtcctttcttggatatgtagtttgcaaatattttctcccagtccatagcttgtcttttcattctcttaacagctcttttgcaaaggaagtttttaatttggatgaggtccaatttatcacattttcctcttttgtattgtgcttttggtagcaaatctaagaactctttacctaaccctagatcccaaagattttctcctattttttcccaaaagttttaaagctttatgttttatatttaagttcttgatatactttcagttaattttgtataagggttagttttaggtcaaagttcagttttttggcctatggatgcccagttactatggcaccgtttgttgaaaggttatctttcttccactgaattgtttttaaacctttgtcaaaaaccagttgagcatatttgtgtgggtctatttcttggttacctattctgttctattaatctacatgtctatctctctgccaatacaatgtcttgattatttcacctatgtggtaggccttaatattgaaaagaatttttcctcctactttgtctttgtcattgttttaattatgatagggtctgtgcatttccatgtaaattttagaataagtttatctatggtcataaaaaacatgctgtagaaattgcaggaaattgcattaaacctattggttaatttggtgacaaccaacatgtttactgtgttgaggcttcaaatccatgaatatagtacatctttccaagtatttagttctttttgatttcagtattttataattttaagcatatagatcctgtatgtgttttgttaaatttacacatatatatttctttttctttggagtgattataaaagttgtgtttttaattttgatttccacatgttcattgtgagtatatagaaatgtgattgatatttatgtgttgatcttatatcttgtgacctcactgaactcatttatctgttagagtagtattttcgttgacgtcttgggattttctatgtacataattatgtcatctgcagacaaaatgagtgtaatttctttatgagctatacgccttttgtttcctttcattttccttattgtactggctaggacttccacttctacattgcatagcattagcgagaatggacatccttgccttgttttcaatctttggagaaaagcattcagtctgttaccattaattatgatattaactgtacgttaggtttctttgtagatgttctttaccaaaatgaggtaattctcttctattcgtaacttgctgggcatttttattgtggagtgggtgctgaattttgtcacaaattttttctacatcaatttatatgatcatatgatttttttccttaccttgtttatatggtaaattacattgattgattttggaatgttaaaccagcctcgcatatcctgaataaatcctatttggtcaaggtgtataattctttttacacattgttagatttcatttgctgatatttgaaagattcttacatgtaacttcatgagacatattggtctgcagttttctttttttcatactattgttgtctggttttggtatcaaggtaatacagcccacataaaatcaattgagaagtgctccctcctcttctattttctgaaaaagattatgtaaaattgatatcaattctttaaatgttagaattatccagtgaaactatcagagggtgtggagattttttttcagattttaaatcacaaatccactttctttaataattattaaactattcaaattgtctatttcaccttgattaagttttagtggtttgtgattgtaaaggaattgatcccctgtggttgtcaaatctgtaagtataaagttgcttgtattattcccttattatcctttagatggctacagaggctatagtaatatcctttgtttcatttctgatgtgggtgatttgtgtcttttttcttgttgtcagtcctgctagaggtttattaattttattgacttttttccaaagaatcagacttttgtttcatttttttctctattgttttccattttcagtttcattgatttctgttctttttttatttccttccttctgcttgctttgggtttattttcttctctttcaagtttcttgaggtaggaaattagattattgatttaagacctttccttgtttctaatgcaagcatttaatgctataaatttcccttccagcattgcctcggctgcttctggacaagacactttcatttccaaggccttgtattcgctgaacctggttttccagataatcaatttttttcccaggaccctaagtccagagttctaatgccttctataatttcccctattacaccagactatcttaaaagagcttcatgaaactccttctcattaaggtgtgagcagggactttcatttcttaacagggcatccagcctcccggctctacaaccttggaagaagcgagttccatcactacactcaaaaatcatgcctgttaaatatcagatcatcttagttgatttgatctatgcagatcacagataatccagaacatgaccaccaaatctttatccatatttatatccatatttatagacactaaagatagacatcaaacataggattagaagtttcaaggacaaaccagaggaagcacttgtaaaaacttgcatgagtagatacaatgcattagtcctcaatgtgttgtccctggatcagcatcactggcatcacttgggaacttgtcagaaatgcagattctcatgcctcacctcagacatcacctgcattgaaggcattggtacagcacaggctgctgggtgcgacctgctgtaccatcaccttccaggtaacttcaaggcagctaatgtttgaaaaacactgctctggagggcacaaaacttgccagcttaggttcttattcagaatccagaaggtctagtaacctgacaggatgctgtgtagggcaactgaggctctccatactgccatttagaattggatcattatttaaaacagatctgatgggatcacatttaatcaaggcagtggctatctcacaagaaggtcaagattaatatttaatgaaaggtagatacattaatatattcacatcatggttatctgtggcaaaaacaaatgttctaaggtatatgctaggcctatctgctcaagcaaattgcaaaaagcttctgaaggtaagtataatttatcgtaaattaaaattttatccacacattaacatatatactgtggcagtatatttttattttacactctttcttaaaacttctaaaatttttctctttagtcatttatatgtacatataccaggttcttaaaaatgtcacgaaaccgcttgcaaaaatacataccatatacaacatctcttccatcccagaaataaaaatgtactccaggaatgcactcaaagtgataatttctgccactagttcagcttcaagtttagcaagcatttgttaagtttacttgcaaagcactagctcccatggaaataaaaacatagaagcagcaaaacaggatcgctgtgtccaggaggtgtgagttcagtctaaggagaggacgtggcccagctttaaacatctgctagagcatccaactcatgggaggctggtctgaattctcaccactggagaggatttcagggtcccagggtctcttctctttttggttcatattacacaaaagttagcctatcactcagtcgtggccatggaggagctgcacaacactgctatggtatttcaatgagggaatggaagcctatggagatgctagaaggagaaccaaggctctctctcctttatttgaactattgttcttagatgggacctggatgagggtgctcccacctgcactcactaaaatgtgtccaaatagttggttatctgggctcaaccagccctcaaggtatcttcttttaattagcacacttgccacaggtgcagcatcttactgggcgagtttattagcaggaaggagggagagaaaccaaggaccttctttccacagtgggacctttttttctgctcattaacagatctgtcagcagaaaactggtagaactgaaagcaggtgatgttcacaccagtcaattttgctacttgttaacagctttgataagagaccaaaaatagaacggggaagaaaggccctctgaggaggaaatgaaatcagattttgttcttcctgctggatttctaaaatccttgctctccttagcatgcattgtcatggaaaattccaagttttttgtagaagagttcattctattccctgatgtactactcctaattccttccttccttccttctttctttctttccttccttctttccttctttctctctttcgaaatgaggtctcactgtgttgcccagactgcagtgcagtggctgtttacaggcacgatcccagcactgatcagcataggagttttgacctgctccattttcaacctgggcaggttcacccctacttaggcaacctcgtggttccccgctactgggaggtcaccatattgatgctgaaattagtgcaggaacccaattagcatagcacacaacagcccaggactcctgggctcaagtgatcctccagcgtcaccctgctgagtagctggaactacaggcacgcaccatggcaccaggctctccttgttttaattaagtagtttatgaaacatgaaccacaaaagctacagcaattgggagtccaatggacaaaacaaagtatgtacagaccctttatcgatgctctcagtctcacacaaaccatgttgaaggaaaagaagtttgagatcaaaaggaaaacttagagttggaataaaataaagaaaagccccaagccagagttcaaacacagacctttctgccacttttgtttccaacatgaacaagcaaggaatatatcaataactataaggatcttatgattttataaaaggaatctaaaagcaagataactgagcccccataaatgtttgaataattctagaacatcctagaatggtctacttctttattaagcactacttgagtgtggtcaggggactataatacaatgcacaaatccaaatatggtttcattttatactatcaatagtatcttttgggatataaaatatatatactcgtagaaaaaatatggaatctaggtttcctagattagataatgcctttagagtatgtagcctttagataatgctttgtctcttcagagtactgattcaccatcacattaatactaagaataatagaccttgcagatgtaaccataatcttggcagatccttccttctaggttaatgtttctacataagtaccactcctttttcagcatacccaacacatgcaaattgatcaccaatacatattgggggtaagaggattcttctctccgtagagcattaataaaatcagtcttcagctacacttctcaacctttaatatgtttcaaaagaaaattaataaatccctccccttctcttccttctatcctccttccctttctccttgtctcttctaatatacaaacaggggtaaggcactctccttcctcactccactataatgattataaactttctttttctaattaaaaaagatcaaaatgaggataggaaaatgctagatattttagatgcaaaaatattttcaaagtgaaccaaatggggtcaagagactccctgagaaataacattccctatattaacagtctatttgccttactcttatgaaatagaattacttgttcaaatttccccaagttttgaagtttcacacgttttaaaatctgctaatatttcttgggagaactaaggtggtagtcttcatgggtgctaatatactatgccccataacatttgaagatgagtattgtatatagtgaccaaaatagatagcaggacagcagtttaaagtcaccacatgctgctgctgctagtggcacaaatcattctgccaatgtagttgatgatttaatcaaattgcacttttctctagtaccttcaacaaaaaacaatcctcacctggggcagtcaagaaagctgggaaaaaaaaaaaaacaatgaaaattcactgtaatcggaaaatgcaaagtgcttcctggcatgactgcattactaaacctgatgcttccaaagttaaccttctagggtgctaacaacattaaagtgccataaaagtgatagagaaaaactccaagagcaaagaattaattagctccatggggacatgccagacaggaaaacaaggtttcgaagggtacagtgtgaatccttaggtagggaaaactgtaaacatgaatcacttcttcaatctaaatccaatattttagagcagacatttgggattgcctgcaaagtcacagggcactgatggacaagtttgtgtatgggaagttcctgcaatccaagacaatgatctatttgagagctacccacacgcaggagatgtgtgaaaaatcaccaaatgagaacagaagttgatgtgaagaccctcttctcctagaggagactaggagactacttattctgtgggcccaagtccaacatttctctaggaattctcttttctacctttattaagccaaagctctctgtaatatttgttcatttggccatgatcaatttttctctccgttactgttttgttctctagctcccctctcccttttctcatgttcagatataacacgtttgctatcccattcatggtaaactgactacctatcgcacatgccaacacttagtcttgggatgaaactggagacattcaggaatgcgttttggcaaaactgatctacctggctccatacctgctgaaatgtataatccctcttggtaatgaaaagaaatagaatgtcttggtgagagaaagagcaggaaccctgatacacaaatggaagaaagaaacctccaaggtcaggagcaaagggagcaaaataaaacctgtgatgatttcccattattggtgtcatctctgaggctataattccctctgtggacactggtaactccactgacagcaggaaaagaaatccatgtccttatattgttccccacataatctgactttataatgcgcaaaccccatttcccaagcccttctcagcctgccttcttcctaccccacctctaagatgatctctagatttgaggcttctaacctcagacggccccactcctatcttcccctccccagcccttacgtgtgttacctaaagagagatattctagccaattatccaagccttagagatcaagacatagtttaaaaatagtttctatatccacgtgtctgttaaacacatacactaaaggaacaaacatcacaatctgtttctcaacctctttttcattgtcatctccccaaggagtcttttaagacttttttttctgaattacaccccctgtaaaattttaataccgtaagtatactatatgtctgcttatctaagatatgtttatctatgctttatacactaaaaaggttttcttcacccaccaagaaccaattttcagccccttagggaagatattagtataatccctgttgcgaatgcatgctcttgaagcatgcaacaattaaggtcattttaccagaagtgttaaactactgcttttctaatgttcaatgaaatataaatcttcagaaacaccagcattcctatagatccgtcatctgtattacagtggtcggagaccgggcctggtagctcacacctgtaatcccaacactttgggaggcctaggtgggtggatcgctcgagtccaggagttcaagactatcctgggcaacatggcaaaaccccatctctactaaaaacacaacaaaattagccacatatgatggtgtacacctgtaatcccagctacttgggaggctgaggtgggaggatcacctgaatccaaggatgttgaggctgaagtgagccaaaattgtgtcactgcacgccaacctgggcaatctgaatgagaccctgtttcaaaaactaaaatattataaaaagctaaagcagtccaggacagcagagtctttatctcctgggattccaaaacctactctctatggctctttccccgtcttcaataggaaattctccagaattagcaagtgttactctcaagttagtgccaactccatctagtctttttttaatcttaatgcattttacttacatactaagacacaaacacatttaaacaatttcccactccagaaactaaacaaatggactcacttcttgccgtttgaagttctggacatattcttcgaactgttcgtcttttgtctcatcagctttccccagcttttggaggacctaatttgcaaataaaacaaaatggtttaatttaataatgttttcaaagaaagatgtgcattttctgttaatggagcaaggctgttgttttgctctgaggagtagagcaaaactatcagcacttctaatttttctgttctggaagcatcttggcttggcagctctggagttgaacaaaaaaaaaaaactgaatcccagtcccgcccctcacaggctgtgtggctttgagcaagtgttgtgctacactgcacttatttctttatataactgtttcctttagcaggctgtgcgtgacttagagacagaagctatgccttatttgtctttttgtccaaagcatctggcacaatgctgaatgcataattggtactcaactgcttgtgaacagtagaccaaagctgtctgactaaagcattcatccacttcagtggtccccaaactttttggcaccagggaccagtttcatggaagacaatttttccactgaccagagggtggcggggggaatggtttcaggatgactgaagcacactacatttattgtgcactttatttctattattattattacattgtaatatatcatgaaataattatacaactcaccataatgtagaatcagtgggaaccctgagcttgttttcttgcaactaaatggtcctatctggggctgatgggagactgtgacagaacatcaggtattatattctcataaggagcttgaaacctagatctctcgcatgtgcagttcacactagggtttgctctcctatgagaacctaatgccgctgctgatctgacaggaggcggagctcgggtggtaatgctccctcacctgctgctcacttcctgctgagtggctgggttcctcaccggccacaaactggtaccagtctgaggcccagggtttggggacccttgatctacttcatagggacagtattagaagccaggatgatggtaagttccgtctcaccatcttctgatactcccttcaactcaataaacactcaaagaaatcatgggatactcaaggccccatgctaaacacgggtcacccagaaatactaaaaaacaaggccccaacacttgatcctaaaaaatgtatattttagcggaatagacaaggcaggtccacaaataacaaatcaaggataagttaaagacacagcatagagtctctttgggacacaggacataagtaacaaattgtacttgctgcctttaaaaagtagggcagaaggaagataactaatatactttaggaatacaagaactcattttcctgcataacaaaataaacaatacacatcccttttttaactagacattttcatagctcgtatattttccccaagatacatttataatgttatattaataaataaacctaagtatcaaagtagttacccaataagtcagagttcatgcagatttcttcaagaggtcaattttcttcggagcaaaagtaattattctaaacgaaaaatgattttgtattctattctaaaaatagttgctcataaaatgtgctagtatttcttccttttcactgtcattaataaagatatatgttttaaataaaattgtaaacagattcacacatgtattaccaattatacaatatcactcaatttcatttcacaaaccaatactacatgtaagtaatatgaaatatgctatttttcattgtaaatgtattatttttcagaagctgcaggaatctagtatcataaatattaaaaggacacataatcactgtattaactaatactctcctgtcacttatagcagggtttctttgaaaggtggagcagaatacactgcatttttggaagaatagggcattataactagggaagacttgataaacataagaaacatgaaattatgtatatatgtaaaaagactataactatgttaaaaagttaatagtggctatttctgggtgataagattaagagtgatcattattttcttctttataactttctatattttccacagttttctcaatggttaaagtaacaagaaaattcattaacataaatacgcaagagtttaacatactataaagtttttgtaagaaatgtacacattagattttagtacaagttaagtggatgtattagtagctggttaaaaactcccagcaaaaaaaattcccatcaaaaaatattgataagcaaattaatataaactgaaaataagacttccagaggcaaccatgagggacctatatctgattgagtggctcacatgtaagataaagatattaatagtgcctacttcacagtgttgtatggaaccaccaaggatacacatggaaatactaagctatgatggccagcatatagttaatgctcaataaataatatctattattattatagttatttttatctaaccccactgaacttcaccaatgtataagcttatactgagaaaaagccagggagaatgttgaaaatgttacatgaccagaatcaggattcacaaaagaccttctttaacaagatgaaattcaacaaggataaaatttaggacaaaaacttaactatacaagcaccagatttattactcaacttgcaaccaaaatgcaacaagacaggtgttagggatgggtggtttccacccttaagtagaagtaagggatgacttaaacagatcgtcaatatgagccaacaaagtgatgttgctgccaaagcatctaacgtaatctcagtctgcactaacaaaacttaacagctatcaggaaagtggtcctggacgcttccagaggtggacaagttggtaaacgcacaaatacacagaaaatctggagccaaaaaaaggagctctcaaaaaggcaaagatagttgatactatgtgatgagaagaacacttgatatgatttggtatattagcagggagaagaaaagacccaaggaaaagagcacagccatcctcaaacactggaaggaccatcagagtaaagaaggatcaaacttgctctgccaggaagacccaaaactcacatcagcaggcaaaaagtgcattaaaaatttgttttcacaaaaagttttcatcatagtttcctagaaattaaatagtttgttgctagagttaatgcgctcaccattccagaagttacatgagcttcaccaatagttagggtctcagagaagagacttactcatcaaacaggtaaatagactaagtcacatttcaaatacattctgagaatccataataaatgtattacattaggcattttccctagtgaagaatgcaaatcacaatgaacagtagcaaagaagaaatcctcttcatatttactaaagactgtgtgtcaaacactgggctaaggggctgcaggaataacaggctgcattctagggactgtgatctttcaatagtattcaagcccagggtgggaggtgtggaactggagtggacaagggtggcatgataggcagaggacagatttcagaaaggcttaggcagtaagaatcagaactttgattttcttgtacagaccatggagagccaatgaagtgtttctctggaggaagccacatggagaggtctgcactccttggtgacaatgttagggacagattagaagaaggcaagataggaataatgagaccagttaagaggctttttaatagtccaagcaataaacgacagaaccggagctaggaaacagatcagtctttaagaaacataatgcacagtacataatggcttatgggatgaaaaagatgaaggacagaacagagtgaaggatgacctcagatttctttgggggagactgagtaggcattgattccttcaaacaaattagacatcattttggacatgcagggtttgagacagctctgtggcatccaggtagagatatggtaaatagcatgatatggccaaggttctgagagatgctctgagctacacttatactttggaaatcaccagagtatggtggtagtaaagctactagagtgtataagaaagcccagagaaaatatgaggttcagaaagaagtgagctgaagacagtccagaaaaatcattatttgaagaacgggcagaggaagagaatccttgacaggagactggggacccagaggtatggtcaaaccaggagcaaattcatagaaaccaaaggagacagtttcaattgctacagagaactcaagcaagttaaaaaccaaaagccctgaaagtgtccactggatttaggaaccagaaggttcctgggatccttcccaagggctattagtggaatggcagtcagaaaacagatcacagtagattgagcaaataggaggagaggaatcagaagagcaagtaggtactctttccagaacttgggggcatgaagaatcaaaggagcaatacttgaccctgtttctaggccagagggaactgatcaaaggaggcaagagctataagggggtcacacagtaagaaaagtttcaaagggggtggcaactcagattcaccagaaaggacccatcttactcaggaagaggcacagccattcctcagaaacatgaaggatttctgagaaggcagggaagattgcctttgtaaaggccaaattggaaggaatgcacacacagcagatccatctctcctgtggggtaaatgaccagatcatctgctgagcagcactggggtgaggtcacgggaaaggtccccaggagaggggagtgattcagatgtggaactggaaaagatgagaaccagaaacacatgacatgaattttacatgaaactctaggccccactgaggcaaagaccatgatgtgcagttgcctacatgtaagcagttttgtgatttttctccagcagcctcaatggaggtgggaagactgatctgctatatagaaaagatcttaagacaccaaagacagtgaaacctagaactgagatgactaaaaacatcttttgccttgctctatgtcacgagtatttgacagtgagctgataatttaaatgacctctttcattaaccactcctttggcagtgttgaaaacaccaattaaacctgaacagtgtggcactattgatattacaggaggattactatgtatttatgtatttgatatgcagattttgacatcaacatgacacatcttccacctacaggcaaaaggaagaaagttcagtgcctcgtgcattttggtttaagacttgaatctttttcttcaaagacaatttcatctacattgacacgttagtattttgaaacagtaagatttttgttgttacttttagtgctgctgtttttcaaatgcaaaataatacactatgttgactaagcttttcaaattccacttcctttcagtgagattctgacatattctgttagggatgtgtgctcctcctccaaccctcaccccaagctcagaagttgtgatctagtcctaaaagacatcatgacataggcaagtaaaaaagtaaataggaaggaaaagcaggaatatggtaacttggaatatttcatcttaattgccttctcttaccattttaagttaggagtggaatattgtgttggcagctttcaaaaaagtggttggcatttaaagtcaaagataaagttcacaatcttccattccacacagaaataacttctgttaatcaggggaaaagatcaaagaaaagtcaagctatgagaaggtgtgaccccaagcaaaaaaaaaaaaaaaaaaaaaaaaaaaagctagtcctacaatcagaaatggggcagttgacgagaggaaaggctgcaggccacaaagcagttcaaggtgaaggccaggcatggcttgttactgagacaagaatgatggcagggttggccaccaagatgccttagtggcattcatccatttgatgagggctccaactagacaaattttcaactctgggtgactcacgcttccttgagccagactctaaaagtcaagaataaaatcacacaatttaattagtcttctttaacaaggagacacctttctcttcacactttctgttcttaaaaaaaaaaaaaaaaaaaaaaaaagaagagcacataaaataatgtgtacattctccatgtagttaatcaggagtaaactaaatcagaaggccatggcctcttctgaacaggacatggaggggtggtcttctacttgtgcccatgtccagatgattcattcattcatcagtccatatacccacctatccatcaagagttcttatcctgtgctcaccctaacactacaaagtcccataacttatgactggagaggccatcaggggaggtaagtgcagggtagctgcttgtcctaaagcttcctgctgggcacgtcctacactgtttcccaaacttcagggtactagtcctttgacctctttccgagtgtgtgtcaggacttaaggaagtggatttaatttgccctaatgtgagaggactaagatgaaacactagaaatgcatccttcggtgtggttcatgggcctttaaggtcctcacattgtcctccagcttcccctctgggggatttatttctataccactatgacatctacttcttaccttagtagattttaacagtgcattagccatcacgtcatcaaagcctctgaggctggcatgagccttcctgccaattctgggaaacacttctgggaaagtaaacaagaatagataagagagaatattcacagcctctgtcccatttgaatggccttcagactttaaaaggttgagaatgacatacagtaattacatgtctcatacatgagtaggtttatcctaagtgggacagaggcaactgggaattagaaaactagggagaaaggacagaggcaactgcgaattagaaaactagggaaaaaagaaaatttagtccctagatgggaacagaggtaagtgagaagggccctaaaaggcagtgcagtaagcacctgccaaggctgctttccaatcacacatctacctgaaaaggtatcatgttgcagaatgctgctctcttctctccttcctaaccctttcaatttcaggacatttagtcctctgacttcaagagaaaaaaaaatattggtggggaaaaatagcttgaggaatattgatctggcaaagatttgagtcctagcatccaagatggtcctcttctccaggagttgctgcctgctggctctccctccagattgagtcaccttgtcccagaattactttttcatgaacctgatatcctcagtatccaacccagagtataataattataccaaaatccagtggaagtctgctaaagcctgtgagtcatcccatgagactcggataaacaccagattttccttctccagtggccccattcacaaacagagcactgtctcatgtcattattgcacagaataatgcaatgaatctccaacctctttagatcatgtaaattagtcctcatgttccttagctaggcaaagggatcctccatatactaccagccagatgtttgagagcaagcttacatctgccacactggtagtaatctatcctgcatcagagctgctgtaaacatacgtgaccacaaaagccagagagggttctacatttgggaaattcgccacagaacgggtctgttcctgattgctttatacagattcttcaggcagttttcatgtcagtcatccattagaccaataaaagatgagttagcaatgtaaaaactgacctcctataatcccaacactttgggaggcgatgccaggagaattgcctgagcccaggagttggagaccagcctgagcaacatggcgagacctcatctctacaaaaattaaaaaagaaaaattgtccgggtgcagtagctcacacctgtaatcccagcactttgggaggctgaggcaggcggatcacaaggtcaggagtttgagaccagcttggccaatatggtgaaaccctgtctctactaaaaatacaaaaattagccagacatgttggtgcacgcctatagtcccagctacttgggaggctgaggcagaagaatcacttgaacccaggaggcagaggttgcagtgagccgagatcgtgccactgcactccagcccaggtgacagagcaagaccctgtcccacaaaaaaaaaaaaatagccaggcatggtggcatgtgcttgtggtctcagctacttgggaggctgaggcaggaggattgcttgagcccaggaggttgaggctacagtgagctatgattgcatcgctgcacttcagcctgggtgagagatcaagaccctatctcaaaaaaataaaaaataaaaaaacgctgacctgctgtacaaatattaaagaagatgttgactcaggtagaacagaaattccacaaaactctacccaggatttcaaatgggagctgtaagttccctaaggcaagaaggggctgcttgtgatgatgggtatgaaacagatgaagcagatagatagaatatgttcttgctttttttcctcttataaaaaatgcccactttactaaatctataattctctaatttattagctatgacctatggaaatttacaatatatcaagcacagatctaagtgtcctatatctaaaaatgtatttaatcctcctgataatcttgtgagttaggttactatgattgtgttcatcttactgatgagaacactgaaaattagagaggtgaagtaattgatctccgtcatacagctggtatgtaaccaagtttatgtaaggctaggatttggttttcagctacccttctgatttaccatgatctttctggaatagtgtttcccaaaatgtgttccatgggaaataatctcaggaatctctattcaaaaaaatccaggcgattctgtttgaaaaataccaaagactatatatccatctacagagtctcaaagaatactgttaaagaaaaaaaggaagaaatcgcaatacccataaagtacaatgtgaacatgatgtatcaatcaatgattaattttttactcattaattaatgaggaaactggtaagattctaaccactatactataatgccctaaaaacaggagcagagaaagaaacacagcctggtgaccacactcctctactttccccttgacaattaagtcattttcctctattttagattctactctgactaaccatatcatattgtcaggaactcaaatgtaataactgcttgatccatacttttgttaaatggaaactatatgacatcatctccctcccaaaataggttattgtattaattcaaataccctaggagaggaagcaagttatacaaaatgtatgttctccctactctgtcatcacttagaggaacctaattagcctctgatgagcaaaaggccaaagaggacatcccctccttgtaagaatattatggatcaggccaccaaggtgtcccataggagcagcaggaaaacacaaatgaccatggcctttctctagatactgggttctatatctggggtccatgaacagatcccaagatgtccaggaattgcctggaattgtggctaatataatacggctgtgccttttatcaggatgggaggaagggtctcctggtttctgtaaggtgaagaaccactgaattttaagagacttcatgggtacaagtggaaagaaaataagtgctaatatcaaacaaaactgggcctcacttgatcacttttgagagctggataaactttgcaaaatgattaacttggttgagcctcagtttcttcatctttagaaatgggaggataccaactctaggaagactaagtgagaacacaagcaaaagctcctagcttgatctgaaaagtgtttaatgagggtttattctttcttttctccttgacttcatatcttcactttaagttgcaatatcaaaggtctgacagggaacttagatcttccagttgatccaatggaagagattcttaagagattcttacgtgtttggccaagctcacatcttcgactttctatgatacagatggatcttttagagctaaagggatactgtagagtctatggaaacatctgtgcttagagaattattttctggcaactctctttctgcagctcggtaagtgtctcttgagcaattctataatttcaagaaccatacatgtgccagcaatgttgccaatgcaaccaagaaagcctagagtggtggtctacattcctagaaatcatctttactggtggtttctcacatttgagcagacttttgtagcagcaggaaatggaatccttccatgtgaccccattcaaacctgaccaaatccctccatcagatctgctaatacctgtcttcctgtacaggaaaatctgggcttggggaataagggtggatccggctttacaccaagaacagcttgctttttcccccttaaggtttattttcaagacttaaagctatttgaaagttcagtttgtttgtggcagaggcggggctgttgtgatttggtttggttttggtggaaagaatagtgtgaccagaattctcacaccaaaatttccactgcagtcctacctggggccactgagtgacatcaggagggccacccatcctctttgagcaaactttcttcctgtttttattaaatgatgccttttggtaatttgcctcacaaacacatcataaatgaagaaaaagagataggctacacggtacttacgtaacttttgaaaaaacattctgcataatctcagattggtagatgttctgcacaatctcagagtgaggtaccaccaaaattccacaggttcttaagtggtcccccaaaaggcatgcaatatgccccaactgccaggacataattaccaaggatttcaaacagatccagcaggatgtgcgtgatcacaaaggcaatttcaccgatggtttctatatttaatgtttattgatccaaaaataaaaataacctgatacaaaacaaattatacatacattgcaggtttgaatggaagttaaaaaatacagggggggatgattgctaatagaccaaaaaaccaaaccctacttcctctggtaatgactcctagttgaaggctggacacagtattttcagttcagtttgtccacgtggtcgttttctaaagattgctcaagaaggaactctgagtgccttcataaccttccttgagaacctggacagagggtaacggaaggtagcagagagatgctgccccttctggctatctgaggctgcctatgtcagagcacacagcttccagctctggaagtaccaaaagctgaaaatacttctcaccagcagaacaggcaatcaacacaaatgaataaacagacaaatgaatgaatttgtgaagcactaattatttttgtatacatttctatactttgatctgtgctttgattttccactttacacagctgttttaaagtctgatctgcatgaagtgaatttctaaaaaaaaaattaaacactattttgtaggagacctatgtttcagatttaatctgagcttctcaaactgaaatttccatgttcatatgattaacatggatattttataataaaaagttggatacaaaacctgcaggaattttttaaataaaattgggacttcaaagaaatattgtgttaccagtatgtgctttgggcaatatcatcacattctcttgtttgctatttgggtatccggaggggtatgttttacgatgcagtgtttgggatataagaatgactgcatgatagatgggtgggaaggatagaattctattctggtgaccctgggtaacacacctaccagccttgcatacagataagtaaaacgtgatactggaattgcatttcgctagctatttacaccatctgtaaatactggcagacacttctatgctgcattctctccagttgcccctccagatccattctccacccttctccacactgctgggtgctccaggaagctaatccctaagaaccgcatcctgcccagaccctctggcttccctctagtctcaaccaatggtaagcatcagcaagagatgcaagggcgggcaaaggtgggaggagggagagcctggggttctggttcccctggctatctcccagccagccaccaccagcagccatctcatccccttgcctttcaggtggccccaataattgcatctcctctccatatgctttgataaaagctccctccccttgcttttaggcctggggaaaaatgtccccagcagcctccactgcccctaaatcccttgctggtttcccataaccctccccacagagaatctagaaatagaatttgggtctcaaaattcttagctcaaaatcttccactacctttgtacacttaaactatgagaagtaatgaattaaaacaatccaacacactcctaaaaaagcatcactgtgcgttacggtgtagaaacggtgcagaaacaaactggtacaattcaccagaccaaaaacaacttgcatgctaagcaagcctgagtatactaatcccacaacaatggggtctgccaatcacacacttttcaggaacataagccctgcagttgacaaaggataattattaaaaagtgtttagtaggatgtgttcagctgtgaacccaaaatatctgagacaagtctcagtcaacttagaaagtttattttgccaaggttaaggacaagctatgacacaggcttaggaggtcctaatgacatgtgcccaaggtggttggggcacagcttggttctatacattttagggaaacatgagacatcaatcaatatgtgtaatatgtacattggttcctctggaaaggcagaacaacttgaggtggagaagagggcttctagatcataggtagagaagagacaaacagttgcattcttttgagtttctgattagacttccactgaatatacaacttacagaaatagtcacttacgccttcactggcttagtgaaacaatagggcagtggaagcaaccagatatacgcatttgtctcatgtgagcctcagggtgatgactttgagttctgtctgtcctttgcctactaggaatttccttgtgggcaaatttttttttttttttttttgtgacagagtctcgctctgtcgcccaggctggagtgcagtggtgcgatctccgctcacggcaagctccacctcctgggttcacgccattctcctgcctcagcctcccgtttagctgggactacaggtgcccaccaccacacccggctaatttttttgtatttttagtagagatggggtttcaccatgttagccaggatggtctcgatctcctgacctcgtgatctgcctgcctcagcctcccaaagtgctgggattacaggcttgagccactgcacccggccccttgtgggcaaattttgagggaggtatgcagcctttttatctttgtattaaacagctatgttatttaggaataaaatggaagcaagtttgcctgacacagttcccaacttgactcttcccttggcttagtgattttggggtcccaagattaattttccttttatatgtcctttgactggaggtatctaaaatgaagtggcatcattcatctggggtaatatccaaggttcattgtcccatgccaaggaaatcaaggttatgaacacacaaggagtgaggttaagagaggaggtttaataggcgaaagaaagagaaaagctctctgctgcagagagagggggtcccgagcaggtcttctggtccatagtgaaatgcagattttatagatgagcttgagaaggcagtgtctgatttacatagggcacaaaagattggttggacaaggtgtgccacttgcacacgtgaagaactggttaggactaggtgtgccgtttgcatagtgcacaaacaagctggctgcctcaccctaatcttttattacgcagttgagttgtctacgtggccagtgccatgttgtctgctttttcactgtggtaacaaagaaacagaagatggatcctccatgttgaacatgcctggttctcaggtagcccttttctattggcacagctgccggcattcacctgtgcaagcttccagcttgcttatctatgttggcagctcaatttttcaggctgattgtttttagaaaagcaatgatttaggggctttgttttttgttaaaagggaagccttgctgaggactcctttaccctcactatctgcctaaataatttatttctagctgctgtatcaaaagggcagaagttgttttccccttttaatgactgcaagacttatcacaaaagtttacacaacatagcttcatcattattggtaagatgttgattttcctccattgagaatgcaaggcaatcacaaccaatttcataggtacataagagacaaggtacataagatctggctcttttgaagaaattaacaagctaattctcaaaatcacctgaaaaggaagaagatgcagaatagtcaaaacaatttttgggaaaaaggagaataaagaaaggatgctacatcccactccaaagctcttcagagacaagaagcccaaccttcagaatacaaaactgaaaatgtgatgagttatttctgccctgctaaaaaggtagtttcattcaaaacctttgaccctaatacctagaaaagactaagcatagtaaaactaaacaaccacaaacaactaacttcctatgagccttatttcatgtccacagggaaatcaaatcccacatatggtcttggtgtaaagcacaggggctgtaaggtattagaaaaatcggtgtagaaaaaagctggactgttttcagaaaaatgaccaaccatgttactaagacaaaacctctctctatggactgcattctcacaagataattactttagattcaccagatatactggttctacatcttattatatgaaataatatggaagtatttctctgccttctatttaaaatgatcgagatatgtttgctttctaaaactttaggttttgttattccactcctgtgtatctgttaaagccataatttacaacacttaatattttattagtgagaacattgaaagaatgttgttgtctgatcaatacaacatcctggttatccgaaaggagtaaacacttccaactcttgttatagcatagcttccaagaataagttagtcatcttgatgaatgtatgaagcaataagtatgctgattctttattggatgaaatcctttcattcccttacatttcctcccctaaatccttgccacttaaagtgggtcctcacaccagcatcagcctcaccagggagcttgctagaaatgcagtatctcaggccctattgcacagtacaatccacaatttaacaagattcccatgcaattcatctgtgcactaaagtttggaaagcctgttctaaattacaaactcaatgtcaagccctacaggtaaatggaggaaccaacgtcattattctgggcatttgatgttgatgcagacaaagatcagataatcaaattgaagctgtaatgatcacacgatacaccacaaatgctggttattaaaatacatgcatgatctctgtttcgcatttccctcattcttttttaaaattatttttatagattttgggtatataagtgtcattttgttacatggatatactgcgtagtggtgatgtctgggcttccagtgtaaccatcacctggatagtgtgtattgtacccattaggtaatttatcatccctcctccctctcccaccactcacctttctatgtctccaatgtctatttaagcagaggacggaaatatttccaaatgcttaagtgttttggatggttggctgggtttcggttgtttgtagtttaatttgcattttaatgaagccatcacaattagatttgtataaaaagatgattccgcaaatctccacaggaagtggaatcattctgattagtcacatttttcacatttttgtcgtaaaaatgtgaattaaatttgaatatctggctcagtgacactcaaaaacttcacataaatgaaacagtaacatccatgaagctattcctgaccatgacccaaaatgataaaccatcagtggcttgctcaaaacccctgtggatgatcctgccctttcatgtggaaacaacaactgaaaccagatgagctgcacctggttttggatttcagcaccactgtttcaagcaactcagattacaagcaggggattttaacatcaggcaaatctatgtcagatttcctacgatgactttttacataaaataagaaataggctttaactctatcttgtgtgccatagcatcattaacaatgaaccaatcttcacttcttcctccaaaacctaaggaacaatcagcaaccaaatccctcctcagcaagtggctgtgaacaaggcaccatgtctgccctgttctgatcatctgcaaataggaagaatagtcaatgcttctttcacatttacagttgaagtaaatgcaggttttctctccccatcatttattgccttctttcttttttcctttccctcctcacctcctattaggagtccccagactttgttagcatacagtatatttaaattatgctgcgaaaagtggccagtattagagaagaaactttcattttgtataagtgtctgtctaaagagtctgaagggctacacatcctccaagaatgcccaggacctaaatagtgcaaataccttcccccacggcccatggacccagggatgtgagtggagagccaaagggatgctaaggaaagaggagagaggaaaagagaaacagaaagaatgagggagagaaacatccgtggctgcacatcccaggtaggctgcctatgaaatgttaagcaacaaactgttagaaaattggaaaagtaaagaaatgtctgcatgacactcaggaattaacatgggtgcaagagcaactgaaatgcacttccttttaaattcctaaattcctttgtaatttagaatatggagtggacatacactgtcctcagtgttgaaggccaaactaaaggattacataactagttggaaaaacaaaagataaaaagtgtacatttaaataattcactctcaaagaaaattatccaggaaaccagaaaacttcatacagacttaatatgccaagtacattttgaatctccaagaggaagatgcagaatgcagtgttctccaatttttcttttctgacaagagaacccttttgtcaaaaatgagtatcctgcaagactaatctgtaccaaatggacttggagggaactctgggccacaccatagagatccagaccccaggaccccctgcacttcagaaacagagctccttggcctggctggcataaggaccagctggcaggcttctgatgcaggaggtctgcacagatcatttggatgagcaccagaactgctctcatttgccagatatgggcaaatccctatgcatattccataggagtaattattttaatttaatacccaatttatacaacacccagaagtaagcaacatgaactaataattagatgtcttgattttaccaagtgcaagctctatcacctggaataagtcaccaaggctctgtgagcctcctttcctcctctgtttactgacctgcatctccaatcagggtcctgaagaccacttgtgcccaaacacaatctctacattataatccctgccaggtgtatgtcaggttactgggatgcacacatcagcaccattaatttccctatgtaaataattcaatatcagccaggctcaaataagggaagggaagagctttggagaaggttcatgaccttgaccctgttctgccaagtagaagctaaagttttctcatctcctcctcttctctttctctatcgctctttcatgatgcaagtgacaactaattaaataaaactatctgtgaaatacatgtgcattgagacctcccagagacaaagatgcaaccttctgccagccccaaatccaatctctgctgttccctgtgcccaggggaacggacccaatggactgcattacccaggttcccttgatcttaacttcctgtaagccagtgggagaggcaccagcaggagaggaaaggtcaggccctgctccatcctgctttgaactatttctggcagtccctaggtcaattcatacctgtctggagacctctcctttatgacttctgatctcactgggaccagttgtaccattttctctccttgcctcttccggccttgcagtggttatagcttcatgctattgttactggtctttgggggcctcaactccactgtggattcccttaacacttcccacacttccacaaacactccatgcagtaaagcctcttgaaccatctgtgctgaactctgcttcctgcctgccgagctctggctgatagagtcccagaccatctctggccctggggatcatcactgttccagtgtacccatcctgaacccaagggggctgcagacaaccattttgtagttttaaaacacacatgcaaatatacatagtcacggaataaaaaacgatgtctggaaataggttactgagggatcacacgtgccattttaaagcacatcaagcagtgtgcatttaaatatacattacactgagttaaaattctaaagtcctaattgcaaaacaagcctgcacccaaggaaggacaacagatatttattcagattaaatattgtcctcctgagctttcattacacttcatggggccttgagtattgccaaaatttgatttctgtaaaataaaactccaaaactcaaattgatacacattggagcctggtggttttcacagcaaagccctctgggcagggctggaatcacatgcttggagtctcatcctccaaccctgcaggctaaaaaagagtttggttttggctacagataaaaaagacagatcatttcctggtttcaccagagttgttaggagtattgagcttattagagaatttacaaccaaagagctggggctctttaagcatcactagactctgcctccaaaagagcactcctcataaggtgctgggggccttagtgacccgcagccccagctgcatcgtttctgccacatcacattccattgtccacactcctccaattcccctgcctggctgggactagcttcctgacaccaggaagatgcacagagccacattctgggcattttcatcaagcctacccaagcctctttccctttgaagcccatgaagaatcttggatttgtgcacattatgatttctggtggcttcccaaattcagcagataaccaggtaaatctgaagctcaagtaactccaaatgcatcctgggccttcctgtctgctccatgtgtatgtctcagaagaattcacaatcatgttctatagaaggctaaaatcagtaaatgagcgtttttgtgaagtcacaatgtgatttagcctttctggagtacactttggcagcatttatcaaaatcccttaaaatgtctatacttattgacccagcaatcctacttctataaatatgctttaaaaaaaatcaaagatatgcccaaagataagactacaagaatgttcattataaatactttacttataatagcaaaacagtaatggcaaactaaatatccaaaaatagttagttaaatatattactggcatttccacttcttaaattatgagtgggctagaaacccagaacaactctccaactcaaaatttccagacaaaatataagcttgttttcaatgcattgctgagctagcagaaagtcaggaattccacaaggccaataaaatggtgtgggaggctttagcccagagggcatcttccactgttttgacagctgcactggtgggaccaatcagatataaagtttagatacggctaagccagagtgagaagtctaccaggagatgcacaccctcttctccccaaccttaacctgcataaggttaagaccccaaggggttacactttcaatgtgaattaaggtacctgtaaatggtgaattagaattatacctgtccccagaaggagagcataaagaaaagttgcctgttttgacctggctattgggggaagtggaaagaaaccctttccttgaagtggtgagcacaacttggccatggcatttgaggtccacagtcccatgtcagggcaagagttagaatctcaagtggagaatttcatttaatgcagttctttgggagaccagtgaacaatcacttgaggccaggtattcaagaccagcctgggtagcatagtgagaacctgtctctaacacaatttaaaaaaaaaaaaaaaaattagccaagcatggaggcttacacctgtagtcccagctgtgggtaggaggattgcttgagcccaggagtttgaggctacagtaagctatgatcatgccactatactccagcctgggtggcagagagagaccctgtctttaaaaataataaatacatacattcataaataataaagcagttctgagctgatgaattc

SEQ ID NO: 88 - DNA, 184868 bp, Homo sapiens
gaattccacaaggccaataaaatggtgtgggaggctttagcccagagggcatcttccactgttttgacagctgcactggtgggaccaatcagatataaagtttagatacggctaagccagagtgagaagtctaccaggagatgcacaccctcttctccccaaccttaacctgcataaggttaagaccccaaggggttacactttcaatgtgaattaaggtacctgtaaatggtgaattagaattatacctgtccccagaaggagagcataaagaaaagttgcctgttttgacctggctattgggggaagtggaaagaaaccctttccttgaagtggtgagcacaacttggccatggcatttgaggtccacagtcccatgtcagggcaagagttagaatctcaagtggagaatttcatttaatgcagttctttgggagaccagtgaacaatcacttgaggccaggtattcaagaccagcctgggtagcatagtgagaacctgtctctaacacaatttaaaaaaaaaaaaaaaaattagccaagcatggaggcttacacctgtagtcccagctgtgggtaggaggattgcttgagcccaggagtttgaggctacagtaagctatgatcatgccactatactccagcctgggtggcagagagagaccctgtctttaaaaataataaatacatacattcataaataataaagcagttctgagctgatgaattcatagtcccctcattgatggtacctgcaagggctggccttgacaaacaaaaatctcctctggaggaatttaacttcagccccatcttcaaagaattcccatgtgttaggttctaaggaatattataataaggaatgctaggcttaataataaattcatttccagaatcttcataaacacaggaaaatattcacagtattttactatgtgaaaaattctgtatgataataagaaaattataaaaattagatagatctgaaggctatgagcaagtatgtttccactgcctaaagtcaacagggatcaaattatgggttttcccacttttttctcataatttgtagtgttttccaaatgttctataagcatatatactttagatattagaaaaaaaatttattgagaaagccaaataccacatgttctcacttataagtgggagctgagcattgggtacacatggacataaagatggcaacaacagacaatggggactcctagagcttgtggggaaggaggagggaaggaggaggctaaactaactattgggtactatgttcagaatccattgtaccctaaacctcagtatcacacaatatacccaggcaacaaacctgcacatgtaccccctgagtctaaaataaaactggaataaataaaataaatattaaaaataaaaatcaaaagaagataaaattaattgttttaatttgaaaagaaaaagaaagctattcaacaaaacagccttgaaaagaacatcccaacctttaaaaaaatgtgatcgaattcctgctatcttttggttcccctaaagaaaatactagccgaagcactgatgtgagcattgcataattttactgttattagacacctgctgtatgccagaccctgctaggcataagaggaaaaaaaatgaatgagaaactgcccaggccttcaggagctcacagctgagatggggtttcagaaatgaagtaagtgtaaagcccagtgtgcctgacgggctcactcaccagatatggggagataccagcgaaggccctcactcactgtagtcccgcagtcaaggagggctttcagccttcttcttaaaggataactgggggcgactcaggcagaagggaagggaaaaggtgcttctggcaaaggagaaagcacatcattcacaccaccctccactcctgcactctctgccccctgctctgctttatttttcatcacagcaaatgtcactacattatttatgtagttgtttcctcatttggtatctgtttcccaattccactgtaagtttcatgagggaaagggctttgtctggtataccgctatccccattatgtgctagacataaagacggcaacaacagacactggggactaccagagtgggagggacggaggatggcaagaggggaaaactaactcttgggtaccatgctcagtatctgggcgtacatatgcttaagcaaattgacttggatgaatgaatgaaagagaggcaagaaagagaagcatgagcgtagaacaatactatgcttcagttcattgtcttcggaccacaacaccaaattcccaagagcaacagggatcccttgaggaggacaaggggatgatatggtccaggacagctgtgtagaggactgatttggggtgggaaacaagggaagcatgggacaaaacagcaggcaagaaagagaaactgaacaaaggcgcgggaatagctatatccactcattcatcccacaactacttaaactacacgtgattacatgaaagtgacacagctatagtagttatcacagccatgggtatagtagttcctaacccaggtgatgtggtttggcagtgtccccacccaaatctcatcttgaattgtagctcccacaatcctcacattttgtgagagagatgaggtggagataattgaatcatcagggcggtttcccactatccctgttctcattgatagtgagtgagttctcacaagttctgatggttgtataaggggctttccccttcactgggcactcattcttctccttgctgctgccacgtgaagcaggatgtgtttgcttccccttcggccatgattgtaagtttcctgagacctccccagccatgctgaactgtgagtcaatgaaatctctttcctttataagtttcccagtctctggtatgtctttattagcagcatgagaacagactaacacaccaggccctgctgtaatctctggagataacggctgtgaacaagacaaaggccctcctccatggaatttatattctcttgtgagagacagttaaaaaaaattgaataaaataattttaaatagtaattcatcccagcactttgggaggctgaggcaggtggattgcctgagcctaggagtttgagaccagcctgggtaacatagcaaaacccagtctctactaaaaataaaaaaaaattagccacgcatggtggcacacgctgtgaccccagctactcaggaggctgaggtaggaggattgcactccagcccgggtgataatgaagccctgtatcaaaaaaaaaaaagtatttcatgttatatgaagaaaaatacaggaaaggaaaaaagagaaagatccatgaaacatttaagaggtaaaaaccgcaagacaaagtaaccacaaagctgcctatgaattttcagaatgctccatcttgacttcagtgctaaagtaaagaatcttcctgaacactctaagcacagtttctagagaaagtccatctaatcaagagcacataacagatggttcttgatctagttccacaacacacagctcaagggcaatgcactgatggtttggggctgccatataccaggggttctgcaccacccacaggcgacagaagcaggtggagtgcacctggccaaaatccattgcttgggattccaaagagagagcctttggcaatgcagctctgcaattagcggtctggttttatactgcatctttgctcgctcagagaattgaaactcttctggacctaaggagttgtctccaatgccaaacgttaaatctgaggaacagttttaaacactgattaatgctatttttagtctgcaagatggtgggaaagacaggaataatgatgggaaggagggaggaggtggttagtaaacacctggttaagaaagacataaagcatttccttttaatggaatgtttgttggttaagagatataaaacaacatgttatgtaacaattttcctatctcgaagaaagttgccttagaaagacgctgatgctggttcagcatttgtcctgagacacatcctgctgacacactgtactccggtgacccaggccagtcaacatggggacaaaaggcatctagagtgacaattgatgaaagaaaataacagtctcctgtttttgcaattggcacgtatataagaaacagacctgcataaagaagcttattttgcattcttctacttgtagtcactccttttaatctatactggcagcaacataccaaacaggaaacagtgagacataaggaaatttatatatagattctgaatccaagaacagttcatttaatgaaaaactaaagtcacaaaggacatgccctttccatgttcacgttgtcaaactgtataattcatgtgttttccagccttctcaggttcctagggacccacaaagtgtgcagcttgccagctgccagcattttgtaacacggcctgtgggcaaacccagcaggcccactactgaaatcacaaccagttacccagccgtattacttcagcttctctcctgattatggcaacagcaaataacagagcagtcaaaggactgcctcatttacagctcacccgcacaaggtgaatatagatgaaggacgatgaggtgtaaatctaatttttaggccggagaacaacagacagtggtttctacagaatgtcctggaagaaagtcaggcacactgggtttcccgatggaatggggagccagggatcccagcaatacaccccagtcagccctcactgacaataggctcacatgaccagctggatccctgagtcagactatatagaaacaaatggaagttccaccttgtctctctgacacttggggatgtctaattttcacaacttcacttactgaatacttatgctgtgccaaaaacggtgctgcatgctttatttcacttaagcctcacaaataccctataatataggtacattactagtcccattttacagatgagaaaactgaggcttataggttggagtaattggcctaatgtcgcataattagtaagtgatagaactgggactagaattccagatctgtgctttcgataacctattcctgcttcagtatgccgagtttgtggatcatctcaggtcaggagatcccatcatgctcctcttgcagctgacacctatggcgcctgtatacatggattagtggctgggatcacctaaccagtccacttgaagcacaaagcaatatgataaaacaaaagtggcatccacagataattcttctgtttcatatggaattctgctcattggtatactgtggttacaaaaaggcccacaaaatctttcatttcctgtatgcagtctgcttcgcagtgtgacccttcagctcctcccatgaagaggtgaaggctatctctccacccttgaatttgaaattagccaagtgattttctgtggccaatgagaatttaacaaactataggcaagcggaggcttgaaaagtccctactcatgattatactttcttttgcttaagaatcctgggccctcctctctgtggacaaacccaggctagtttgttagatgatgcagtacacacagccatctcatcccaaccgccccagccaatagcgaatcaaccacctatcagtccatccagccccagaaacttgcaacctcagttgatattagctgagacagcccagaccaggagaattcccacctggcccatggaattgagagaaatgataaacatttgttgttttcagccactaagttttgggatggtttgttacacagtgcaagctagctggcacaagaatttagaaagtaaagctctgacatctttgcagtattatcagtagcacaacgtaacttgggccacattcctctcatccagacagcactgctagatgggttatgtctgttcaagaagagaacttgttctaaatccaagccagtagcacaatgcatgtttgtttgttttattttgtgttgtttgcagcctacctcattcccaacagttttgaattgagtaccactcctagggtggttcccaaggctagctgcagcacagcacaatcacctgggtagcttcgaaaaaatactgatgcactaggcccatcctcagggatgctgatttccttggtctggggtgaggctgaagtctggctattttattttctagaatcagaatgtgatacctctgccattggctaaatgatatgttatatttattacttgttctctcaaacttgggctatcaggaaactttaaaaacccatgctttcaattaaagcaagttaactctttcactaggaaaagttatctttaatgaagcatcaacagatgcttagcctttcctgaagcacttaaatgtcagtatttgcaggccagtaaccaagacccacagcaggcatgtggttaaactaacagggaaggcatatggccactgccatgtgagatctcagcaagtcactgaacctctcctatattcatctttcctatttggaaataggtaggtgttgaataacgaaccacgaagttcccctccagccctgaaagcatgactgtttaatagttatcaacattccaagctaaatgagcaatacctggttcctctcatgaggttagactgctagccctgtcttatcctccagaaagtgtcatatgtacagcccagaggtaccagcacaatgggtcatgcatcagtcactgactcagtcaagaagcagagtgccaacatgtgtcaagcattgtgctaggcactgcacaacagaaagagggcgaaatgctggcattcctgagcttatcctgtttagagagaagcagaggagagaaaaataaaaccacagagcttcatgactggcacttgattgaaccctcaatgaaggagaaaggtggaaccacttccggttcagatgaaggagggtgctgagaactgaatgtttgtgtcccagcgaaattcatatgttgaaaccctaatcttcaatgccatggtacttggagatggggcctctgggaggcaaataggtttagatgaggtccttgggatgaagcccccataatgagattaacgtccttataaggagaggaacagacaccagcgtttcctctctctgccataagagaacacagcaagaaggtggccatctgcaaaagcaagaagaggcttctcactagacccagaatctcctggcaccttgatcttggacttgtaagaaaaaaaaaaaagtgttgttacttaaaccacccagtctatatgtttttttttttttgttatggcagccgaggctgactaagacagaagacttttccaaaaacggtgggacttcagatgagggccaagtagaaaacaaggtggggaagtgagataggtggaaatgaaggagaggaagaaaaaagtcatttcatggaaggaaacgtgaggctaaaagagaaaaatgaaaaaagtcagcaaggtaagcacagagcaacctccctagacagagaaagaaaaaaaaatggtttgtttaatcctaagcaaaacacattgacactttctattctttccaataaacctgacattcaaaagagaaagtcatcattgtctggcagcactaagcagctagttgtctgacagggagaggccatgctaactgctttagagtttccttttctaattaaatcaattaattttaaagcacgtcttaaattggggtgatgtcgtttataatactttgacagcatcaagaaggaatcgctagttcataaatatgtattatcagctactggcacagcagagaagggaagaaagacttaaaggcctttcacaccatgaaagtgacagatccgaggcaaaagttgaggaatcctaagtccagaggggctggtaagactcacagtctcagcctctgaggcaatattgggattgtaacaaaatactcaaaggaatcatgatatgagcacaaaaagagggagaagaggggagggagaggagaggggtatggagaaaaggggagtgaaaatgtaagagaaagaaaaaaaaaccaaaagcatcttttatttgtgatgtgccattattaagaatattgcagctaaaggaataaacaaacaaaaatcagcaatgcaaggagtgtgtcttcatacttatttttcctcttctttaaaggggtaaagcttaacttgaaacagaattccaagccatcattagtctcagatacagcttacctgaatgtttctgtaagttctccttactgagcatagccacgagtacctgaattcaaccctagtaccttgaagtcaactacatttgcacccagttgggaaaccaattgttaagcatgttatgttttcctatttgaattaaaatgtgttttctaaagaaaaggcattagaaagagatttttcaggcctatcactacacatgcagatacttgttaagcactgaatgatgaatgaatgaatgaatgaatgaatgaatgagtgaatggataactactttccatggttcacccaggggcagcctattaattgcacacataaatgcccccatagaaccaaccagtcttctgtaaggagaagactctctaaaccaattctttttcatttatttatttcaatcacttattctcaaatactattctcaaattctatttgagaacctactaagtcagatgccttaacaaacacatcatgattaaattatttcattctatggtatttggtgagtattcacacctcaatttcctaggaggctatgagctccacaaaaggaaaggcctgacttaagtaactttccaaaagtcatacaaccaaaaagtactataattgggttttgagtctaagaatctggcccccaggatctgaatagctgtgagctacagtctttctcttgggggctcagtaaatatttggggaatgaaagatttacatatgatccatgactttaaaataccttgagaagagcaataatacacattacttttaaatgaatcatatttgaaaacaaaaattatcccaaaagtgttaggaataattctgatttagatataagtgctctgttaccaaaacatggaaagtctaaagaaaagaaatatttcttatctcaaagaccagcaaacaccaccattagcatttgacatattttcttatgttcttttactgcgattacttatttatttttacacttctggaatcatgttttccttcaaattatatcctaagaatgttatcacctcaccacacatttttcaagcatcttagtcactccataatatgttaccccatgaatagaccccaactggtgtgatcaatcattcccttcttgacaaacacttgggtcgcttccaactttttacaataatgaaataattctttagggttattctccttaactattctttcacagtttctctattgaattagaacaaatccctagcatttttaattaaatgtgtagttgaagtaaaatatctccacaaattatgtgaaagcaagggcataactagggtttagatgctgtgtagtttcagatgatgggtctggggctccatcaccatcacccagggactaaagtggagatgaggtgacagaacccctgcacacgtcaagcagggatcagggactatacagactgtgacccacttgcagggcagtgtgagagatgggagggctgtggaacagcctgacagaaaagcagctgcagagaaaagtcctcaagtggcaaggtggtggccacctggacctggtaagagggctggtggtgaggtaagaggaacagagcacaggtgagaagagaaggtactgagcatgtggacctggggaccagagagctggtgcccaaagaccatggggaacaagccatgcctcagggccaccatcatgaacaaaggacagcacaaaaccaggagaccctcaaagatgctgggatgatccaaatcctcagatattcagctcactcctattacctaatagatggaaagtgaattaccatctacaggaaataaagtgtctccttcccaatacttaatatactgcctctgttctcaggcatccttctgaattaagaatggctatttgtaggtcgaagtggtgaaaaaaccttatcaaggtgaacataagttttatctataaatgcataccataaaaagaaaagaaccggccgggcgcagtggctcacacctgtaatcccagcactctgggaggctgaggtgggtggatcacgaggtcaggagatcgagaccatcctggctaacacggtgaaaccctgtctctactaaaaatacaaaaaattagccgggcgtggtggcgggtgcctgtagtcccagctactcgggaggctgaggcaggagaatggcgtgaacccgggaggcagagtttgcagtgagccgagatcgtgccactgcactccagcctgggtgacagagcgagactccgtctcaaaaaaaaaaaaaaaagaaaagaaccttcctgggatgaatcctactttgtccacataaatgattcctttaaataatttaatatgatttattataattttatttagagtttcaagccatattattccaagcccctgttttcatgagctatgcttcttaagctaagaagtgtgtataatggtttgctagggctgtcaataacaaaataccacagactgggtggcttaaaacacaaacatgtactttctcacagttctgcagactggaagtctgagatcgaggtgccatcaactgtttcctcaggatggtttctccttggcttgcaggtggctactccctagatacctcttcacatggtctttttttctgtgcacgtgctctttcatagtttctgagtaaagtctaaatcctaatctctttttataaggacactaattatgttggattagtgcccatcctaatgacctcattttaacttaatcacctctttcagggccctagctctgaatacagtcacattctgaggtgctaggggttagggtttcaacatatgaatttggggggtggggaggtcacaattcagtgggggtgggtggggaggtcacaattcccacgtcagtgggagatgaaagcaaagggaggctgagctgcaagagttccgggtccttcacctccttcaacccatccctctctttcaaccagtcatcacccattcttatcttttcccctagttttatcagctttttgtaaaacagttccatttaaaagagaaaatgctactaggctaaaaacactgaaataatagtcaatgcaacatttacaaaactatcactttccatttaaaaatcaaagaaaagatatcttcatatgaaaatattaacagggaccacctttagaagaaatgtgttttttcaaaactttcttcctaagtcccccaccacctgctcctttcccttactctctgttttttatttttgcttttgttttatttcagggacctgtttgcttttgtagtattttctacctatttagaggtaaaacttcttaactgctatgaccaaaaacaatagtaatgattttgggaaaagcaccttgagacaaaagcatctcatcctaatgttgtcaggctatcaaggagctcaaaatctcttgaaactcattaatgtcttcttttgtcttgtttattgttttttttttgttttgagacaatctctctgtgttacccaggctggcctcaaactcctagctcaagagatccttctgcctcagcctcccaagtcattagttattaaaatatgcaaggacctaacaccataaaaaccgtagaagaaaacctaggcaataccattcaggacataggcataggcaaagagttcatgactaaaacacaaaaagcaatggcaacaaaagccaaaatagacaaatgggatctaattaaactaaagagcttctgcacagcaaaagaaactatcatcagagtgaacaggcaacctacagaatgcgagaaaatttttgcgatctacccatctgacaaagggctaatatccagaatctacaaagaagttaaacaaatgtacaagaaaaaaaacatcaaaaagtgggtaaaggatatgaacagacacttctcaaaagaagacatttatgcagccaacagacacatgaaaaaatgctcatcatcactgaccatcagagaaatgcaaatcaaaaccacaatgagatatcatctcatgccagttagaatggtgatcattaaaaagtcaggcaacaacagatgctggagaggatgtggagaaataggaacgcttttacactgttggtgggcgtgtaaattagttcagccattgtggaagacagtgtggcaattcctcaaggatctagaactagaaataccatttgacccagcaatcccattactggacatatacccaaaggattataaatcattctaccataaagacatatgcacatgtatgtttattgtagcactattcacaatagcaaagacttggaaccaaccgaaatgctcatcaatgatagactggataaagaaaatgtggcacatatataccatggaatactatgcagccataagaaaggatgagttcatgtcctttgcagggacatggataaagctggaaaccatcattctcagcaaactatcacaaggacagaaaaccaaacaccgcatgttctcacccataggtgggagctgaacaatgagaacacatggacacagggcgggaacatcacacagcagggcctgtcaggggttgggggctgggggatggatagcattaggagaaatacctaatataaatgacgagttgatgggtgcagcaaaccaacgtggcacatatatacctatgtaacaaacctacacattgtgcacatgtaccctagaacttaaagtataataaaaattaaaaaaataaaatacaatacacaaagatagaactattatcacaatgcattgctatccatgaatccttcaaatcatattctgtaagagtacctttctgcccatgcagaaatatgttgtcatcaaatggatgttactaacctaagctttcaactgcaggaaaagcttatgttttagctgctttgcactattcagaaaagctcaaattgaaaataattagaatagtttttaagccaggaaattgagttttgtgtttacatcattcctctaacctccatagtaataataataatcaacccatgtgattattatgactctccatttgaatctatattgaaaattttgatagcacttaaaattaataaggcagctgtaacaatataccaagtatgaatgaaaatatttatatattctattattcatatttatattttcctgttacatattattttgatctagatttcattggcaatacccctaaaatcctacagatttaataaatgtcattccaatttaacttttccaagtgtcttcacgctccccaagcttttaagaaacactaactttaaaacaaaaccaatttttccttattactgttggggtattacgtgcaaattcaaattaagccaatttaggtacaccatttacataatgtatacttcctaatatgtaaagaatcctttaggaggccgaggcaggcggatcacgaggtcaggagatcgagaccatcttggctaaaatggtgaaaccccgtctctactaaaaatacaaaaaattagctgggcatggtggtgggtgcctgtagtcccagctactcaggaggctgacgcaggaggatggcatgaacctgggaggtggaggttgcagtaagccaagattgtgccactgcactccagcctgggcggcaaagcgagactccgtctccaaaaaaaaagaatccttccttctaaagctatgactactctgtaatgggtttgagctaatatctccccaaattctgaagcaaataagtgttatcacacatggctgctgaactggtgaagaggcattattacggttactatgactatactaattattctgaagttgctccttgatgcaacaggaagagtgctgtatttgattattgatgtctgtcacaggcataaggggcaggcacagaagtgcaggcagtgcctaatatccacaccaactccaggaccatgactgacttaccacaccttgtgcccagcagcaagacatctagtttgcattaggccatgtgtgcaggagggaccaatggaagggaatggaattaatgagagctgaaccctgacactggcgggtctataaacatgtaagaattgcccaaaggaaactcaatgattttgtaacagctctacataatgggtgatacagatgctattattattgagttatataaaaactgatgcttagagaggcacaaggtaacatctgggtcagaatgagactcagaaaccaggttcctccaacagcaaagtccatgctgttcagctgtaactatattgccattagaagctacatgttttaacattacacttttaaaatgataatgtaatccaaccctcatctatttttgctgataaatataacctgcatcatatgaaagttgagaaataatttatgctacctaaagtaatagtctaaaacccagaaatgacttttgtacaaatactctcatcttatctttttctactgtttaaaaaaaaaaaagaaatgcccccaaattaggaacactaagtatgcaatttacaatcataaaaagtattttttaaattactatacacataatttctaatgatagctagaattttaatatgtgtattcatatctatctatattacaaatatcgtatttgtgtgattatacctttgtatctaaagaaaacaaacaccaactcacatatgaaaaacagaaccacctgatagaagtacttgccgttagtgcaaagcatagtagaaccgaaacagaaaaaaaaaggaacataaagaaaaataatggctggaatagggctgcttccattttataataaattgatataacatatatatatataaaatgaaaacacttttttaaaagaaattttcaaggaagttagaattcagaaagttttgggatgaaaagcaaatcccagccagggttttgacaggtggggaggtataaacagagtaatccgtgtgagaggttggttatgagtaccattttgattaggctgaccacagccttagaggcaataaaaaagtggcattaataggtcttttgagatattatgtatatgttctttcttattaacatagaaatggaagcaattttcataaaaacagaaaaccaaaatatcataattatgttacatttgtcaggtcataagtttcttggaaataaattactgaaacaaatgaatttcattttttcaatctaaatggtaattctccatgacagcaaaaatcttacacaacactgtactgagtgtaaatggatgttcaagtagattataacactgcaacctgcccggaagttgccttaacgagtcctggaattggaggcccaggactccaagtctgttggcaagactcaatctcaacctaaatgcagtcttttggtgagaaaataatactcaaagaagtagcacaaagaacaattttaaactaagtaatgaatcctatattagcaatgcagacttgatggtgaggccagtcttcaagcttctcattggtttttattttgcagattagtgagacaacatatgatcatccagaaacctcctggattagtgagttctgatgtttgtatcaatcagaaaagcagaaaccacttcaaggatttacagtacagtcatgagccgcataataatgttttgtgtcaaagacagatcaaatatctaatggtactcccataagattgtagtggagctgaaaaattcttaccacctagtgatgttgcagccatagcgatatcatggcacaatgcattacccacgtgtttgtggtgatgctggtggaaacaaacctgctatgctaccaggcatataaaagtcttgcatatgcaattatgtacagaacataatgatagtgataaaaaatggctaggttactggtttctgtatttactatacttcttatcattagggtgaattcccatcgattaaaaaaaaataactgtaagtcagccttgggcaggtccttcaggaggtgtaccttccaaaagaaggcattgttgtcctaggagatgacagctgcatgtatgttagtgccctgaaaaccttccagtaggacaaggcgtggaggtggaagacagtgatactggtgatcctgaccctgtgtaggcctaggctaatgtgtgtgcgtctcagtttttaacaaaaaaatttatatatatatatatatttatatatatagaatatatatatagaatatatatatattcaatatatatatattcatatatatagaatatatatattcatatattgaatatatatagaatatatatattcatatattgaatatatatagaatatatatattcatatattgaatatatatattcatatatacagtatatatgaatatatatatttttatatatttatgaatatatatatttttatatatttttatatatgaatatatatatttatatataattatttatatatttttatatattaattatatatataattataaatatatattaaatatatatttatatatatatttttatatatatttatatatgaatatatatatttatatatagaatatatatatttatatatagaatatatatatttacatatagaatatatatatttttatatatttatatatattctatatatatagaatatatatatttatatatagaatatttatatagaatatatttatatagaatatatggaatatattctataaaatatatattctatataaatatattctataaaatatatattctataaaatatatatattctgtataaatatatatatttatacttatacataaatttaaaactagaaaaaagcttatagaataaggatataaagaaagaaaatatttttgtacaggtgtacaatgtgtttgtttggagctgttattacaaaaaacctctaaaaattaaaatgtttataaagtaaaatgttactgtgagctaaggttatagtgaagaaagagaagtatgattttgataaatttagcatagcttaagtgtacagtgtttattatctacagtcatgtgctgccctaggccttcacattcactcaccactcactcattgctcacccagagcaacatccagtcctgcaagctccattcatgataagtaccctatacacgtttatcttttttttttttttgagatggagttttgctcttcttgcccaggctggagtgcaatggcacaatctcagctcaccgcaacctctgcctcccaggttcaagtgattctcctgcctcagcctcccaagtagctgggattacaggcatgtgccaccatgcctggctaattttgtatttttagtagagacggggtttctccatgttggtcaggctggtgtcaaactcccgacctcaggtgatccgcccacttcagcctcccaaagtgctgggattacaggtgtgagccaccacacctggccaggtgtaccattttttatcttttataccatatttttattgtgccttttctatgtttagatacacaaatccttaccactgtcctacagttatctacagtattcagtgcagaaacatatggttcaggtgtgtaccccaggagcaacaggctatgctatacagccctggtgtacagtaggtgctaccatctaggtctgcttaagtacaatccatgatgctcacacaacaataaaattgcctaacgatttctcctcattttaccctcatcattatgccacacacgactgtacaggggatgcaggggctgaaaagccaataaggaagagtcaggtattccaaagattagcaaatgtggaaggctgttcccatatctgagctgaagggatcagggaggaggtgatgttattaatgagcccaagggccaagatcacctgaaagaagctggcaccagaagccagtccatgggaagctgctggtaaagcagccacccaatgtgaagtgggagcaggaggaagaccttgttttctcacttcctctgaccctctggtctcccagcaggacctctcattggccaatcccagccagaagccaagaagccaaccaacagggagtgtgggataggaacagcctgcagtgtccatcccacccccaacacagagggcagaggaagcgtgagcatggcctctgaagacaagcaggcccaggaccgtggcctccaagctccagcacaatatcagcatccccaacagcaaaaagcgccttactgtaccctgccttggtgtggtagcatctcctacacccagagaatgaaatatgtcatcatgattagtgttattgacaaaatggtgtcaagattccgattcattacatagtccgtactctcttttgaaggctctgaaaagaaattttctgctgttgtcaatatcaaaaatatttgtacctccctgatgtaattacaaagactggggcttgtggacactgggctgtggcactgctcgggcttcccatgtcacactctccatcatggccaaactggttcagcctcagtcctccttacatggtttctactttttcttttttcttgtttttaatttttgctattttgtaccttttgtattattgtaaactgacttaaacagtttatggataaagcaggaaagaaatacatacatgtatgtatacacatacatacactcctatgagtggcacacaagcataattttgaacatgggctaatgacaaccaaaatataacatgaatccaaggtgtgagctttggtgtcacagcatattgggtttaaagcctattaactccatgtttttcagacatgttgtaactattgtgtgtctttatttacttttcaatattctaaaatttatactttgctttcttgacatatacaatacagacttctaatgttcatgtagtcaaatctatcagccctctgtggttttttgcactgattgcatgcttagggagactctcctgatctgaatttatttttccttctgattaatttatatttccttctgattatttcatggtttctttcaataaaaatagttaatgctttaaagcacttaataataccaaacaattgtatggaacctgctttgtgccaaatattgttttagattatagttctaaatagtaactaatgtagtaactcatttaattttcatgactgtcctaaggaagtagctactattatcatccccattttacagatgaggaaatagaggcctatagaggtgaagtaacttgaccacttgctaataagtggcacagcttggactggagtccaggttctacatagatttcagtgctcaaacacaatgccatgctgcctctggaatggattttgatgttaagtataaggcaaaggtgtaaaattttgttttttgctatcctgaacagtcagctaacaaccctagcaacattactgaatcatcttgatttcccacaacgagtgatgccaactttatcacatatattcttattttccttgacatcacatatgtgccagacgacagagatgaagcagtctgttattcccattgcacacttacagattcaataactaagacaactgagaggtgatttatcaaaacctctccactggagacttctgctccccacggcatctggccggcagaccatgagtcatgctctccagcggcccctctcaaacagcaggatcctcaagatgcaaatgaacacccagaacaacactgaaaattagaatttcagccaaactattgctccctcattaggatttcctctaattacaagatttaggaagctgaaatgagatttgcaattgcagctgctgttcacacagcctctgccacttacaagggagagaaaacgggtggcctgaaaaatgtaacaaagaacacttattacaagaataaatatttagggataaataaaagaataacaggagtgattatcaacattatgttcatgtggtaggacgatgggtgagatttttattcttctattctatttttttctaggccttccaaatttatcattcaatactattaccttaataaaaatcactattaaggccaggcgccgtggctcacacctgtaatcctagcactttgggaggccggggcgggcagatcacgaggtgaagagatcaagaccttcctggtcaacatggtgaaaccccgtctctactaaaaatacaaaaattagctgggcatggtggcacacacctatagtcccagctactcaggaggctgaggcaggagtatcacttgaacccaggaggtggagtttgtagtgagccaagattgcgccactgcactccagcctggtgacagaccgagactctgtctaaaaaaaaaaaaaaaaaaaaaaaatcactattaaaacatttcacagtgatggaaaagtgtaagtatacccagatctcaagtttcctgttgcatctttcaaacatgaacaaatacgtactttcaactctactctatatagaccctccattgggcactggggatatagtaccaaaaaatatttagtcttatctataacagtttaatttttttaacctagataatacagtcattaatactggtataattaaatattaattttcaaaatgtttatgaatgtagaaaatggagaatgagcattatattgtcaaagcaaggattctaagggaagtctccaaaggacatttatttggtttggctgtgtccccacccaaatctcatcttaaattgtaatccccatgtgttgggggagggaccacatgggaggtgattacatcatgggggcagttaccctcatgctattctcatgatagttagtgagttctcataagatctgatggttttataacatttcactcaaacctctcaaacaaagttcatttaaacctctccttcctgctgtcatgtgaagaaggacatgtttacttccccttccaccattattataagtgtcctgaggcctccccagccatgctgaactgtgagtcaattaaacctctttctcctacaaattacccagtcttgggcagttctttatagcagcatgaaaatggactaatacagccgtcttgatgctccttccactttgttcatctccacctctcgatcgctgcccaggctctgctactcactttcattctattcctaaggggaattcacctgaaatcagagccaagcagagaagtggctgccctgcctttcctaacctggtagggatatggtggcaaaggcaccccctggaacttcctccaccactgttatagtttttatttagcttctgtaagttactctcttaaaaggagccttcgaattctaagttggcaaacattttataagcctctgggatagactgcctagtgactagagttcctgaacacctattgagatgtggtgctatgtaagatcacaggacataaagaacacaattgacaaccaaacaccttcgcaacatgcctttgatgtaaccatcattgctggagaattcaaacctttcaaaggagtccatattactttggaaaggtctaattaaaaaacaaataaatgaacaaacaaaacaaaacaacttcttaatattgagctccacgactcatgcttataattctttttattggtcctcttagtttatatccccagggcagaagtaataatcccttctccacacaacagtccttcatgtttgatttaatatcctcagatactaaactatggcaattttcattataatgtattgctgctctatcttcattatttttcttgttttcatacttagccacccgagaattcctagaattaaccatctgaggccttccaggaaatcgtatgttaagtgctggttttcaggagaaaactggagaaaagtgtgaattagatggccagataatcatgatctttgtcttatttatcagaatataggagataaaggcaaaagaatagggcatgggggttgctcattgttcttttctatttttatgtttttttaaaacaggctaaagaaacgagacagaacccccagactcatgcctgagagatctcacttaagtctttactatgtctaacacagggacaatgtgctaggcatgtggttacaaagctggacttacagtcagaatccggaccctgctaatcaacagttgtgtgaccttgggcaagtcatttaagcttcctgaaattagttttcccatctatacaaaggaaatgataatatctacctggccgggctgttccgagaaaccaaatgaaataatacatctagggctcatgatatgcttttgatagctagtagtgattattattatttcttaaagaggatttatatggggttctggtcaaccaccttattcttttctagtctacatacaagtcaactgtaccagtgtgtaattcagaaattcagaaatagatgtttatgtagcaggcataggcagaggatatgctactttattataatttttctaaaaactgctgaacaaatgacatccaaaaactaatttggaaaatcaaaataacaagagaagcatgtggacaaatgtacacctgtggccaggtctccaaactgcatgcagtggagtaaatcgccttactcccatgacctccctcttcatccctaggctgtagttccagcccccgccctgtcagttacaagttctcatacgagtcttcgcttctccataagcagatgctaagaaagggtatccactggaatgccaccccactctgaactagcacattaccattgtggtttagattctttattcccttgcgagtttgattagcgtaagttgactgcaaagaattctggatactgaccaagtttcctgaaggcaagaatatcaccttttttgttttctcctgaaaaccagcacttaacatagtgtctcatacaccacagaatgaatgcagcaaacagctgttgaacaaataatagggaggtggtgagagaggagaagggagggaggaaggaaagaaagaaaaaaagagaaagagggagggaagaagagaaggaaaggagaaaagaaggaagggcacaagggagggaaggaaggaagaaaaaaggaaggaagggagagaaagagaaggaggaagggagggaaaaagagaaagaagacaggaagaaaggaaggaaaggaggagggaagacggaacataaaagaggaaaggagaaatgaatgaatgaatgagtcaagataatacctgtgaagcctcttggaagtcatctctacatccctcttagcaaataccaagggcttaacattggaaacaaacacgatagctgcgtcacctgtgcaggctctgctataagtgacaacacacgactacactgtacttagtgataaatgacagagattgggctgaaatcagttgttgacactgccacacacttataggtgatgcccttccagtagcccccaaacttttccaggagaaaatcatacccaccactgcaaagtcagaaagaaagacatcaagaataatcaagtgtgcaattacttattaaagttggttccagtacccactgaacaggcagtaagaagaattgcagtgtctccaccctctccccaaacagcaggtgctaaaacctactgcaaatacaaggacttagcaagttatgttgttagatttagtaaataaaaatacatgcaatatttgggaaatacatgtgcagaaaacaattcccaaagaactttggcttatgcaagtgatatgttagtatttatcatattagattttaacgaaaattttttttaaatattgcatcatttaaactcacaataggtgaactgcagagcctcacatctgtaatctcaaccctttgggaggccaaggtgggaagattttttgaagccaggagtttgagaacagcctgggtaacatagcaagacccccatcactatgataacaattattttttaaattaaccacatgctgtggcatgtgcctgcagtcctagctacttgggaggctaaggcaggaggatcacttaagcccaggagtttgggttgcagtgagttatgatcacaccactgcactccagcttgagctacagagtgagaccctgtttctaaaaaatacaaaaaacaaattaaagaaacccctaacaaactcatcacatgtcaatataataacatcttatgacattttaatggttttttcttacatttttacaaatatctttactgtttactctccagcctaataaaaaacagctagattcttttatttacttctgctttgaatctgttgagatattgcatgtcatacagcttctggaaaactccattgtacacttgtaagagaatgagagtgatgaaagcaaatcatatcttagtgttattatgaaaataatgctggcctcacaaagcccctgaaagggtcttgggctgccccaggagtccctagaccaaactgcaagaactacaactctaagccaactaaggacagatagaaagaccacaaaacacccagaagagatttccatacctgctgtgctggtgtccatcaccggtttctagctgttctgtagtgtgcagtgtctttgacaaggggagagaccaaaacacccattcttggccccagtccagggctgtctccagtggccactctccactgggatgttggtccagtggaaacatggccagactctctaccacctgttggctttgctttcccttccagtgccattcttcccagatcagcatccttaagcttcaacgtaggtatgggtgacaaaccaatcaagttggcttcatttccaaacccacaaatcctaagttgctttacaatgtaatatacatcaagtataggctatcttctccagagcagtagctacaattgttagtgtatattatcttgacttatgttcaggtatcggttggcatgaagtgaaatcttaagagataactcaatatcctaagacttaagaaatgcctggtccaaaactcttcttacaaaagaggcaacagttgtgtcacaagtgcaatgacatttatgtcaattgttgtactcccagaataattccttagaggagaatgaaataatcaaagttgatcatgggaagacatcttttatatctgtaccaaatctgaagtattgatgttaatccctacataacctaaatgtaacattgagctagctcctctctcaccaaaccttttgtgtaaattatgcctagggaaagagaaacacaaaagatcaagaaaatgtacacaatgttcgccagaaaatgcataccagtcccagactcatgaataaacactcaggtaaaaagcactgtcacataaacacattgatgaatctccaaaatgttaatctccaaaatgtccagtcgacttctgatgctcacatacatttacagattctcatcagagcactacatcaattttacataaataaaataccctcctagattttgatcccaaactaggaaaaaatgcttaattataagacttttctacttactttttatgcctttctcttcctaatattggaggccagaggaaagatgaaaaaaattaacaaatataaatagtaaagcttcattattatattcctgaattcccccagtgagatgctacaagaacaaaaggctctgaattccattaagcatgtaaaaccctgcattctttatctccttattaggggtttacaatgcacaatcgcaaaataaaggccctgggaaaacagaaactttaactgattacctcccagattagtttctcttgaacttcacctctttttgcacaacatctattgacatcaccaaacccctgtggcccactctccaggttggacgtcctcccatatcaagcctggggtcgccaaaccccaggagtattaggcatgatgctctgtacgaatggaccagatttgtagctggcccactttcctcagcctgtgatattcaccctccatatcagtgctatgacctgaggatgagaagtccaagagatatgggatgatgatgatgatgatgatgatgatgatgatgatgatgatgacgatgacgataagggtctgagaagtcaggaatagttgtacttgttctcaaagcagagccccacactgaagttcctctaccacaaaatccatttatgcccaaagcacctaactttgtaggtataagtctgtactttaacctcagaataaaattaggacattcctttgatcaaagtcacatcttattacaaaagacttttttcaattataccttattttgcatactctggaaaaacttggagtttagactgggttaagcctattatatttctttgatatgtttataaattatttctcaacatgaagacataaaatggtctactttccattcattcattcacttcaaatatttactaatactctagtaggtgccaggcacactcaaggctgaggagcaatagaagaacagacaaaagaaatggctgtcataatagattgttcagctgtggttggaaaatgagaggcaattattttaaataataattaaaatacgtcatacattaaatggcaaaaaaaagtgccagggagaaaaataaagcaggaaaggggggaaagagtgttggaggaattgcaatcttaaaatgggtattaagggaaggcctcacttgagaagctgatatttgaataatgatctaaggtcgacaacagagtgaaccctccagataaatggggacgggcactctaggacgatgacactgtaagtgcaaaagcccagaggtcccacaaggatgtcagtgtgggtagaggggaactggcagggaagggttataagaggtaatggaagtagggatcaggtcagatggggttttgtgggcctttttaaagaaccttggctttctttctgagtgacatgaaaagttgctgatatgtttgggacacgatagagcctcactcaccttttaacaggaacagactgatggctgtgtgaagaagagattctagtggagcaaggaaaggacaagggacggttaagaggctctgcagtaactcaggcaggatgttacggtgttggtagtagtggaggtgtaaaaatggtagcattctacatctattttagaatttgatgcagatgagcttggctgatggacgagatgagaagcatgaaagaaggcctcgagaatgactccatgtttctggactgagcaacctgaaagatgggatttgctgaggtgaaaacgactatagggggaagaggtttgcagaagacggagatggggtgctcattttttcatgcactaagtttgagatgctattagatgcctaagaagagatgtcaagtaggcagctggatacacagatctcaagttcagaagagaggctgaggctggaaatacatgcctggtatataaaaacatgaggttgaatgatgtccccacagagtgaataacatagattaaaaaaagaaaagaagcccgaagcctgagccatgggaaactccaacattaagaagtcaaagagataaaaaggaaccagctaaaaaggaattgagtctagtaccctggaagccaaatgaagaaaatagttcaaggatgggtaaatgatatattgtgccaaataattctaagagatggagaagtgaccacttaattaaacaaggtggaggtcactgatgaccttgacagcagtttaagtgccatggtcatgtagaaagcctgactagggtgggttcaagatagaagaggagaaataaaaaagcatatagatcaggaattattagatcatgtccaggcacccctgaggggttcccaagagctttccatgcatcaacagagtcaaaactactcttattctttcataagtttatggcagagttgttcaaagattccatgacatatagatgacatcctgtactgacagctaatgagatgtgtgcttgtgtattatgttttaaatgtttttaatttctaatatgggaaatactaatgaatataaccaaaataaactacaattctttggaggtgtttttaagagttgtaaagaggtcctgagatcaaaaagtttgagaatggctgagtagacagacagacatgcatgcatatacttatagcaaagctttagcctcagaagtcacatcggggacgcacagggtcctagtcaaaagctgattctattcagtgcaatatgtgactgtctgaaaagctctagcctgaaacaaccttatttattcagggccggatgtcaaaatgaataagaccatccttcactcaagcacaatttggtccatagattcaaattctctttagcattattatatttttgtctaaggggaaatttagtttagaatggttcaccacacataagagtcaacaatgtattgacaatctcatggtttattactgatgggaatagggaattattttaataaaagattaaggttaaaagaatcaccaccatcccgcttattcattttcaaggataatatgcatcagagctccctttcactcaaaacatatgaagagcccaagattacatttctgtatctctgtgtagtaaaaagaacagataactttagaaatcaacagacctgggcttgcccacttcctagttcagtgactttggcaacatacttgacacctctgagactttattcttcaatctttcaagtagagatttcataagttcgtgacaatcaaataaaatatgctatacaaagaacctaatagaaagcctagcgaaaagtagctattcaataaatagtgaattttttttagtatttcagtaactaagcacaagccacacaccttttaatacttaaacttgaaataataatatgaaaacacttgttcaaagcaagagagaataaaggatttattgagacaatacttacatgtagacattcatagtgaagccttctgcattcattttgaggatgaacccctctgtacaggatagacatattctatcaggtatttatttcctaaatgctattgtgtgccaggcactgtggtggacaataagaatactaaagaaaataaagcagagcccctgcccccagggaagctcacagtccactagggaaacaaattctgaacaaaactgcaatagagagggataaagctgtgtcagccatgcactgggtgccctggaggcagagtgaggggggccagaagcccctgcactgcttactacccaccaagtcctataatcttccttccagtgagtaacaactcttgaaaaatatccctaaagaaccctgctactaccattgccattgacacatctctgaacttactgagttctgctctataatgacagggttagagagagacaggatggtcatgtgtttccggggtttagaatttgattagcaacaatctaaatccatggaaaagacttgcttataaccagtttatttttacatgtgcatttctttttttaaaaaaataaggtcattaagagcccatttgtttttatatatttgacttgtttcaattcattttagtcattgtcctttcatgctcttattgcagcatttcaggctactgggagcaccttcatgttggcctctgtgtccttttgaagtgactccaggtagtctttgacagcctccttgcttcaggggataacaagctattccagatgcatcttatacatttcctacccacacctagaatcagctatttctgcaaggagccctggtagtaggaagttttagtaggatatggtttcgtttagtaagaaatgtggcactgctgcatggctgtcattgctttgaggcctgaatatcattcaagatgtggtcatgttcatgagatgtcgccgcagtgaggttagtcatttactaccacctaacaccgtccttttctgacaatgccgtccatgaggggatgtcccctgaaggcagttattctgccaaaaatcaaagctccctgcagagatatgccattcctgaactggtaggtcactcttggcatatgatcatgaatcacgtcatgtggcagaaaaggaaaagaacctcctagagatttggaaggccagtttctgacgagagaactagggaatcaacattcccaggcatcagccttcctggaaattttccctctgcactctccggggcacacggcctgattccatcactgcctcagcagagacctgagcagatggagctgaaatcttgcaacttctacctaaataaaatggccattatgtaaatatcgggcttgaatccagtgtgcaagggcatatgtgtatttcaaatagccatcaggtctacatttctcccacgtgcttcaagctttaaacaaaaatttcctatcccttctgagtaagaattacaaagttcatctctgaattctccatgacaaccaagaaaggtggcaatttccaaccttgggaaacagcaagctacatgttccaaccctcagacttctcagtccatgattcatcatcataatcatcatcacaattcacacaactgtttatttacggggtgccagttaagtaagaagtatctcatttcccctcacaagaaccccatggcatagataccactattattccatttttacagtgaggattctgagaatctacaaggccatgtgtttcaaaactattaggaggcagtgccagactcaggtctgactcgaggtggatgcccttagccattactctgagaaagaagggaacaagtatcctttctccagttggcaggacatacagtagggaatatgacttggccactagctcccagctagtggggagtggagatgcataaactctgctaactagggcactcacaggggcttttgcaaagtaagaagatgctgtcatttgatggtgacagccgcgctcaagtcatctgtagtaccaggtcctgacgacacaagcctggcttaagaaaaatacattccctttacacatatggatctttgaggaaacaatgcagaaaaagtgctttatactaggttctgctgttattttacacaccacagagccaaatttagcctaagcttttaatacatggatctgtccaatagcctcacggtccaccgtgccagtggaattttcctgtctactcttaataggctatttaaatgcagcaagggctatttttgaaacatttttcaccatttgagtgtggtatatggtagaatttctaaatctcaataatgcttcagcactgattacttcttctgatgggaacattaagtataaatgtatgcatagctgtggatacacagaagatttcatttacataatccttaaaccaggggatagtgaagtagcagctagcctgagagatttttttctaagcttcatctctttgcactgagataactttcacacatttcttttgaatttagctttcacctttttcaccctttaaaataatcttatcctacaaataatggcatgctacattaaattacacctaaaagatggccacatgaagtccagacatggaactaaaatatgcctggacttccaaatatttcaacaggaaggcaaccatcccagcatttgtttaaatatgaaaattttcatcgtggaaattttccaacgaacacgtaagtaaagagaacagtataaagaacccccacaaaccgtttacccagcttcaaccccttatcaacattctgccattcttgtgtcacatgtcaatctcatcagaatttttaaaagggcattctctgagcaaaacaagccttctgtcagaactacagtggtgtctcaaattttgtattttctataataacatagattcttctaccttgtggtaccaatcacagaatatatcaactcaacagcatctgctcaatttcaaaactactctaaacagtaactcacatttgcaacaaatcaagatatgaaagggccaattgctagtgagttagctctaagcaacatagactgatcttttctcatatatatatatcacattcatgtaaaaatacaaggtctgacatggaaggaggggtctagagctgatgcagagtacaagtgacagcaggtggctccaaccagaaacacaaaggtacacacagtctacattcggccacaccaagtaggggacacaggtcccagttctgcttctcatcattatcctcatcatgactatttattgatgatctgtgctatcctgcaccctgtgctaagcactttacatgtcttctctttcatctccaacaggatagatctattttatcttcaacttgcagatgaagaaacagaggtttagagagatttcatggcttgttcagcagagtctagattagaaaccaggttgtcctaacttcgaagtctgcattatttctcctatcacacactttggtcccaagtattattgacccaaatattaggaattgtgtaaatacacacacacacacacacacacacacataaaatccacacctattctgaatctctagtgtgctaatgaataaaatgaccagtacctgtgcaatatctggttaaaatctgagactgtggggctctcaccaattttataacttttttcgctcctgaagagaataaacaaatcaaggagctgtggccatgctcatctggacactgagtcgacactgtttactgtacttcaaagcacctttaatattaggaaacagctctgggtgctaatgtttcctggggcaggtgggtcaggaggtttcaaagctgtgactatttagtgccagcaaaaaccaatcttgacatcgatctaaacgtgcttcagaagaggtggttccaggagaaactgtcagcttaaactccctgagttatctgtggtatttaagtccaggtaataaaaggctctctgatatttggatcacattttgtactgaaatcacctgaaagggtatttggggagattttgacagttaaataatgaaagtttgcaaacgagaaagcactatgttataacctaagatattcacagggggctgggaaatgcaaaggtaagtcctctgaacttaattctttgaagaaaatatttaattagcaaatgtcttacataatggaaaaaaccttcaaatagtacaagaaggtggtgcaagaatggccctgatttgatatactgaaacatcataccatgtgtatgccaatgtcttcagtccattccaaaagaaaactgtcataataattgtgctgccaacggtgctcattctctaaccctaacctacagtatttactctaatattaatctcctctataatcgtgggtgatcagctaggctccacagcttcaaaatgctgaactttaaacagcttattaattactgtgtgtgtgtgtgtgtgtgtgtgtgtgtgtgtgtgcgcgtgtgtgtgtgagagagagatagggtcttactttttcacccaggctgcaatgcagtggcgtgatctcggttcactgcagcctcgacctcctgggctcaagcgatccccccacctctgcctcccaagtaggtggactacaggtgtgcgccacctcacctggctaatgtttttgtatctttttctagagatggggtttggccatgttgtccaggctggtctcaaacttctgagctcaagtgatcagctgtctcggcctcccaaaatgctaggattacaggcgtgagctaccacgcctggccttattaattactattaattaagatggaagatgggataatatcttccatcttatcccaaatagtatttttctcccaactttagttctgcatcgctctctcaataagccatacatagtggggatccatatcatcttgaatcttctccattaaatcttggtttcctagatataagaaagcttcagaacaccaggcatatgtgtaatcaccatactgcttttcctttcttggtgaactgatctgggaaaacaaagggcactaaaatttactaaatgtctactgtatgtgccagacatgttaatggcaccacatcaaaatgagcctgtcaagatgtaaaactccttttttaaaatttttgccaatatgcactactcacatccctgcctctgttctgaacctaaccaactctccaattatggggcaccatattggattaagagttatgtgtatttattagaaaaaaaaagataatcggggggaaaaaacagatattttcagaaaacctattagaactggctttgattctaaatgttattattacttccaaactatcattataaagaagacttgtaatactaacttgaatatatattttactaggattgaggccataattgttaaaaattaattgaatacttaatgggcatctgaagttcaaacaccctcctccacaccctctcctgcccccaaacaaccactgactactacacagtcaaacaaatataattaattgaaataataatttaacaagaaattataagaataattatgattttaatcatataattaaaactcacaaaagtaggtgagtccattctttagaatagaaaataccatattcctattgatcaaattccaatttcaactaataaatttaattgatattgaagtctgactatccaacattaaagtagaaataagataatcagagattcagaccataaaaactgcaagtgtgagcagaacacttcataaagaacaagcaatatccttttctagaataaatgaatatggtcaacactcaactcttggtgaggtataattttacttctagattgcatctaattctcacaccatcacttacccatctctgaatcccaccgaattcctcattccatctctcattcctacttttaccttaatcctcatctcagggttgatgtgactgtaaagcttacatattggataagattgcctgtctcatacactagttggtaatttttttaaatagcagaatgtttaatggcttggcttccagactgtgtcaacctaccccgagcatcaaaacagctgcatccaaaccataatggtcacataaaatgtcatgtattcttgccactagttatttcatcacaacaattttgtagaatactgtttctgcccaacctgaagatgaggttttattaaaattatatctctaagaatacaggctttgcatttgattgctgacacagtatttcatattacgtagctctcaattattaattgagtatgtgaaagtttagtttggcgtaaacacaccaacctgatacatccttaatcaatgccagttttatatgcccagaaagggcacctgtgaacacaaaattgcaaatgttggacctcctcataggcaagattttagagatcacttaaaacaattcagtgggtggaaatcaccaacaatcacagaatggataaaaacagtaaactgtcttaatgagttcttgttgctcgaaataaaatttcaagggacactatcacacagggcttcaaagagtgctttatctgaaatgacattgatggagtgttgaagtgttactggggggtctttgttcttccagctcccaagatgaggtgggccttttgttctctgacccggggttcttggcctcacagattccaaggaatggaaccttgagccatgcggtgagtgttatagctctattagaagctgtggatcacagaagagaaccgtggaacccagcgactagtgttcagcttgattaggacgaacccaggcacttagctgtgcaggaacaatggtgagcctttagcccaatcaggagcagcaacggatgcctcgctggatcaggagcacagcccacaccctgccagatctggaggggtagaagtcagcagcgggtctgtgatggcggcattcagcagtggtggatggtgagtgaaagctcagcttgagccagaacaaacacagaccagaagagtgtgcagttgcaagctttaatagagtgaaaacagagctcccatacaatgggaggggacccaaagggggttgcccactcccggctcgaatgcctggggtttatatcccaatcattgtccctccccctgtgctctcagatgatagatgatttgactatttctttacctcctgctcttagcctaatttgtattttagtgagccctctttactacctgattggttgggtgtgagctgagttacaagctccgtgtttaaaggtgggtgcggtcaccttccccagctaggcttaagaattcctagtcagcctaggaaatccagctagtcctgtctctcagaagttccctggaaaactaagtgggataactcaaaaggtggctctattgaggacaatgaccacaaggccatagatgcatgtgaaagactaatataactttcataaaatgtaagagtaaaaatgtcccacctcgaaggtaagatataattttatattataagcgatttcaaaatgttactaaattaatacactaatattgtaagttgacattcacctatttgcagtatagccttaaaagttcatttataaacaggagggatattttgagagggaatcttctcaccagttgtcttatattcaggagaatgcggtaaatatcattatcatagggctaggttaccaggtctcctctgattcccatggcaagctctccagttccctaaagctaagggaattttcaaatataaataaattatgccaaactgtctttctcaaccaagagagaataatttaagaatcttggaagcccaatgcctcctttcttttcttttctttttctttttcttttttttttttttgagatggagttcctctcttgtcacccaggctagagtgcaatggcatgatctcagctcactgcaacctctacctcctatgttcaagtgattctcctgcctcagcctccctagtagctggaattccaggcgtgcgccaccatgcccggctaattttgtatttttagtaaagatgaggttttaccatgttggccaggctggtcttgaactcctgacctcaggtgatctacccaccttggcctcccaatgtgctaagattacaggcataagccaccacgcctggccccaaatggctcctttctataaactcggctctcataagttagaaagggtcccaaaagtggaacgattctgcaaagttcccccaaaccttatcatccctccaccactaacaataaacacataaccaaactgcggacaagcctacagctgtcctcagcatgccatctttaccacctccctaattctgttcactgccctgacacttgtcccaaggaaccaactatatcccttgaggtctgtgtaaagccattcacatttctctgatgtctttcgctgcacatattgctgagaccagcttggtcgtggagaccctaacccagcagcgctagaggagttaaagacacacacacagaaatatagcatgtggaatgggaaatcaggggactcacagccttcagagcttagagccatgaacagagatttacccacatatttatttacagtaagccagtgataaacagtttctattatagattaactaaaagtattccttatggaaaacaaagggatggggcaaaacaaagggataggctctggctagttatctgcagcagaaacatgtccttaaggcacagatcgctcatgctattgtttgtgattcaggaatgcctttaagcggttttccaccctgggtaaacccacaaccttcagcgtgggcgtcatggccatcatgatcatgtcacagtgctgcagagattttgtttatggccagttttggggccagtttatggccagatttgggggcctatcccaagcaaggtatgatcattccctcttcacagctaccatggccccttctgagccatgtttgatcagaaaaagaaatgaccttgggtccagtgatctcagttaaaattcagtttctgggcccggcatgttggctcaagcctgtaatgtcagcacttcgggaggccaaggtgggtggatcacctgaggtcaggagctcaaaccagcctgaccaatatggtgaaaccctgtctctactaaaaatataaaaattagccgggcatggtggtgggcacctgtagtcccagctacttgggaggctgagacaggagaatttcttgaacccaggtggtggatgttgcagtgtgctgaggtcatgccactgcactccagcctgggagacagagcaagactccgtctcaaaaaaaaaaaaaaaaaatcagtttctcccactgtgtggtctcacctggtgatcctgggccagctactgagactccctgcatctcggttcactaatcaataaagaggaaatagcaatacctgcttcacagctgaataaataggagcattgctttgagaagccaaggccaacctgcggcatattctagccccaactgctgttaaagctggggctctgttattgtactgacacacctcctcttgtaacttcttctgaacctgcattatctctccaactaaattgcaagtgatccaattgtaattgaaatccaattaaagttattcaagtagtaaaacaatgcaagtactttgtttcactacttctctctatatcttacaaagcacttggcacacagtagaggcataataaatatgttggctacatgatacaaatgaaaggctttttataggcaagaaaccataaagcatcttaacaatagggtaaacatttacttatttttgtatctgtaaaaggatctacttcactctagtgaagcagaaactattctttcagtgtagaatcatttctactaattttctttggcagtcttcaaaaacaataagataaagaaaaagaaaagaaaaaaacaaaagctcaagcaactcccagtgtgccctaccaaatgtacgtttcaagggagcaagcccggctgaattaacagaggttacatccaaagggtaacaagcagcgttcctgagtggctcttacattaagtcaaatgaaaatattaaaggacctgtaattttccctttattgctctcagttccatcacaggagctaactgcctctataaaaataacaaatgttaatttgctgcattacttgatagctttgctctgcaaagaagaatgccacattcggtcctgctttgattcactttcattcgttcatcaacaaacatgtatggggcacccactgaaatgctgcatcctgttcagggatctggggatacagtagtacagtagtgaacacacagtcaaaaatccccactcagagcttgcattcaactgggtagagaaataacaagacaagtaagtaaaacacatagtgcgtgagatgatagtaaggctcagggtataagaaggaagctagacgggagagaaaaggaacagacaaagctggcgggagggtggtgggaaatgaggtcaaagagggaacaagcagctaggtgatgagggcctgtaggacatggcgagagcggtgggtttacccggacaacatggagagccaaccggggctttgagaggaggcctgacaagctcttggcgttagcatgctggtggtcgtgtggagtaagggtgcagggggtcacgggaagaagcaggaagcgaagctgggagaccagttccataatcaggtaagagatgatggtgccctgggtcagagtggtgaggagcgatcgaattccaggtatgtcctgaaagtagagctgccatgatttattgatgttatggatgtggggcaagaaagaaaggagtttagagtgacaaggtttctgcgaggtccatattacaagatacatgaatgatcccagtgaattccaagttccttccaagtaacttctactgatgtcccgaagacactttcctaaaacaccctttcctcctaaccctagataccagctgtttggaggacagcaacctacactgactgcttccctacctggtatcagacattgtgcaaggtgctttgattccatgtgatctattaacaacctgtgaggtcttggttattgtcctgttttatggttaagagacctgagactcagtagatgtaggtgatctgccaaggcttcatctggggaagaaggggtacgtatgaatggggtggcatctcttccactccaatggtttgctttcaagagggaaagccaagccagtattaccacattttcatatttttctagagaaatatgaaatcgagactactatgtggattctcctgatatttacatgtatagtttaaaaaaaaactatgggccaaacaaacaaatctgcatcccaaatttcccctaaaggaagcaagataaagacatcagtgctgcttattctaaattatttctaaatttttaagcaatatttttttcaaatgatgatcttaggtgatgcaaaggcaattaaaccctttaaagaaatctaaggcagagattagatggaagtaaaaaaacaagggggggaaagaattttaagacggatgcttaggccactgttgtggtgtacattacatgtgaaatgtaccagaaagaacacaaacagcctttgccctccatgagagaaacttgctagaggaaaacagggacaggagtctgctaatggccagggctctgagctccatgaccagggagggacagaggggagttgtgccctggttgccctggtgatacacaacgacgctgccccgcccctgctttggggacacaagcaaactgctccccagggcttcactcctgtgtgtcttcccttcctctcctccacatatcacagctccccctttccctcagcaggaggcagattaggggcccaggtacatggggtagtgctgtacaggtgggaggtgctgggaagacaaaggtcatgctgaaattaggctgtatgaaaaagatatgtctgcagtctgggctgaagggctctatagccaggaggatagtccctgccatgtttctctcatagataaagggtatcacaatggccagtgaagcccgaatacagagtagaggttgtggagaagtgcaagaatcctcccaaaggagttttaggacaaatatcaatcagggtgtccagaaaagtccaactttatttttttatctcatttttaattttagattcaggggttacatgtacaggttttttacatgggtatattgcttgatgctaaggtttgggatatgactgtacccatcacccaggtagtgacacagtacccatttggtaatttttcaacccaagctcctacccccacctctagtagttcccagcgtctactgctcccatcttcatgccaatgtgtgctcagtgcttagctcccacttatatgtgagaacatgcagtatttggttttctgttcctgcattaatccctttagggtattggcctccagctgcatccatgttgctgcaaaagatattatttcattcttttctatacctgcatagtattccatagtgtatctgtaccacatttatccaatcgaccattaatagacacctggattgattccatgtctttgctattatgaatagtgctgtgatgaacatatgggtgcatgtgtctttttggtagggtgatttattttcactggggtatatacccagtaataagattgctgggtcaaatagtagctctgtttaatttctttgagaaatctccaaactgagaaaactccaactttagcttggatgtgagcaagtgtgagagaacagctactggtgtgaaaggtttgaaagtggccgggaaacaggagttattacttgccctgtgggagagaaggaataagtctatggaggggtagagtttgcttacaagcaaccagcttctaggagccaacagtgggcttcctccagcctcttgtctcagttccagcctgggcacacacaggattggctcttcagacagaaatcaggagcccggggaattattagtcctatcaggcaagaagtataggcagtagagggtaaaagttttgtatgttgagacactactgagaggtgggaggacatgaaagggagagggcagagtggattattcacacccaaatcttaaactgggaccctacattataaacatgccccaacttgtgctttcatgttgtaattctataatttcatgtttgcctgatgcagtcaaacacaatcaaacaaaaatgaaacgtgacgggaagggaaagatgagaaaggatgggattctgagcctcttcctctttatttattttttcaaaccagaaatctaaaactgtcctttaccatacctcttgcccactcccacatgacaaatctcaccaattctacctcccagtggaccctccattccatccaccaccttcaggccactgccagcaccctgaggtagatggccttctggcctatgcatttatctctctgttttcagcccattctctactccagtgtccaaatgacctctcaaacacatgcatctgatcatacttctctctggcttcaacagtttcccactaactcttacagaacaaagtcccctgccgcccggcccatagcaacaatgcaacaaatagtcattgaataagtgaacattttgattttacatcatttcatgtatgctactccattttgagtcaggataaacctctgagctgactatcaaaaagcacacatagttcttgtcaaccattaaagtaaactaaaagggcagggaaaaaaaacagcccatggttttcatacaataaataataaaagtttcagattcatagtcatccatttgattatgacatatgaattcatacaactcatgcagatttgtatatatgattgtatttccatttaacaggaatctgtcatcatgaaagttatattatgttaaataattgccctctactgaatatttgccccataagaggaacaggaaaagggttataatgaatcactgacatcagaagatcatgtatttgacctagatgcctctgaatcagctctgcaactaggacttcaaggtaaaacatatgttatacagtcaaatatgaatattttaattcaagagatatgctctgaggtaattcactgtctgagatttcttaagcagaattaaatactgtatacattccccatgctgaggtgaattatctttttatttttttccacaatgaaaatagatttttatcaactctcacaagcagaggcaaaaattactcctaccaaataccaatgatactcacaggatgtgacattaatgtctaataggcttagccagtcttaaaaaaccccacccatcacaactcaatggaaaatactaataccatatgctgagatatcttaaaatttgaaaatagctttatctttccatcttgtttatggtaacttgtattcttgttttgtgtttctatggggtggaatctggcaatcttttcaggtgtagtatctgccttggcacctggctcagaaagagttccctttcctcagtccctgcatgtgcccacccttatcctctgagaacatttattttatcttcctcacattagtcttcatcttagctatgaacttatttttgtatagagcatatagaataaagctggggtcattttttcttcaaatgatgagttgttggcccaaatagatttattgaatgattcttacatacctttgactttatgttttaactttccataattttccactgatttgtctatttatatttgtaatattttaatatccaacaagataaggtcaacttccttttagtgaaagcaagttgttaagttagtctgtttaagtcattacttgtgttcgcaatgttttttgttgttgttgttgttcttttgttgttgttgttgttgttgtttgtttttaagactgagtcttactctgtcacctggactggagtgcagtggcatgatctcagcgcagtggcatgatctcagctcactgcaacctctgcctcccaggttcaagcaattctcctgcctcagcctcccaagtagctgggattacaggtgcctgctaccatgcctggctaattttttgtatttttagtagagatggggtttcgccatgttggccaggctggtctcgaactcctgacctcgtgatccacctgcctcgggctcccaaagtgctgggattacaggcgtgatgcaatgttttaatatcttacaacacaaggtctacttcctttcaccaaaattttccaatttataatttatattttataggtttatcagcctgtttctaattccgtattttcttgatgtggcttccagcttctgttcttgatttgtcatcttagttatgtttattttattagccttttcaaagaattaatttgtactttaactgattaattttttggtattattttattgtctcattccttgatttctgcttgtaatcttgatattcctttctcctcctgtccttagattgggttttcctggcttcttaagtagacactcattttctttaattttatcttttcctgtataacataaaagcatttaaaacaactgctttttccctgaatatagctttgcttgtctcccatgactttagtgtgtaacgtgctcaatgtcattaatttctatatagtgcctaaatgtagctttgatttcctctctttgacttaagttacttaacataaatctttctaatttttcaagtaaattgtgataaaccttttcaattattttctaattctttgagttgtggagagaatgtggtctatgtgatttctgcttttagcaatgcagggacatgaacttcattgtttctatataccgttgacccttgaacaacacagatttcaactgcactggtccatggactttcttccacctctgccacctataggacagtaggaccaacccctcttcttcctcatcctcctcagcctactcaacgtgaagatgttgaggatgaagacctttatgatcatccaattccacttaatgaatagtaaatatattttctcttccttacggttttcttaacattttcttttcactagcttactttactgtaagaatgcagcatataatacacattacatacaaaatatatgctaatcaactgtttgtactatcgttaaggtttccagttaacagtaggctattagtaattaagtttttggggagtcaaaaattacacgtagattttttactgcattgcggggttggcacccctaaccgccacattgttaaagggtcaacggtaaatatatatctacatattacatctacataaattgctatgttcttatacatcaaatttggtctgtatttggtctgtatttgttctgtagcatgcacttgtattaatattttatcattaatattaaatttgaaatattttaaatatttatgtattgtaaatattattttaatagtaaaataataaatagttttagtataaatgaattaacaaagcccctactttccaatagtattccaacagtccactgttatgagtctcctcatacagagcactgtgatataaaatatcgttgtatctttttattttcttataatatattcctaagagtggaatcactgaatcaaaagttgtaagcatctttaaggaccactcccaaacaacaatttgagagtggcctttggattcagtcctcgccaagaggtaacaaggtttttaaaatacatttttatttgtgatagtttaaaaaaataaaagataaaaatcccactttaaatgcatttattttattattaattaatcttacctttcccatacctttctaaattatttttattgcttcttttgagaacaatctaggccaatcatgagttttaagcaaatatttaaatttttctttgtatctgtttatcatgtcacattcctgttataatattccttccattccatgcctctttgagttacccagaaattccagattaacattaaaaaatagtatttaatggtggaatcctcttcatattcccgatttttaaatacaatgacttcagtgtcagcatactctgatgttctcgtaagattaatattaatatttttaccataaaaaaggttttatttttaaaacaggaatgagtggtgaactttatcataacttctatatatctattgagattattacttactgattggctacacttttatgttgaaccataggaaaatgtcaatctttgaccattttttacctagaaagtatggtaattttctattgttcaacctaacatattaaatgatatgctaaatattaaaccatccttgcaccgaagagacaactcctacctggttacagaggttaattctttcagtgcccttttaaattcagtttgtcagtgtttctatatgagatttggtatctgcattcatgagttagctttggctgggtgttctttattcaatctttgttataaggtaatttgcataagacattaagacactgttataaagtgacaggtactaccacaaacattacccatgctggcagtgagccacagatacagcttgtcttctgccaagcaggaaactgtactcaaaagacgattacaaatgattgctcattatgccagttcacatcttttccttgaagctcattagcacagagacgccgaactctcctgaggtccttgttatccagtggatctcctctcctgctccaaaacagcctttcccattgtcagtgagcagtgccaccttaccagctgtgcccagccataaacctgcccttctgtaatagaaatcaagagagaatgtccaggcatccaaatgtcaaggcctcatccacagccaccatggctggcccttcttcgctactgcaacagttgtcccgagaattcactctgatactaattggaagccctcattcccaagaagcaggtgtctgactacacttctttctccagatctgttaaaatagcatctcattaaaagcaacctcccttgggagataaggccaaagacctctgtcttatttcacacttaaattattttttctctttgcttaatccaagttccattttgtgaaggggcctttaagctcaaacggttacttttttcatgatctaggacactcaaagctgtattctaataattaaatttatgatatttgaaaatccaaactatgccttattcattttcttattctttcaagccctcccagtatctatagcacagttctgctcagtaaatgcttgctggattcaaagtattaacatagtcgtatttttcagaggtaaggtaatggaatggaaagactaggacctcaaaatgctaaagatctgcctggaaatcccagctccactgtgtaactttgtctgagtgactcaagctctctgagtgtctgttttcacttttgcaatatggactaatcagattgctggcagctctcaagaagaaagcaaacataatttatataatatttgaggtgagcaagcactctcctcaccttctctactccctcattataagatcctataaagaaccccagaaaactaccgaaggcctgtgtattgctcagatcccaaaagcaaaaccataactacctgtgggtatcaatgcaaaaccattagcaaattttctatgtggatctaaacgccctaaggaaggcagcaaataaaagtccttcaacctggtcatctcaccctgtctatgccattgataatggaggatgttaagcacaagccatctgaggacagcccagacactctacagcccaacagtgggcagcaccacagacgccaataagggggatgagacaccttgtcccaaggtccacagaggcccaccctgaccacctggcagccctctctcagagcctcctccacctcagctcagtagcccagctttctaaattgatttctgtgtctgtttcccatagctgttataacaactaccacaaactttgtggctggaaacaacacaaactatttgttctgggggtcagaagtttgaaatgagtcttaccaggctaacatcgagctgtcggcagggctgtgctccttctggaagctctaaaggagcatccttccattgccttttctagtttctgaaggctgcccatattccttggcgcatggccctgcatcactctgacctctgcttcatggtcgcatctccttctctgactcacttgcctccttcttgcttttatagcaatccctgtggttacagtgagcctaccccagtaatccagaataatctccccatctcaagatcctgaactgaactacatctacaaagtctcttttgtcaggtaaggcaagatattaaaaaattccggaaatcaggatgtagacatctttgagagtacattattctgcctaccacagttttcaataccttgacgtgacaccctgaaatgatgcaccaagaacactgcttctcttctgtggtattcccactgaaattgtgtagcctaaatcatggtatcctgaggaaacagactgcccaaattaagacacattctccaaaattactggtgtatcgtcttcaaaaagtcaatatcccggcccaatggaaggctgaaagttgcctgagattaaactaaaaggatatgatgttgtaaagagcacaactgacaacacctgaatcaggtccagagatgagaaaatagtaccatatctatttcctcattgcaaatattgaacctactttatggcaggtggatcacttgaggtcaggagttcaagaccagcctgggcaacatggcgaaaccccatctctgctaaaaatacaaaaattagctgggcatggtggcatgcgcctgtaatccctactactcaggaggctgagacagaggaatcccctgaacctgggaggtggaggttgcagtgagccaagatcaagccactgcattccagcctggtgacagagtgagactctgtctcaaaaaaaaaaaaaaaaaaaattatgccaaaataaaaagttaaaatcaagccagaaaatatcacataaaaatcacattaagaaacacaatcctcatttctcagaatttcaaagcaaagaaagaggctacatgaaccagctttgaaatgcttttctattctctcaacctcctttggactccatgggtgccagatccttcctagcacccgaaccatatttggtagttagctaggtacaagctacagctacgaacgtacatgcttccatggtggcttaaaacagtggttggtttctaacgcccctagactatgcaaatggagttacatggagtgtgcagaagaagagccaggcctccatatcagtcttccatggaggttctgaaacccagcatgccaagggcttgtcagatccagtagaccaagcatcacagctcagccctccctgctcatgcagtctggtcatttatgtgacacttccctgaggcctcaaaggattgctaggtcccagagtggacaatgctaccaatccagctaaactgtattcagaccgtgctctcatcctggaagcaaaaataagaaaagagatgcacattttgacaaatctgacaaacatgtgactgtgtaattcaacaaacgtgatgtcctttctcttcagtgaatgcagggtggagcagaaagaatttaggttacatgtcagaaataattacagtaggagaattatatcctatactgattaagatgttgagagaatttccaggaagcttcaaaaaatagacacacaagtgtgattgtgcctgtctgaaatgggatgatgtggtcatttgtgaaaaccacatctggggaagatgagtggtcctcattcacctgtgctctaagatctttgtaaataggagatttttgcactatctccaacaaggcacacacagaaacaatgcatagcaacagatctagaaaacgaataatcatacattgtgcaggcagacgaattttgactatccaatgatggcaggacagattgcaacaagagcaaaggacaaggtgataaaccctcctatcccccagcccagagcctctgcaccttcggcaagcccagcatgtctgtggactgggcaatgcttgtgtgctgatgtggggtagagaaaggagatatgcaagaatgaggacgagcacacactgccccagccctgcacagggcagttgagagcttgggatgagtctacgggcctaggttgggatcctggctcagccatgtgttgctcacatgagtagaatagattacttcatcccatggagcctcagcttcctcaataactacctcctaaggttcctgagaactggaagagtccttcatccaaagacccagctcttattattattaccaggaatctaccctgttataaaagctctacaccaaatgaactatgttccctcttcaatctcccctctgcctcaggaggactgactttgtcatctaaagcaaatgatggccgattcaaagttcttttttctcacccttttcttctcaggctgtctctaagaacagcattttccttcatttttttttcctaatagttttctttatttggaggtacgatgtgattagtcaaagtagactatcatttttattccctccatccttcataaaaatgacaaaggattaacaggtgattcatttggaagttagtaaagattaatgaaggatatttatcacataaacacaaatttctgtggcaaagataaagcaattagcttttcttcagtgaagtctgaagccttttgggtactgatcccataataagtatggctacagaaccagaaaggcctagacagaggataaactgttatgcagtaaggaggcagagccactcagagcagaaagggtgggagaaggggacaagagaggaaaggtgaggggacgaggggaacatgggctaaagtttgggtattgagagagaaagcaagaggaagaaaggggtttttagggggctacactgccatgacacatgaaatgatggaaaagagatgagacggaaagcatctctagaacattctgctgtatattagtcaatgtactttgcctttgggcccctttttgagaaccttcagcagagacttctggaactttctaaggcttttgtggaggtcacatttggttctctgtgaaaatgtaaggtagagtccatttaatatttcttttgatttttagaattttgatccaatattcactggagacttataatggttttcttttcgttttttctttttctttttttctttttcttgaaacgaagtttcactcttgtccccaagcaggagtgcaatggcacgatctcggctcactgcagtctccgcctcctcagttcaagcaattctcctgcctcagcctcccgagtagctgggattacaggtgcccaccaccatgcccagctattttttttttaaatattttaagtagagacagggtttcactatgttggccaggctagtctcaaacttctgacctcaggtgattcacccgcctcccaaagtgctggcattacaggcgtgagccaccgcacctggcctttataatgttattttgagtgctagaagtctaaactcgtaggaaagaaagcccctcagtgcgagtctatggccatccctcatatgcatgacctcacttactcctcacaactgtgtggtgtagaaaacgctcgtgtccttacattacaaatcaagaaatgagtgctcagagagattgtggaactcgtgcaagcctgcacagtaagtaaatgggagagctgggactcaaacctaggtcttgtactaggtcagtacaagcccagtccccatgctttaggttttggggtatctttggtttagggatttgttttttgctttttgctttttaaaaaaattgtggtgagattcaaataacatgaaattcaccattgtaaccctttttaaatgtgtaactcaggggtatttagtgcattcacactgttgtgcaaccgtcaccactgtctagttccggaatattttcatcatcccaaaaaagaaccctgtattcattaggcagtgagtccctattcctccctctccacatttcctggcaaacactaatctgctttctgtctttatggatttgcctattctagctatttcatataggtggaatatctacaatacattatgtggcctttggtgaccactcctttcacttagcatgttttctacattcatccatactgtggcacgtctcagaacgtcattctcttttttttttttttttttttttgtgagacagggtctcactttgtcgcccaggacagaatgcagtagtgcaatctcagctcattacagcttcaaattcctaggctgaagccatcctcctgcctcagtctcctgagtagctggggccacaggcaaatgccaccactcctggctaattttttaaacttttttgtagagacagggtcttgctatgttgcccaggctggtcttgaactctcggcctcaagcaatcctcatgctttggcctcccaaagcactaggattacaggtatgagccaccgtgccaggccaatcatccctttttaaagctaaataatattcattacactgtatgaattttcacattttatttatctttcctcagtgaatggacatttgtgttgtttctacctttgactgttataaataatgctgctgtgaacattcaagtccgagtttttgtttgaacacttgttttcaattcctttgagaaatccccatgtttttcatcattacagtgcccaactcttcaaaatgtgactaattcccatgacaaccacctagctttgagggatccaaggaggctcagaaaagcattctttaatggagatggtgacttagaaatgacacattcagagaaatgccctaaattctaccaaccgaaaatttctcaatttcagtactaatttctaaaggtcccaaatattcatagaagatccacccaatatgaaagcaactaaccagcacttcaaatcacctcattttcttattacgagctccactttagctaaatttccaaagcagaacatgcaaaatgctaacatagttaaatgtctatttggttatacataaatggtgcatgtccattaatgtataatacattttgaatgcaaaaggtaaataccctttatgatttctcaagctaccatcaaagaggctccagtggtcaacagcaggagggtgacagaccccttcagggacctcaggacccccggtgaagcaaggtaggagtatagtaagtggaggaaagcagttgaggaaaagaaaccaagaggctctgtttctactactggaaaatggtttaattaatatctgctaagtcatcgatatctatgactgcacaataaaatgaaagtgcagggggtccagatgctataaggatgaagacaaggaaccctgcacaatgttctcagtttatttgaattacataggccactgaaggcactgaaaataggacctgagacttccaatacccaggactttgtgggatgaattcctgatgttaaactccatttacaaagccttatgaaaattacttaaaacacagaattttcttttagcttcccccttggagaaaaggctgatataagtcagtgattttctttttcttttcttaatttgtcacattgattttatttctctgctttttttaaatttttttccatttcaatttttagtagagatgaggtctcactgtgttgtccaggctggtctcaaacccctaactcaagtgttcttcttgcctccacctcccaaagtgctgggattacaggcaagagccaccacgcctggcccttcagagattttctgtggctcttcttagaacccctgtaagagcacccgtgggtgttgctgtgcataagacacagcctgggtggcattcaggattgtgagtatctgagcacggctcccggtcagctttcccaggtgcagcttcacaatcactgtcagcagctctgaccatccagccctttatctctctgctcctggtgtcctcatgggtaaaactgaaggcaacgtgctctctctgccagtgaagattaacttagacaataaacaattgcctggcaaggtatctctcctctctgcccccttcttccaccttttttcactggggagctccctgtcttcctaacatactattttgacccctctctaggcttttggggttctgtagcacatctattatcctggtcagctccctgaaaaccctcagacttgaaacgagaaaggctaacagtttttgcctttgctgtgtatctccccaatcctccaatatattgatgccaataattgtcactacagacaccaataatcaatactgacatcaaacaggagaaagaaggctgagggctgcaagaagtgatggtggaaggcctggcccccagacactgtcatctgtggtgtgattcatggttttaacccacatgtgcagtacacatcagcaatcgaaattatgcaatgaccatgttcttcaacctgtccatttcccctaggcaagcccacattaggaatattcctacagaagaattagggcaaaggagatatgagagttctaagcaacacaacgggcagtttaaatgagctagtgtctttttgttgctatatgaacgtgctttacgtagtcaatgataaatcatcatgaggcaaagagcgatattttaagccaaagcaaagctttggtaaaagcccagtgggctcttggccccaatcccatttgctggaaaggtgagatgactgtgagaagagggtgatcatttgatcacaaggcggagggaggggccagttgctgaaatcagctctctgtgttcaggctcgactcggataaataggaactgttttcagagccagctaatagtatcaaagtcagcacaagcaggaatatgcacgcagcacacaggagggcaagagcagagctggttttggagaaacacaggctctctccttcgatggaggtttccttttatttctgtttaacttgggtgccaataaaggccctcgaagtcaccctgaaaggcatctgctaagcctccccaccatgcttgattatacctagaaatcctcctgcccaaactcagccacagtgaccactggctgaagcactttaggcattttgtcagaaactgttggcacactgtagagagcctgaggacatcccaggaattccacaaaggcagtcagtgaagaattgggtccaaacaatggtccatccttattacacccattaaaaaccacattctccaagtggaccgaaccaagaggtgctaagcagaaagatctggatctaaggctatcttctgtatgatctcaacttgtaaaatttatctttttttttaacaaagctggggccatactgtataaggtgtatatatacatttaaatagtggttacccctgggtaatagattgcaggtgctgtgttaatgaatatatattacattcacaattgtaaagtatctatttctaaaaatggaaatttagttacagatcatacagacagcactcaataatcattaattcatccagtccataagctttttcaaaaacttactctgttcaaaaaccagtaaaaggaggaaagcacataatataaaagaaactcagctgagaacggtggctcatgcctgtaatcccacctgagggatcccacctgtaaatcccacctgtaaacctcacctgaggtcgggagttcgagaccagcctgaccaacgtggagaaaccccatctctactaaaaatacaaaactagctggatgtggtggcgcatgcctgtaatcccagctactcgggaggctgaggcaggagaattgcttgaacctaggaggcagaggttgtagtgagccaaaatcgcaccattgcactccagcccgggcaacaaaagctaagctctctcaaaaaaaaaaaaaaaaaaaaaaaaaaaaagaaagaaagaaagaaagaaagaaagaaagaaagaaaagaaaagaaaagaaaagaaaagaaaagaaaagaaaaaagaaaagaaaagaaaagaaaagaaaagaaaagaaaagaaaggaaaggaaaagaaaagaaaagaaaagaaaagaaaaaagaaactcagtgagttacagaaaacacaaatccacagaggggcacatacaaataaaaagccaattttgttgacattttattctaataaaagtataaaacactagtcttggattattaaaaaaatagaacctaccatgttttgagaacttactatattccaggcactatgctagacttttacttgcactatctactaatctttcagttatcctttaagttaagtgttttacaaatgttacaaatgaggaaagtgaaatttagggagactccattgccaaataacaagtaattggaagagacacattttaaacatgtgtctatccatcttgatttgccctataaataaataaaaaggaatgtaaaacatttagtaacatagcaaacaaaaaaaatcatttaatttcaacttatgagctcatagagacaagagttaaggagtataaggacagagcagcagaatgagagaatagaaaggaagaaaaacagagaagtgaatggtacccagacattagatcaaatatcaagtttaatgatccagcaatcccactctgggtatttatccaaaagaactgaaaacagaatcttgaaaagctattagtattcccatattcactgtggcattattcacaatagacaagaggtgtaaacaaaccagatgtccatcagtagataaatggataaaggaaatgtgatacatacataaaatggaatgtgattccacctttaagaaaattcagcaatatgcaagaacatggatgaaacttgaaattaagctaagcgaaagaatctcatcacagaaagacagatacagcataattccattcatatgatgtatctaaaacagccaaattcatagaatcaaagagtagaatgatggctgccaggagatgcaaggggggaaatggggagttgctaatcaatgagcataaagtttcagcttagcaagatgaataagttccagagatctgctgtccaacactgtaccctatagttaacaatactgtactgtacacttcagaatttgttaagaaggcaaatctcatgttaagtgttcttaccacaataatttttttttacaagacgtaaacatctcttatctggacagtgaaatcatatttgttctccaagattgtgaatatctgattcacctctacatacagccttaatggctaaaccttcagtctccattgcggaaggcagagccacagtaggaaataccactttggcttctgtaccctggctggaacaataattccacacctgttatttgcagcagcccagcagaaattaaaccaagagttgagttctacccactggccacaggtcctcacacctaacttttcctgcttacattagttcatcttgcctgcaggtgtctcaaatatttttccggtgcatgggactcagaaggtttcattaattccctataccataaatgttagtaataggagctaattattaaaaccttgattttactgacaagatagctaaatcacaggaaaagagatgaacctttgggtgttaatcctcaaacacggtctgtctacacagcttaataagtggactaagtaaatgacccaggtctaaggacacgcctctgattgctcacttctgttccagctctaacattctaagttcaataaacactgctaagactgattttttgtcttcttctttttttttttttttttttttgagatggagttttgctcttgggcagtggcacaatcttggctcactacaacctccacctcccaggttcaagtgattctcctgcctcagcctcccaagtagctgggattataggcatgtgccactacacccggctaattctgtatttttagtacagacggggattttccatgttggtcaggctggtcttgaactcctgatgtcaggtgatccacccacctcggcctcccaaagtgctgggattacaggcatgaaccaccgcacccggcctgtttttgtctttttacaaatatcactgtgaaaatgccactggagtttcacagggggctttggagcttcaatagagggcaaggctggtgtcttttacatcttacccacataacacagtccttttctacagcctaaacagttttctcaaagggcctcagaaacactgatatggatagattatccatatgaaagaagagcgagagaggaaatgtctttctatcttggtcttatctaaagatggttctctgcaggaaggggaatcagggtttttcaaaaggtccagtgggtctctttccccatggttgaagatgagggtacccgagagccagtagatgatgtcaaatggtctgtccccatctgcagttctgggacacctctttagaacacttgggtgtgaccaaaggaaatatgtgttatatactacgtgttcaaagtttaaacaaggtgcttccccatttggttcaaatagatatgtgggttatacacttagatcctcttttatgccatctattctaaaggaaggttaaaagcatataaatatagccctaatttgccaccttgagaaagacattgaaatccaaagaaaataaaaatagctaccatttacattctatggaaatactacataccgtgccagtacttaaaatattagttctgactctaactgcaaccttaaaaaaaaagcatcattttctgcattttgctaaagtcgaaacattggttcagagagacttgaccaagaccatacagctgagaagtgagaaggtcaggatttgaatccataattgactcattccaaaggtcttcccatcattctgaactgcttccaaataaattgtaccaaaatctttctgtaattctagcatttcagcttatattttaccaaagtcaccctttctaaaacgtcttggccaactccaaatagtccccttatagcatcatcatacctaccacggcataggacccaatacaggtagaactttcacctcacaattcaagtagaaatactgcccaggggccaaattgtaaagctctgtattgaggtggctgccttccaaccaattagactaaaagtacctgacaatgcttccaaggaggtcttaactaaagagatcaatctttttaacagataatcgggataatttctaagcaatcaagcacctgctcattatccgctgttctgagcggagagtatttctccaccgtgcctgaatcatctctgaacctttcataaaatgctctccacttccacagtatgcagcctcagacagtaggtgcaaaattcaatttttacaagtgaaagtatattcttaagttgaactgtatgagattgctgatatttgacaaattttgtttcacaaaaaaatggcaatttcaaacggttcaaagtaaaccttaggacagaggtttagctgcaggaataaaagccaaaaaaaaaaaaaatagcagcttctgtagatatagaagtctcctgcttcctcatgcaactgtgctagtgtaaggaacccaggatgccacagcagttccatagtacagaggacccatgctcctccatgctcatattcctgctgtactcaacatgtgacatggcaggagtccaccccatagtctaaaggtcacagccccacctcccaccatgacatccacatccaaagaccgggaaagggaaaggcagcagtggaacacaaacctctccccttaggatcaagacctagaagttttctatgcaccttctgcacatctcccactgatgagagcttagccacatgacacatctagccacaaatgatgctgtgaaatgctatcatttatcatatatgggtagttatatcccagcaaaagttggaattttattactaaatgaaaagggaggaattgatactgggggcaacctgcaatctctgacatatagtaaggaaaagaattgcaattggcaaacaatcctgcagtttccatgatggatcatgtaaaattgactgaactggaaagctctggaaaagcacctggaaagatgaaaattgagctattgaagtaagcttaaattaagtggaaatcagaattcttggcatatggaagttgctaagaagcagatatagaacacgcatgagttctctgatggcctgggaaacatctgccctttggagaaatcggccctttgccaattggtagagcacatgcatccaggctttgctctcatctttctcagtctgtaaggtcatatttggaggcacatctttatttctggtgttcaacttaagatgagctgtaaaggttttgtaagatgttcatcttgtaagaaatgaaattaactcagatactcaagcattctttatgatttttccaaaccatctttcgaggcactaaggccccgaggtagaagtgcctctttcccagatcccacaagaccttaggcatcagatttattaaagcagtttaagttgctgggatataactactgtgcaaccaaaaagagctgattatcacatcagtttgccccactttaggaaagtccagtatattaaagaaaaccctctccaaagttaaaaagaaggtaactggaaggtcccagcgatataagtataatgacacgtaaagcaatgaatgaaatgtaaaggcataaaaccttttcaggtgccagaccacttggaattactcccctacactacatgacacctgacattctctcaactcaatattgcagaataacttcaccagaactgatgaaaagaacattgcactgcaaagtcaaatgagacttccgagatcaattccatacttaactagctaagtagtctcaagcaaattgcctaaccattcatctctgtgcttcagtctgttcatctgtaagatagggataataatagcacctacttcataggttcactacgagggtgaaatgagttaatatatgggactgctcatcacagagcctagcaggggaaacacccaattctttattctaactggacttggcacaagaattaagataccttgagtgcaaattttccattacccttcattaagtctaaaaagggagataaaacctggaagccccagctcatagagccctctttcccaaagtggaatgaacgtgcccccttcatccatggtgcctggcaagctctgccacaggaggatataacagaaggaagaagaaagccttcccctctgcaaaaaagagtaacaaaagtggaagaaaatataccccaattttctcctctcctccctgagaagtgaggataatgtcagggtcagaggggagctacagtccttatgccccactgaacactctggaaagatcacttcttgggctgcccctctcaccagcctagggcacagttacatcctgtagctgcacagtgtagccaggctaaggagacctgaagttgagattaccccagctgcccttaatactcatgtagtgaagacacagcaggttagctactgtagcagtggccacgtggttctgtagcaagggctggggatcagagcccaatgtcagtgcagccagatggcagagcaatgaaggtgagcctgagccagtgggtgcatgccatgccactggcctctgctagagccaaagatggagatcgtgagttaatgaaccacatatacatgcagggaataccactcatgtgagcataggacactgctcccagaggacaggaggcagaatatagcacaccaaagaacctctgacaccacgagattagctgtatcacaatccttcccccaatcatctacacagacaccatgtgtacatctcctctgcacaagcaagtcgtagtctgagtttaaaatggtgaccactcccccacctgattcaaacacaaaatgtggacagttcatgagagaaacgtccctacgattatgtgtgaaatatataaagataaaatcaattatcactaaacaaatatgagtcccatggggatgcaggagtgaaaaaaatacaactcagcgaaatcaaacttagaacatgaaaatataggctttctaaattctcacaactgtggacaggactataaatttgatgcaactttggaaaactgtttggtaccatctctaaaagctaaagagggcctaccctaatgaatcattcattccactctcaggtattaacccaagataaataagtggttttttctaccaatagacatgtataagatgtgttcagctgccttattcaccatagcctaatactggaaacagacaaaatgcctaacaggtgaagaatgggtaaataaattgtgggatattgtacactataatataatttatcaataaaaaaagaaggaactgctcctacagatggcaatacggatgaatctcaatacatgatgaggagcaaaagaagtaaaattcataagagtatatactatatgattccatttatacaaggttcaagaacaactgaaattaatctatggggttagaatcagaatagtggctacctggtagtaggaagtgagcagaggagaggaggtattagctgggaagaggcatggaggagctaatggattctggaattaccctgtgacttcatctgagtagcagtaacacaggatagatatagataagatatagatacagatagaagtagatataaatatagataatgtagatgtagatatagattttgatttagtattttacataaaatttttacatatataaaaatgtatgaagctgtacggctaagatttttgctacttactacatgtatttcatacctcattataaaagcttcaaaacaacatacatgcacagtcttttccacttcaatttaaggaagcaaggtgtgagaggaatgtgtgttaccccaagggggctgatctacacccaaactctacagggcatcatctaatgtacgttggaaataaatgtagacttcccctggtcacctctgatagagggttcctctcatttacctgggccacctctaaacagagatctctagatgccatgaaatggacaactagaaaaagtcataggctgtggtgactcaaaaactgaattaccttaagaaattttgttatcccttaaataacagatcaaaataattattttagagatgtgtgacaaggaacctggagtggcagaaggcgtgcaccacgcatttatgttgaaactatcacaatacttgggccaaatcctgagggacctagaaaatctgagtcttcaagggcaaggaccataaccaaaccaagaataaaccatgctgggtgcccaggtgccagcagctctgtcatccactgatgacttaattctccttcctgctcttcaagttttgcagaaatatttaagccaagagtcccttaatactttagactcattgttggtgtttatgctttttaagtcacagatctttttgaaaacctgataaaagttacaggcacccagaaaaaagttataagatgttgcatatatcttgaggtatcataagtaatacttagtagctcctaactatggaatggaaaaaaaaactggaattgtaaaactactaaggggagtatgaaacatttcctcaataatccaaaccagttagcagacagtaagtgtaactttatttatactatggctaaaaactaattagttccttatattactttactttatgtttagctggagttatgcttaataaatgtgttagtaacactggacatctcgtactatgatcttgctttattttttaatgagcaaatgagttaataattgtttattaaacagagtccatttcataagaaaaatatatttttgaaatatgcagtaacaacataggttaatgcaaaagacagtataaatgcattattgcttataactcattatgattctatctgatttaaaagagttgcataggccaggcgcggtggctcacacctataatcccagcactttgggaggccgaggcgggcagatcatgaggtcaggagatcaagaccatcctggctaacatggtgaaaccccatctctacaaaaaaaaaaaaaaattagccacgcgtggtggcatgcacctgtagtcccagctactcgggaggctgaggcaggagaatggcatgaaaccgggaggcagagcttacagtgagccgagatcatgccactgcactctagcctgggtgacagagtgagactctgtctcaaaaaaaaagagttgcataaagcaattactataaatcttgttgacgaacataaaatatataaacatgtaaggtgtttgacaatcacaatacaacaaaagagagaaaatggagctacacaggagaaaaatgttatatactattgaaattgagatagtattaatctgacctctattgtgacaaatgtagatgttaactgtaatcccagggcaaccactaagaaaataactcaaaaactatttgtaaaagaaacaacaagggaattaaaagaccacacaagaaaatatctatttaacaccaaaagcaggcatgaaaaataaagcaacaaagagaaataagatatacatgacaaacataaatcctgtcttttcagttaattatgtaaaatgtaaatagacttaatactccaattaaaaggcagagattggcaaaattgatccaaaaaatctaacaaaatactgtctatgagagacaacatttagattcaaagacacaaataagttgaaagtataaggatgaaaaagatatctcatgctgccaggcatgatggcaagtgcctgtagtcccagctactcaggaggctgaggcaggaggattgcttgagtccaggaattcgaggctgcagtgagttatgatcgtgcctgtactccagcctgagtgacagagcaagaccctgtctcttaaataaaaaaaaagatacatcatgcaaatattatagtaaccaaaagaaaactggaatggctataaccgtatcagataaaaatggactttaagacaaaagttactactagagacaaagaaggacatttaataatgacaaaaggtcaatctatgaagtagacgtaacaaatgtaactatgcacctaataaaagagcactaaaatacatgaaggataaactgacagagcggaagaaagaaatagacaattcaacaacaatactgaagactccaataccttagtttcaataatggatagaacatctagatagaagatcaacaagaaaacaaaccaactcatcctaacacacatctatagaacactctacccaacaacagcaaaaaacagttattctcaagcgtacatggaagattctccaggataggccatatgctagactataaaatgagcctcaacaaattttaaaagattaaagtcacataaaatattttctccacctacaatggattcactgtctatgcttaacaggaacaactatgggccaatatacatccccaggagagccctacaaggacttaggtctcaacctatagtttaggaatgccagtggtccccatggtcacaagcattttgtaaagggatggaaacagaactctggataccattttcctagagactctcagagaaaatattgtgttataaaatctgtaggttaaaaaagtaggatgtcttacacaaatgtctcatatattaaagaattacagagtaattacagagaaaggtattagactgttcttcaacatcctaggagtgctgccattaagttgggagatcctcccaaggtttggaccatctacgctatttaaaggtttgtaaccattatcagatagaggaaaagattgtctgctatgaaagattctcttccctaatttaggattccttccaagctgcaaatcacctgaagctgattattcctaagtccaagaccactgcctgcaaaataatcaagtcaatacccataattaagtcaagttgccagccttaattatatttctctctcgctcgttcactctctctctccttccctccttccctctctgccccacccccgtgtacattatataccaattcattggagatatatatatgtgtgtgtgtgtgtgtgtgtgtgtgtctgtgtgtgtgtgttaaagaagcaggatgtcttacacagatgtttcatatattgaggaattacagagtaattacagggaaaggtattacactgttcttcaacaccctaggcagtgctgccataagttgggagatcctcccaaggtttggaccatctatgcatctatgctatatatatacatacatacacacacacacacacacacacacacacacacacacacacacgtgcaattgattaaatgttgattaaatgttaggcatccaaatgcaattaagacttttaaagacaaaagcatctttatagatgggtgacacttaagaatttgataagggctttcttttttttggatttctgatggtttaaaataagagacccttctctcaacaaatccatgaaagcatactgggttggagtttactgctgttgtaaaaaaggattttggatgacagatagttcagagggcaagtcagctctgaaccagtgtcctggctctgtgtcaagggggcaactatgccccagaaggacccttcaacaggtaagggtaaaaatctgatcacacaaacgagggactgctaccacagcagtggacccaattagggtccactttgcctagttaaatatccaaatgagagaagagatcatttataaggccagtgtctgcagtcaattctctattctacagttcttatttatgctcaaggagtaaggacaaagtgtcagaggtatagaatgcttcctgactcctgtaatcagcacacccttactcctcttgtctgatggctacaattcattcttaggatcttagcttgaaatctacctactttaagtaactgtgttcaaatcctctgactctagattagttccctagttacaaactgaactgtatttttatcatacataagttaaaattactatttttaactaataactatgtacttagtagtgtgtgcaaaagtttatctcactatcaactcctgctgctctgtatgctcaaccaggacagctctgtcaactgctatattatgagtctctagaaagtgccttccacatattagattctcaataaatggctctaaataaatgaattctaccaaattgacttgacaatagaatagataactaataaagcatatgaatttaacatcctttactcaacaacttttaggtgccttgataaaagtgcatttatgcatgggtctatgcatattttattaaatcattataggcacgtaaagatagggaaaaatcatatatatatttattaatttgttaaattattatatattcaagctcttcccatttatgaactcagctttcaactaaataactgcatgagagtaagatgtaaatgaccaaaatggtggttttctcgtttttgtacatctgttctaagtaggttcagggtgatcaaaattgatatatgattatcacatagcaaatatttcaaaactaagatcttatccatggctttatacgacatcattcctcaaaagagatttggtcaatttgtgttcaggaagtacatctacagccaaatagtacacttaaatttagatctcaaatcaataagaatgatgtttcagcatttccatgtggaaaggtggcccatagatgcagtctcagaaaatcgtgattattatcacttcaattttgcatgatgctgtatagatggtcttactatattctttcatgggtaaattccttaaactctgtggtgacagcatttccattatgtaaatgttagccatttactgagaatgtaggaaaaattatatctgcaacacaaggaatctttacatcttttgtcccttttacaggagcccactgggccacttattttctcagaagttctatgcaggtggcccctagtgtaaatggctagaaagtcttttaaaattgtgtttggacagtaaggtggaaatttccagactttaaaatatcagaaaaatgcatcattttaagaaagattctttcccttctctacttattttctcctaaggtacttcacaatatttcctgtttgaaatttagtcatatatatgaatgtatgtaatatatgtaactatatatttgtatgtatgaatacatacacacacacacacacacacacacgcacaaacacatccccttagatgaactgcaatggcccaaaagatagtcaacttacaggaatggataccagaggtcctctagggtagtgtttttcaaattgtgggcttagaataaatttagtatgtcccaaagataattttctcaaaagtggaagagtagagtggaatgaaatagataattctaggcacaatgtgtgaggatattgaatctttcctaactttggaacacgggcactatgagcaaatcttgggggagggggaatttgtatgtgtatatgcacaagtaaatttgagaatggcttgtataatttgggaatggtttgtataatattcatggatattcatttgtaaagagctcacatatgtggagctcagacatactgaagctgagtctaacccaggagagagaggcttccagctcctgcctccaccctaagacccactggtgagggcaccgtactgtgctcttgttccctgcagtgctcatccagggataagaacggtatccgaatgctggactcacattagggaccctttctcacaaggctgtagtaaaaaccattgactcatttaaagaagggaaactcaccatgggttcctgaaattatcacaagagacagggacccctgggaggagtaagagattttcataataattgggtaggaaggagaaatcatttaattcgaatatttaaagaaatgggatctaatttcatacaccaagtaaagggggccatattgtttatacaaatatctcagctatgacaagttgtttggtctattaaaaaagctagttttcaaatgtaaccaaatatgcttgtgttaaaggagaatggtaacttttattaatgttaaaatctgagttcctacagttcttattttctgttgtactcattcctagagaaagaaggatacattagtatatatatgtttgcattaataaaaaaggcagaagaaggaaactctactctgttaagaatgtcccataattattatttttaatttttgaagtttctaatacagccagagaaaataaccctagtggaaaagaaggcataagctttgtaaaatatagatgcaggcaacaaaagagatttcagatgatctgaaaaaagagaaaccccaatatgtctcagagatttggtctctgaagtgtcctcggaagtaaacgtggccatataaactactcttctacagatgggccctgggcctcacagtacaaatctccttgacagaggaggatcttcctttgcccattctttttatacatgcacaccatccacaatatttctccttgagaacaaaaaatgcaggcatcggcaaagcgacaatcgaaaaagaatccaaatgtcacacaaccagacagatggaaggagacaacattgttttcttaccatatcactcaatcaacattgcactgaagcacatgactctgccaatatttgactgtttgactcacaaatatgacaattccacatgattcagcctaatatttatagcattcccaccatgtatagaatccataagggtaattacatttgctgtactattttcacaaaatgacaaagcaaatgacgatgaaacccttatgataatttcacaaaagtcacagaaagaattgtggaaggattctttaagacaatgtgtttgcaggagtgggaggttaacaagcaaggacatggaaaggcaaatcagtacatcgtcactgagtacatacaattcgcaagatatttggtccttgtcctcaagtacctacaatttagtttggaagatgtaatgcatgaaaaaaaaattgcacctaagacaattatataataatcacttgggacagagaaaatgacacaaagaatatcaaactgggcaggtccttagaatttaaatagtctaactcccttattattattattagtattagtattagtattagtattatttttgagatggagttcgctctgtcgcccaggctgcagtgcagtggcacaatcgcggctcactgcatcctctgccctcccggttcaagcgattcttctgcctcggcctcccgagtatcctgctcactacagtcatggtaaaaaaaaaaaaaaaaatgtttaaaggcagtgcttcactgatttaaatattgtatagaggtcaaagagagttaagaccaaataaatgccactggatttcacaaatagaagaagatgggcaaaaaaataaataaataaaaataataaaaaaataaatcccagagagatcaagtatttaaataaaaaggcatttcgttaaacatggcaggctgactgcatgtgcttatttccatctcattccaaagcccaactaaggcgacagtaaaggaataaaaaattatgaacatacaaggacaagaacaggaaagccagcattagtgaatacaagagttccatacattttacagatgctaaaaaagatgaaagaatggaaacaagtcagcagaatggaggaaactataagaaaaaaaaaagtgtgcctatacaggaacaaccaatgaaaaagcaaccaattatcaccacacagttacacacacaaacacactcagggttaggacctggtcccaccacacaccacacaccatagaaggtaagaatgaagcacaacactgacaacaggggactgtttgaaagcccgggaatataggatacttgagatttcaggtccattcctcaaccccaacactggcaaaagaagacccaggatgacatgtatgcaacaggtctacagaaaaatcagcccagattaccacaaaagggcagaggcatccaaaaaggatatctccaggatgagaaaatgagcaattacattatttgatatattgaacctcgaacaataatattgataaacatttgacatatctgatgaagcaagaagaaacaactttttaaagttcatttaaaaaataagcaaatttttaaaggcaaggcaattattaactccaggaaaaacaaaaagctgcatgaaaaacttaatcctcacataagacttcatgaaaactttaaactgccactcatcaaagggtaccactaagaaagtaaaaaagcaaggcactgtctggaagaaaatataagatgtccacctgataaagaactcatatcctgaatacatagaaaactaaacagcaacagaaaaaagacaagcaacccaaataaaatactggcaagagactttaatgaaacttcacaaaagaagatatcaaaattaccaataagtacatgtaaaggtgctcatcagggaaaagagagtaaagtaatttaaaaggtatgaacataaaaagacaaagaacaagaaaggcaaaagaaatggtaggtaactgggatggaagaaacattctgttacttatctgggtggtagctatgcagatatccatatacatagaaactcatgaagctgaacacttaagatttgtgcactttattcaataaaaattggacttcaatctttaaaatgtaatcttttgcaataacaatttttgttcagtgtataattgggggaagaactagaggagaaataaaaaagttaaatttacatatcttcaccatacattaaaagatagatcaagaaatagctgtataagcatatttttgagaaatctcatggttagcactattgcctctaacaagattgtaggttgaggagaggggaacaggggactgttatttttctttcttttttttaaattttaccttaagttctgggatacatgtgcagaatatgcaggtttgtcacataggtatacatgtgcaatggtggtttgctacacctatgaaccccatcatttaggttttaagccccacttcaaactatactacaaggctacagtaaccaaaacaacatggtactggtaccaaaacagatatatagaccaatggaacagaacagagacctcagaaataacaccacacatctacagccatctgatctttgacaaatctggcaaaaataagcaatggggaaaggagtccctatttactaaatggtgctcggaaaactggctagccatatgcagaaaacagaaactggaccccttccttacaccttatacaaaaattaactcaagatggatcaaagacttaaatgtaaaacctaaaaccataaaaaccttagaagaaaacctaggcaataccactcaggacataggcatgggcaaagactctatgactaaaacaccaaaagcaattgcaacaaaagccagaattgacaaatgggatctaattaaactaaagagcttctgcacagcaaaagaaactatcatcagagtgggagaaaatttttgctatctatccatctgacaaagggctaattatccagaatctaaaaggaacttaagcaaatttacaagaaaaaaacaaccccatcaaaaagtaggcgaaggatatacagtttttcatgataagctttttactaacatattttttaactgcacacataaaaatgttaaacaaatattaaatatgtgattatttatataaacctgggatggagaaggtctttcagggacgcctctgtgaatatcatttattttgccacccagtgtccactccccattctgtactctaagttccctacctcctccactaagagtccatatcgttcaggggaatcttcattcctggctttcgcactggctcatgactcaggcccaattcaaccagtccaacccgtggtcttggcccttgctctcagagatgttttttcttccagagataggcacaaggcccagtttgggccactgagagttataccaaagagttctgtaaaaatgctgaaggaggccgggcgcggtggctcgcacctataatcccagcactttgggaggctgaggcgggcagataacgaggtcaggagattgagaccatcctggcaaacatggcgaaaccccgtctctactaaaaatacaaaaaaaaaaaaaattagccggacgtggtggcaggcacctgtagtcccagctactaggaagatcgagaccatcctggctaacacggtgaaaccccatctctactaaaaatataaaaaattagccaagcgtggtggtgggcacctgtagtcccagctactgggcaggctgaggcaggagaatggcatgaacccaggaggtggagcttgcagtgagccgagatcgcgccattgcactccagcctgggtgacagagcgagactctgtctcaaaaaaaaaaaaaaaaaagctaaaggaaagatatggtctgcatatacttttacatatacatatgtataagaatatgtatataggctactataggtaagatattcatatatcttatgtgaatatatagcttttattcattaaaagctaatctaaatttatatgtacaagaaccatatataaattgttagatattattattattagcaattaaattccttttttccttaagccagtttgggttgagctttctgacacctgcatgtagcaggatcctgactaattcaaccacgcaaaagagaaaccagacaaaaccaaccaatagatgtaagcagatatacataaaacatcaacaaaaacattttctcagtagaaatcaccaaacaatttaaaagtaaatagaaaaggaagaaagaatggttgtaacccttaggcttgataaagtttttgcccttactaataacaagacagaattgctacagaaaacgggcagaaatataaaagcacaattcaagaacaaaaacacgaatgcacaaaagtttgctttttaaaaatcaaacaaatgaaattaatcatgaacaaattttatccaatgacatagctaaacattgttttaaattttattatccagagttggcaagtgtctcatggactgctgatgagaatgtaaattggtacacctttctggaaggcaatctagctataataaaaataggcaaaccttggatgcaataagtcttcttctaggaatttatctaaggagataattaaagaggtgtgcaaacattctccctacaaatttgctcactgacttgtatttccatatagaaacactggaaaaatgaatattcaaaagataaggcattcagtataatccatacattccaatagtgttcaataatttaaaatattgatggaaaatatgtacatgtatagaaggatgttcataattatgaagtgaaataaacaggtcttcaactatacagcaatgagcctgttttggttgtataaatacatacacacatggaaaaagatctactcagatacatatcaaatggtagtaaaatttccgagtagtagaattatgtgcttcgtaatttgctggagtttttttctgcttatatgtacatttcagccttgtggtttttttctgctgactaatacatttcagcctttctccaatgaatcttcactgactttcagtaagaaaaaaacgtatttaaaattcctaaaaagccatgtcacctctaaaagtgatttcagacatgcagttggagcctaaacatatgcaagcttttaggtgaagcacagatgataagaaagtcaagggagtggactctcttttaagaaaatttggttgtaaaaacaagaagcaaagggtctcagggacatatatggtctatagttattgggatgaagagtcttctctggagaagaggaagaggccaaaggtgtagaaagagggaatcacgtggggatatgtctaatggagcctctgacagtaacatactgtgctttcctttctccagcagcctccatttgggctgggctgctttacctggatgccaacatgcccttttctctttgtgccaagcatatcctgatgctacacagactcagaaaggggggcagaactcaccctggggaagagcctatactctcagcctcttagtgtttgaacctctatactaggtgcggcaggcacttttcatcagcacctttccccagtgaagaaaataggacgcttgaaacccccaagagggtctctcacccccgctcccatagaagactgaccaccatccacaactgcagtcataaagtacacttgaccttgatcgtgaaaaagtgagttttgacaattcacaggacttgaatgctccgtaagagattaggttttcttttcatttattttgagcatattaacagctggtgacctagattaagaaataattcaatatgtgaaaaggcagaccatatcactaaattccttcacagatggaaagtggattcagtgaaaagcctcagaccgaagagtcaagtaattacttggaaggcaggaggaggagtacctacaagtgggtaaaatgaagtgtggaaaaaggatgacaaaacctggcccagatcccaagccagcagatccctggctactttctgcacaagtaacccgggcctggaaggcagcaggcagccttgctaattcagctgcggagggagaggcaggaggaggatcactttagttcaggatgagcttgggtagatattaaaagaaatacaatcctcttactgcatggagagtgtgcatgtgtggagggagggactagaggcagccaccaagcctctgggcctggggacaaaagggatcagtgccccctctgctcagcaactcatggtcagccggaactgggaggcagcctgagattgagattgggtctgaagagggaaattcattgccatcctgagcaacatggcaaatctgacttccagtaaaacaggaaaacgctaaacaccccatatcctagggacggaaaatactgccacgtgaaagagaacacagttcaagtgataccaatcatggggctcattagccggtgttgattttcaagtacaatgctcaagctacaatataaaggaaatgtcctttgctcaggacacaaatgaagacctcagggccgtcatatacagcagtcaccagggaagccaggcaagcctggtgcctggtacaactcccctccacctgctttgggctgtgcttgctacggacctgggtttcattcatgcacgtctctggggaaaaaaaataaattactgtgcgcaatttactgagggacttgcaaaacaacagagaacccaatttgtgcaatctggattttttaaaatgcaataaaaggtccttctttgtgcagaaatatgcagaaaggaactattaggttcaggtcatatttatttttgaccttctaaagaaggacactggagtcaaaagggacacaaacatatagaccaaaattaaaagtgtgtatatctagatctctgttttgaactccagaactcaccagacagcactgtgtgatcacgatcctaccctattggtcctgggagatttttggtggcttctctgttaaatcgttcgtgtctgctgcacttaagtagccacaaaatcccccgcaagaaggaaggctgctgcaatctcccgccccgatctgcgggccgcgtccccgcgagctgcctgcgggcgcgctgggagccggcccggggagatgcgagcgcagggagatgcgctctgctccgggcgcagcgggcaagctgccgcacctcctacttctgttgcctggcttggggccaggagagcggcaacccggggccggctccggagctggacatatccggcgtctccggggccagggtctgcgggtccccggcgctgcgtcctcccgacccgctccccgcggcgcccgggtcgcgccttgcggcagtcaccgagctgagggcagggcgtcccagcgtccctggccccggccccgctccgcagcgcgccgcaccccgaggctcgggccccgcacagctgcagccggtgccctccggccaagcccccgcctggcgtccccggccccagccccggccgcccgccgctgaccttttcctgcgcgcggttgagtcgcttctggacgttcttggcgaagatgcccgtcttgatgtcggccatggctgcgggtccggggagctgcgaagagcagagcgcgcagcggggctggcggcggcgcggaggagcgggaggaggagcgggaggaggaggagagggccgagcaagggaggagcgggagaagcggcggggagccgcggagcgcggaggggtgagggcggggcgcggcggcgggaccagcttaaagcgacagagcgggggcgggatgcgtcgggactggctgtgacatggggagaaggggcgggggaagaaagagaaagaggccaagaaaaagagagggaaaagccagaagccagattgtctcctcgatgatagaagagtttcgagaggagaaagggaaccaagcctagcagaagtccctgggcccaggggcagctcgggggttcttttaatgcagtttgtatttggggagagtgaggggacctgattctttccagcaaaaaaagaaataggggagacaaaaaagggaagaaccctagggatgtggaagccagctggattggaactgctctgaagtggagctgatggggctggtcccttgctgctcccaaaagtttccagctaacagaggcccctccatacaccctgggtgttgcagaagaaggtatggaggtcgccctaccctcaggaggctcacagcccagtgaggggccctggctgggaaaccaacgaagtcagagctgcaggagagaggcgtgtggagagcaaagcggggagagaccatcgctgacacttgtttaaactttaaaacaagagttagcagggcggggaggtccgcgttgagaaaggtcagcttccggaagacaggcgatgtgttttggtcatctccaaaattcctgtgctgggcagaaaccttagaatagactactcttcaagaaatggtgcatggaacagtcaagtcccttatagcttcgcatcaaccatggaagacccagtcccccctaacttgttgcttccttggaaaccttttggcaaccttaacagggactcaccatccctattattcttattaatgcttgggagaagtacgaataatagggataaacctgccctacacctagagctcttgttggctctgaccagtggtcaaactattcatattccattctcactgagagtgtgaggagaagaagtcaggtggtgccctgcaaacagaggtcagaagtggtcactcacagtgaatcctatgagtccaggtgagcatcctactgtacctctgggggaaactgttacattggtagacctcagcgagctgccacctggtgttcactcttgtgtcaccctgtagtcccctcaccttgattctagaatgatgctatggccagctttaatcaataagatgtggtgaaagtgacgccatggtaattccagtcccccccccacccacccaacctagaaaccaggcaagttttgccctctggggattcctgtgacaccatataggaaattcagctaattcagctaccctgctgcaaaaataaaataaaataaaataacaaggagaggccatacagaaagggagaggccctgagattacgcagagagagagagagagagagagagcagccaagatgtcccagctgagcccattctccaatcagttcactggctggctgcagccacacaagcaaccatcagcaagaccagcagaagaaccactcagctaatcccagccagagtgcagaatgtgagcaaacaaaacagtttttatgagtcgatcacttttataatgctttattataaaacagtaggtacctggaacacctggtctatgtgcttggctcttatttccctaggataaatatctgccccagtttccttaggaattaaggaatttccaggacacaggactcttagtgctaacagtgggaaagttctgagcaaatttggatgagtcctacttataacactccaagtaaacagaggtttatttcagagagataaaaaaaaatccaccacttggtcaacattcaatgaaaaaggctatgctcagaaaccaggaatttgagtcacctccctcaaacaggggcctttggggctgtaatggttatactgagtgtcaacttgattgaattgaaggatacaaagtattgatcctgggtatgtctatgagggtgttgccgaaggagattaacatttgagtcagtgggcttagaaaggcagacccacccttaatctgggtgggcaccatctaatcagctgccagcgtgcctagaatataagcaggcagaaaaatgtgaaaagagagactggcctggcctcccagcctacatttttctcccgtgctagatgcttcctgccctcgaacatcagacttgaatttcttgttttggagttttggaactcggactggctctccttgcttctcagcctgcagacagcctatcgtgggaccttgtaatcgtgtgagttaatacttaaaaacacacatatatatatgtgttccatcagttctgtccttctagagaaccctgactgatacagggttcagaatctcagctctaccttgggatcttgactatgaggatacaagtctcagaatgctggaatacaccagaagtgttctagagaatatcaatccatagtcactcttgcactgtgagccccagagccacctacactggttttagatacagctccctctgcagacatcactgccctccctctgtcaggcaagggacaggagttccgagtaccagatttacttttttctgcttccttagagctcaagccctcagtcaccaaagtaccagcttttgtctgtcccgtaattattcccaccccacccaaccacatttttggaactcaataaatatattttaaaataaaattgcaaattattaatttttcttattattcagatgcccaaatctagttctgtaacataggtggaaaagggaggcttgtcatttcttaataattctatttggaatacatgctgagcatattaaaaagttgttacatgcaaactgttatcaaaacatttcactccaacagaaaggtaaatcggtgtccactttcaggttgccaggtggctcattctagccattctggaatattgactaagcactttagctggtatttagtagctgttctgtaaatatttgttggaaaatgcatgtatgcatgagaatagctcatgagcatccatcatgcaagatacgatgatgcctggcatgctagagtggggacgtacccactccttaagaaccctgagctaggattcatgaattcttccccaatgtatctttagaaacctaaaactggcatgttggatttgcacagatgctcacagagtggatgaatctagtttgccaaacctgataatgcaggtaaaagagacccctgaaacatgtgccaatgtgtagctttgtagatctttatttatttccattctttaataatgctgctgaaacagaggttgtgggggagtgaaggtcccaactacaatgactttaaacattgttattccatacagcagagtttttcttcacacaaaatgttatgtaaaacccaaatatattaatcagatgggcctctctggttgcagaaagtgttgggttcccagagccccacccattaggccactgtttactccccacactctctaagggccctctgcagaactgcaacactacgctgccaaaggaggggggtctacaggacaagatgatctcagcaggatcattcaactccaaagtggtagggccatgctttcatgcatacttccttcattctccaaccataggacatgtccacaatttcttgatggcttgtacctcttcctagtattggctatccatttttctcccccttcagtcaaggaaaaatacaatccatccaatccctatagatttactgttaatgaaaagtaaccacaattctttctaatttctgggacatgcttagacatcaaattatattcaatctttatttaggtaggcttcacaaaaagtatcacaacaccaactccagattttcatccatacaaggcagaattcctgagtcaattttcacttctgattcaccttccttccaagttgcacttcaaattggctgataagtcaaaatgtgcaaaatgtgaattatgacagatattgataatggatggaatagccccaaaattaccactgtattatcacagaactcattttccacatgttttaatggcacagaagtttatctctcttatctttatatcttggcagtccaatttagagccttagagaattctaggactttgctaacactcataagaattataatataacaccatatataatgtgatttatatgctaaaacatattccaattagctacaagttttttctaattattggtttctttgtgtcattgtgtagataattgaagagacattccatttaaatatttgcaggacctaattgaaattgggttctcaatcaaattatgactacttgctatacttagctttttgttcaaagaatcaaataacttttattttctctcacaaatgtcacttgaaaatggtagtgtaagtaggatgtttttcaaaaatatatattgactgagtatcttctgcatttcaggtgaaaaccatcaaaaatagactcagtcatgcttcaaattaggccaagtgtatacattttagctccacatatatttttactaaattgtgcctgcatgaatactctctttctttcccaattttaccaaataggtttgtttgtctaaaaataacaacttcctaatacattaataatgcatcactaatgtatcctgaaatgctaaataggaagcaagagctttgttttacacagagtcattggccactaaagaaaacaatgacactgtcttaaattgcctaataacttaaacatatttgaataccatctttgatgcttttatgcaaagtagatgcaaaacgactcctataccccaaacaaattgcttgtgcatcacttaatagcttacaagccaattgagaggtcagggagcaaaataaaacagaaattctaattagccacaactctttctgaagaaagagacaagttcctgcaaatatttgatgctattttccatccacaaataagctataaaaattccatgtacaatgcgagaatcagcacatttgtgctactgagagcacctttgtaattgcttttatagctccagcttggacaaaccccagctttgtaacagtgagctacttcaaaaccttttaacaaatgcttaactttatcatatattggcagagacttctttggttcagggaacctatttttagttaacttgatccacatttatatttttgtatgaatatggctttctagatgtgcccacctttgcatggcagctcctgtgccctcacccggctgttttctgcctcccgccctccttgaacacaaggactctcccaaagctgctcctggagctgtggccaccagcacagtagagggattaccttgcaccatgggatcccccactacaatgtgccaccactcagagcccttacttcagcaaaagcccctgggtaatggtgaagccaactcactgctcaccctcatcgggattatgggtatgactccatatgcaggaagcctggattaattatggtgctctcccttgtggtaaacagatcccaacttgcttgcagtagagcctcttccctctccagaggccacacaaccttctggctggtcttacattgacactttcctcactttctttacttcttttctctaaaggccccgaacacgctgctgctgggagccgcctccagggagatcagggagttaggtagtgacggagggaggagttcctatttctgttactttcagtgtaactgctacagttcagcattaaagctcaggcctaaagagtcttcagtgggctaatctaggaggaaatctgttgtggatggaatcgcgtcccttaaaaagatatgttgaggtcctaaccccaggtacccgtgaatatgaccttatttggaaacacggtctttacagatacaagacgtaagttaagaggaagccatactggagtagggtagtcccttaatccaatatgattgatgtccttaggagagaagaaatatggatacagacacacagagcagagaacaccatgtgtagacagacatagcaggaaggaggccatgggatgacagaagcagagattggcgttataaagttgctcgccaaggaacactgtggattgccgtcagccataggagcgaggagaaagggcatggcggtgctgactccttgatcttggacttctggcctccagagctgtgaatgaataaatttctgttgtttcaagccaaccattttgttacagcaggcctgtattagagaactaatatggaatccaacctgtttcttctcaaaatagggcatctcggaaaattcatcccccaatccaaatgactgacacagatctccaaaaacaagatcttcattagttggaacagcctgtgttcatctgttgctctcttttgaaacaatgtattttttaagtgtattatttgtccatattttccctcttaatttagtggaaaaatcagtagctttccaataagcctgtttccagttggattcttgggaagcagaggctgagatggagtttgggtacacattgattacagatcaacgagcctgtgacaggaagcgggggaagcaggactggcagaggaagaagtccagtccagcaagggctccatcctgagcattgccaagagtgtccccatctggctgatgtggctgagcctttacaccctgcccaccaatcaccccaatacatgtggcccaaggagaagcgtgagcacagctgctggagccaacccggaaggcgcaggcaggtggaggtggaggctgctgctggctgttgaagtggcatcagggcagcgggctagtccccttctctctgtggttccagtgtagagctctgagcccatagtagacatgtgttcctcagttctcctccccaaaatagcatcttctgtttcttcaccctcccatattttcatgccttgtacctacactgaggtgtttctgaagatatcttaatactgactcagccatactctcaaagcccagacttttacatttgaatatgggccatttgcctctaactgatgaagttaattatagacacctgtattgtcaagcttctccactctacagctacctgcttcccaattataaaaaataagaaagaaactcgtaaggagatactttgagactatgccaatatcttgtctcttgtcacactctccctctcccacttgagcatgcatcatgattcttgcctaaatctcttttcactatgatggcttataatcggcgattttctaaatccatcattgctactgtatcgattagtcagcattctactgtatgaagagcattccccttcttgtcattcatttattaacttattatttattatctggactcacagattcttattttattgttgtctattatttatttaccttgatattccaattatcccagatttggccagtgaaatccccttaaattttttttatatatcttcatcatttttgaatactttcttattttcttctggtacaatgagatgttccaggtacatcttgtattttctctgccccagcccttgaataagcactctttcatggacccctggttcctttgagtagtgaatggtatttagaaaccaagatctggtctctcagtttgcttattgctgcagtgtgtcattgtttctaggtttttcagtggacaacatatatatatacaaatgtgtgtatgtgtaagtgtgtgtaaaatatgtttatactgatgcctctactttgaatttgtccaaggttgttgtttaccttcccccattatgtatttatttctatctcccatcttctgtgttgctctggccccaacaacctcactatattcactcattcgctcagttctacaatacccacaaaatagtttcagaatattcataccactacaacaaacaagcctgttaatagttcaagatttgattacaggtatttcttcagaccaaagccaaagtactgtgctctaaacttatttggaatattggcataaaatcagacataaaccaatggaatagaataaagaccccagaaataaacctttatatatatggtcaattgattttccacaaaagtgccaagatcattcaatggggaaaggacaatcttttcaacaaacagtgttgctaaaatgatatatccacaagcaaataaatgaagttgggcacttatgttattccatattcaaaaattaactcaaaatagatcagagtcctaaacataagaccaaaaactataaaagtcttaggagaaaatgtacgggaagagcctcatgacattggatttggcaattattccttggatatgacactaaaagcacagacaaaagaaaaaatagataaattgtactacatcaaatttaaatacttttgtgcaccaaaggacactatcaacagaatgaaaatgcaaaccatgtaatcagaaaaaatatttgcttatcatatatctgataaaggattaatgtccagaatatttttcaaaaaaacccttacaattcagcaacaaaaaaaccaacaacccatttaaaaaatggacaaaggacttgaatagacatttctccaaggaagatatgcaaatggccaataagcacatgtaaagatgctcaacatcactaatctttaggaaaatacagaccaaaacctcagtgagatatctcctcacatccattaggatggctactattaaaaaaaaataacaaaagaaatatagcaagcattgatgaagatatggagaaagtagaatccttgttcactgttggtgggactataacatggtgcagctgctatagaaaacagtatggcagttcctcaaaatattaaaaatagaattaccatatgatccagtagtttcacttctgagtatatacccaaaagaatttacagtagggtctcaaagtgatatttgtacacccattttcatagcagcattattcacaatacccaaaggtggaagcaactctagtgtccataaactaatgaatggataaacaaaatgcataatatacatgcaatgtatttgtgtcccctttacaaaggaatgacattcaggtacatgctacaatatggatgaaccttgaagatattgtgctaagtgaaataagcttctcataaaaggacagatgctgtatgattccacccatctaaggtgcctagaatagtcaaattcacagagatagaaagtagaatggtggttgccaggtgctggaagcaatgaggagttgttgtttaatgggtgtagagtttcagttttgcaagatgaaaagtatttcagacatggatagttgtgatggcctcagaacaatgtggatgtacttagtgccacagcactgtacacttaaaaatggttaaaatagatgagccaggcatggtggtgcacacctgtagccccagcttctcaggaggattgcttgagtccaggagtttgagactaccctggatgacatagtgagtccctgtctcttaaaaaagaaaaatcttttaatagatacagatttcaaatggttacaatgataagttttatgttatgcatattttaccacaataaaaagaatttttaacttcatcagggaagttcctttactaattgaaagccattaagttcacttgttactgtttgcatttagtttgggttttcccccaccattgaaattttatttcattttattggatatgtaaagcatgcacatacaattaaaagtcaaaattgtatagaaagttatactcggagaaacatcatttcttcccctcccctgcaaccctacccgctcatctccttccctaattagtaaccagtttcattcatttttgtattatcagtcttctgtatctttttacaaaattatacagatatgtgtatattttcttgttttctgttcttttttttttcacaaaagatagcatattgcatatgttctcttttttcatttttaaataaattctggaaacttctccctttcagttcatggagatgtttctcattttttaaacaagttaatagtaccccatagtatgcatgtaccatagtttattcaaccaactattatttttcttatctaccttaatgcttaaattatctcagacctggccagtaaaaacaatcttctttattctatacttaggtggtttacagtattttacaatgacaatactgcaatgaatagcttttgcatatgctttttcacattgttaaacatgtgtcttcagggtatgttcttagatgtgaaatccacaggtcaaaaaaaaatacatgcattcgtagtttagctcagtattgccaaattctcctccatgggataatagcattttatatttcaaccagcaatatatgaaagtgcctgtttccctacaatcttgccaattttgtcaagattttgcattttttgtcagtatgatacggaaaaaaaactgagggaattacaagcttcaaataaataagagattattccctaaatatctaagttaagaaaagagactatgaaagttcatgactcttaatttcaaagtctgtgtcatctgcatctgtaggtctgcttctgtgaatgcttttttaaactaaattatgaataacattttcctgcttcttcacatattttatactttttaaattttatgatacatatatcatggacaaaagagaagagactgaatcaaataacatttttcccaaaaacagtacacctttttttgtcagatagctaaagtaaagggatgatctcttctatctcactaggagttaagctgggtaggggatcagtagcagttttggctagttccagctcagaaatggttatcttgagagtgaggtcaggcccattcctccatcagggctctgcaaatgtttcaccaggatactaaagactataagatttctttctcctttccaggttctccaggagttcatctctttgatctcttcaggatgtcatctgggtggcatctggggttctgatttaattaatttgagctatctttcagtttcaagtgttttggaggtgatgtcttacttccccagaccatgatgcaggcacagtgagactaagggatagctctagccaccactaactcagaaaaagtaggaaagaattgttgaatctggaggggctagctttacatatggggctacggtagttcagacattttccctcagttagcagaggaaagtgaggaggtgtaggccatcattttgtccatgcttctaggagtccttgcagggtagtaaattctatatcttggaagagtgcaaatatattatagactctcccttacccagtcttatgctcagagttccccttgtcaagcactcagaatccagccccacacatgcacccctggcccctgccagaagttctatctgggaatggcaatcctttgtggtataggacttttcctcgattttcaggccttatattgtctgcattttcaggctgagacatcctgtgacctctccctagtgacaggcctaatgacaagggaggagggagggagcagatcctgagtcacatccccacctcacaagggagaggcctttggattgtcttcaagggtctcttgatggggaaggatggactcctgaaggctcagaactttcagggaaatgtatatatttaaggttttcagtgttcagggttttcaatgtagatgtctcatcccatgtgtcagtgtctctttcttctgaccttggcattgcaggcctgcatagctagaagtttaaccttaggtgctctgcttctctgatgattaagtcctgggccccatcttcagctttctctgcactttcactgcaggccactgcagagcctccttgcttcctacaatgaaaaaatatcctgatgtttacatggatctttcaattgccagttaactgcttttagtctttccttatctttttctaaagtgtcaaatgagtttagcaacaggcatctaatcctactgtccttttttttttaagacggagtttcactcttgttgcctaggctggagtgcagtggggtgatctcagctcactgcaacatctacctcctgggttcaagccattctcttgcctcagcctcccgagtagctgggataacaggtgcccaccactatgcctggctaatttttttttttttttttttttttggtatttttagtagagacggggtttcaccatgttggccaggctggtctcgaactcctgaccacaggtgatccacccacctcggcctcccaaccattgtctttttagttactatttctctgggacttcaaaggctggctgatgcgtttcaccagctaggacttccccttctgtgtgtaccgtcagcatttatcactagtgaaagttttcacaactggactgtcaccttgtgccacaagttacgtggcacttatcaccaaggatatagggtcctcactgccagctgggaagaaggcaattgagctccaaaacccgacttgaatattcgctttgttggacactccaggcattaactgccatgggtgaagttccccaggcagcaatctctgagacagagtctaatggatggaaagcttattagaaaccaacatccgtggaagggagagagaaaaagcagatttaggcagaaagggaagtcaacctgcaatgcagacccaatagcctcaaccaaccccacaaagagttctagaataaaatggccagtcacaattttcctgggttgggccaaaatgcctcagtcattggatatggactgccccaagaaaagcatgactttgggtgagttggctttctgcagctgaagcaacccctgaaaggattaatagcccaaatctgtcatctgacagcattcccaaccgctgcactaacaggtcttccttcaaggggtttttgaggggcacatgcatgccaccagacaagacaactactccctcacatggaaatggctgctgggcattcctcacttggaaagagcttgcccttctctgcaacgtcgatcatttagacctcaatgtgtttacagcccttcaatgtcgttagagaagaggaatttttagtttatctaacatcattgtttgggcagaaacaatgatgtttcacaatttcaacagcctaatcggtagtgaaactccttcagcctatgaatttttaatttcagtttttctatctttctgttctataatcccatttaattcttctttttttaagtttatttttccgtgagttactagggtacaggtggcatttggttacatgagtaagttccttagtgaagatttgtgagatcctggtgcacccatcacccaagcagtatacactgcaccatatttgttgtcttttatccctcaccctcctcccactcttccccccaattccccgaagtccattgtatcattcttatgcctttgcgtcctcatatctcagctcccacatatcagtgagaacatacgatgtttggttttccattcctaagttacttcacttagaataatagtctctaatctcatcagggtcattacaaatgctgttaactcattcctttttatggctgagtagtatatcatcatatagatatgccacagtttctttatccactcgttgattgatgggcatttgggttggttccacaattttgcaactgtgaattgtgctgctacaaacatgtgtgtgtatctttttcaaataatgacttcttctcctctgggtagaacttccagtctgtgctgatagtcaccattttgtcatttaatttcttgattgctttaatcattattttaacattcttgtctgatcactctaatatttggatttcccatgcaaatattttcttgtctttttcctctcctttttcctcttccttttcttctccttttctttcctttccctccctccctccttttcttccttttatccttttttcttttcttccttccttttttctcttttttttgcatgccaggttatttttgattgaatatcagacattgcatgcaatatattgtcaagatgaattgaagctctaaacgatgatgtcttactctgaataagatttagtgagcagatagaggaataaagatcttcttaatcccaatagagattgagctcattcaaactttttttatttttatttttgtaaaggctgggcaatttatgatttatcatcacttagagtatctatgcttttggtgatcccaactgaatgctcaaggtgtttcttaccaggtttcttcctcttctgcgggtctgaagtttgattgttatatcccagccccatgagacttacagaagttctgcttagcctttttctccctaagctttagatttatcctcaacttcctagccttgccatcacctcttaaccaaaaagcttggaggggaaataatggtaccaaatgtcagcctcagctacctctcttctctctgccttctcaagtactcactgccttggtagctctctgatgccttcggatgggtgtgtgtgtgtgcttgtgtgtgtgtgtgtgtgtgtgtgtgtgtgtatgcatgcatgttaatctgctctgctagtctacacattctcagcaggagaattggtctactacaaaatagtccatcattgccagaagcatgattccaaactcttgttttattgaattcatgtttttagtaacttgttttacagcaaaaagaagctctgaggaatttccttctgttccctgagttatatttttatctatatggtgttctgtttgtcttttgcatgaacaatttcttacattaacttattttttctcggtatgtttacaggttactgttctgtttcttttcatcttaattatgcttccctggtcccaccctggcattctcttttttctgatataatgtaagtgatttcttgactttcttccctttgtatctaggactaagcttgttttctttcccccaagtccaatttgaggaccgagcaattcatgttctgcctgctttttttaatgctggaaaagtggcagagggtgggagaaagtttaggggaggctctgtgcagtcttcgtttaaatgcctccacttttcacttactcattcattcaacaaatattttttcagtgtctactatgtaccaggcacttatctaagtacttgagatccattgaggaacaaaacacatgaaatccttgtatttgtgccttatattctagtgaaggaaacagacaatacgtacgaaaacattagataagtgcctttgaaggcgatgagtgctatagatgcatcacagagaataaaaaggatgaaaagtgcgggggaaggagacactggcagtggccattttaattggatagatagtgtgagtctcactcaaaggtgaaatttgaccaaagatttgaaggaggagccacacggataaatagagggaaaatattctaagcagtgggaatggtcaccacaaaagccctcaatcgggggatgcctggtgtgctccaggcagagcatggtggcctctggggcttgagtggagcaaccaagagagagaataggacagggatgaatcaaggacacagggcacttcacataggctgctaggccatggtgagaactgtgacttttactatgaatgagatgagaagccagccttttccctctcctctctcctctcctctcctctcctctcccctccctcccctcctttctctctttctcactttgtttctctttctttgtttcttgctttttacattgaggtataacattcatacagtaaagtccgcagatcttaagtgcatacagctcaatggatattactgatgtcaacaaatatatagtcaccacacagaagttattgagtgtcagcagcaccccaggaatctcctcattgtttcctcctggtcaataccttcccaaaggaaatggctcttctgactatcatgttcaaagattagatttctttcttctgtttttgaacttaatataaatgggaccattcagtatggattcctttgtgcttcttccactgagcatcatggctgtgaaatgcataatgttttgtggagcaatagttcttttttattagatgaatagctactccagaggctgagacacgagaatcgcttgaacccaggaggtggaggttgcagtgagctgagctcgcaccattgcactccagcctgggtgagggcaaaactgtctcaataaaataaaataaaataataaaaatttaaaaatgaatattgtatgaatatataataatttatctcatctgttgatgaacatttagacttgtttggagttggggctattgagaataaaagctgccagtgacacttatatgtgtcttttggcacacacgtgtgcccacttatgttggatatctgccaggagtggaatcaaagcttttcttgaacagagtagtgacattatctgatttaattttaaagggatcattttgttgagcatagactgtaggtagcaagagtataaacagggaagccaattaggcgtcatgatagtgatgcaggtggcatgatagtgatgatggtggcttgggccaggtggcagcaccagggggttacaagtgaggtcttgggcaaaagtgaaaagaaagcaaagataaggctattcactcaggctgcttctctctgggtggagaacattagttaaaatccacatggttttgttgatttaccaatatgaattttgtgtatggggacagaggtggaagtaagagctcagcctggtgtgctcaagaattttttgtttctttctttggacattaatttttgaaatttattgaattagcttatagtcctttcctggtttgattacaattggcattgtttttctggttttaactatttttgcacactctgttagatactgagagaaaagaaaatgtttagacaagtttcaattcaccatttaaggctagaactcatctttttgttttttgttttttaaaaaagaatatttttacatccattaagatggctataatttaaaagtcagattacaagtattggcaagaatgtggaaaaattagaaccctcatatactgccagtgggaatgtaaaatgctgcagccactttggaaaatagtctggcagtttcttaaagagttcaacacagatttaccatacggcccagtaattacacttctaggtacatacccaagagaaatgaaaacatatgaccacatgaagacttgggcagaaataatcataacagccttgttcataatagcataaatgtggaaataatccaaatattcatcaactgatcattggataaataaaatatggcatatctatgaaatggaacattattctgccataaaaaggaatcaagtaccgattcatgctacaacatggatgaagcttgaaagcattagctaagtgaaaggagccagacatgaaaggccacatattgtatgaatccattgatgtgaaatgtccacaatagataaagttaaagaaacaaagattagtggttgcttaggactggggaagccacaaagggataagtggaagatagctaagagcctttcggaggtgatgaaagtatcctaaaattcatgacggtcatagttacacaactttgtgaatataccagtgatttctacactttaaatgggtaagctgtatggtgtgtaaattatatctcactaaagctgttaacaaaagcaaaaaaaaaacatttgtgacatatttaataaagagaaataaaaatataaaatggcctataatcttatcatccatagttctttatgacattttaaaaaatgaaataataaatatacaatcatgtcatctgcaaacagagacaatttggcttcctctcttcctatttgaataccccatatttctttttcttccctgattgtcctggccagaacttccaatacttgttgaataggagtggtgagagagggcatccttgtctgtgccggatatcaaagggaatgcttccagcttttgccaattcagtatgatattggctgtgggtttgtcataaatagctcttattattttgaggtatgtcccatcaatacctagtttattgagagtttttagcatgaaggggggttgaattttatcaaaggccttttctgcatctactgagataatcatatggtttttgtccttcgttccatttacatgatggattacgtttattgatttgcatatgttgaaccagccttgcatcccagggatgaaggcaaacagagagccaaaccatgaatgaactcccattcacaattactacaaagagaataaaatacctaggaatacaacttacaagggatgtgaaggacctcctcaaggagaactacaaaccactgctcaaggaaataagagaggacacaaacagatggaaaaacattccatgctcatgaataagaagaatcaatattgtgaaaatggccttacttcccaaagtaatttatgattcaatgctatccccatcaagctactattgactttcttcacagaaccagaaaaaactactttaaatttcatatggaaccaaaaaagagccagtatagccaagacaatcctaagcaaaaaggtcaaagctggaggcatcatgctacctaactttaaactatactacaaggctacaataaccaaaacagcatggtactggtaccaaaacagatatatagaccaatggaacagaacagaggcctcagaaataatgccacacgtctaagaccatcagatcttggacaaacctgacagaaacaagaaatggggaaaagattccctatttaataaatggtgttgggaaaactggctagccatatgcagaaagctgaaactggaccccttccttacaccttatacaaaaagtaactcaagatggatcaaagagttaaatgtaaaacttaaaaccataaaaaccctagaagaaaacctaggcaataccattcaggacacaggcatgggcaaagacttcataactaaaacaccaaaaacaatgaaacaaaaatcaaaattgacaaatgggatctaattaaactaaagagcttcggcacagcaaaagaaactaccatcagagtgaacaagcaacctacagaatgggagaaatttttttgcaatctatccatctgacaaagggctaatatccagaatctacaaggtacttaaacaaatttacaagaaaaaaacaaacaacccaatcaaaaagtggacaaaggatatgaacagatatttgtcaaaagaagacatctatgtggccaaaaaaatatgaaaaaaagctcatcatcactggtcattaagaaatgcaaatcaaaaccacagtgagataccatcccatgccagttagaatggtgatcattaaaaagtcaggaaacaacagatgctgggggggatgtggagaaatgggaatgcttttacactgttggtgggaatgtaaattagttcaaccattgtggaagacagtgtgatgattcctcaaggatctagaaccagaaatatcatttgacccagcaatctcactactgggtataccccaaaggataataaatcattctactataaagacacatgcacacgtatgattattgcagcacagttcacaatagcaaagacttggaatcaacccaaatgcccatcaatgatatagactggataaagaaaatgtggcacacatatactatggaatactatgcagccataaaaaaggataagttcatgtcctttgcagggacatggatgaagctggaaaccattattctcagccaactaacataggaacagaaaaccaagcaccacatattctcactcataagtgggagttgaacaatgagaacgcacggacacagggaggggaacatcacacactcgggcctgtcatgggggtggggggctaggggagagataacattaggagaaatacctaatgtagatgatgggttgatgggtgcagtaaatcaccatggcacgtgtatatgtatgtaacaaacctgcacattctgcacatgtatcccagaacttaaagtataataataaattaataaaaatttaaaaagaaattaaaaaatgaaataatgtatttatgtaattagaacagtccacaaatagagaaaggcacaatatagtgagaactttatattcctttcctctcccctcaaagtctttagaagtaactactactaagatctgttttacttttctttcagaaggcattttatatgtatgccagcatatacccagtgcacatcaccttcatcttcatttacacaaaggctcatactatccacatggctttgcacctgacatgtgccagttattattctttagagacctttccatagagatccacatgcagctttctctttttttcccttcccaccttcccagctggcctccctccctctcttctatcctttctcattttccttccagaaagaaaacttctgggttttttactcttactttatagaaagtgaaggggaaaagttttgtttttaattgtatgcttttttaaatcagaaaattctactaaaacaatacccaagtctgtttctttaaagtcatttacattttttgtttttcttttttcttggttttttttttgtgtgtgtgtttgtgttttttttggtttgtttgttttttgtttttgtttttgagacggagtttcactcttttccccaggctggagtgaagtggcgtgatctcagctcactgcaacctccacccacccggggttcaagtgattcttgcctgagcctcccaagtagctgggattataggcacccaccaccacagccggctaatttttgtatttttagtagagacggggtttcgctattttgaccaggctggtctcgaactcctgacctcaggtgatccaccctcctgggcctcccaaagtgctgggattacaggcatgagccaccatgcctggcattttttgttttttctgattatataaataataccttccggttacagcaaaattaagcaatgtgtgaacatttaattaacaaagacttatacagtacttactgtgtgccaggccctcatctaggtcctttaaatattgactcatttaatgaaatactcataacaaacctatgagttaggtcttataaatttgttttactagtggggaaactgagacatgaagagattaagtaaatttcatagttaaaaggcagctgagttagacttcaattccagcctatctgactccagagctcactctgctccatggcctgtctccagactaaaaagatactagagacacagaaaactcatgtcctgcagtaaccactattgactttatggtgacaattctttcataatattttttgtgtatatttatgaacaaacacatatttttataaaattaaaacatacagctatacaacatacatacacacatatatgtaaaatcaaggggctttttgtggtcataaatttcacaaaaatgagattatcttatatatacgtactcctctgcatcttgcatttctagtttaacagtttcataaaattcctccaagtcaattagtgtagctctagtgatggtctagtacctgcatgatattccttggtccaatatacctcaatttctttaaccatttccctgctaatgtgtatttaccttgtttccaggatttgggggtaccacaattacgctgaaataaacatctgagtgcatacttctttttgtattggtaattttgtatctagggattagatttccaggtgttagtttcctttttaaaaaaaaaaaacagattttgcagattgccttcaaaaaaattgaacaattcacatactcatcaacagtgaatgaggatcccattttcctgacagtcttaccagcaataggtgaaagtcctttgtaatttttgctgatatcgttggtgcacagtggcaattcattgttagttaatgtattttctccctgactactaggaagctgaaagacttgttgttgttgttgttctgccaggacatttggatttgctgttctgtgcttgcctgcttatatctctgcccatttttctattaatcatcttttttcagttataattaatatagttctttgtacttaatatatccttcagctattagatccattacacactttccccaatccattatttgtactttacttttgtatgtcttatatttcaccttttaaaatgtcttaatatttataaaaatcaaatctgactaatttttataatagcttataggtttcctgcttcatcaatctccaacttgtacttatggtctcctacattttcttctaaagttccatccttttattctttacctttaagattttgatccacctgaaatttatttgtgtgtaaaatgagaggcaggaaccaaaattattctttcccaatacatagctgattttgcctatattatttattaaataaaccactgttctgtgataaattaatatatatttattatctattaaattctcaaaggctgcagaatctatttttgggaactgtattctatacagttccacttatctttttgcttacttctatgataatattatgctgtttttattacagagacttcacttcattttaatgttttctaaggtcctttttttcacattttcttgactattcttgaacatttattcttccatgtgaactttaagtttatttaatccaatttaagcacacacgtcagtgtcctcatttagattgcattcaatttttacttaatgggaaaattcatattttcataatattaaattttctcattcaggaatgtagtgtatctttctgtttatgcatggtttattttatgtcctcatatagaactgacctccatacacccttatctggagccatgaagggtaggcttgccagaactttttcacctaagtcaaccctgcaataggaggacatctcagagcaccttttgcatctccacgtgttgtccctaatggtaacttgatcttatcccacactttcttgcctcttagaagacacttttatctattctcatctttcattgtttctttgatcatgtctgcctttcttgcaccagctcttaatcttcagaattcactcaaatctcttcttttcataaggtcaccaccttccactcctccccagctctctccagtgtgtgctgcaagacctgtgtgctgcagttgctcacacatccaactctccctggggagtgaatcagcagcccaagcattgtcctagtgaactgcttccaacagtccctgacctagaatcacaagaggcttggggagtggggtggctccgacactgcaggcctccagaaggacccctcaccgacacgttgttcctgccactgtcctccagtgttctcatgtggggttctaatgtgggtctctgggccactgtttcctgggctgccatagatccttacagctgccatttactgctttcaggatcttgaacatttgtctcccaacttttctgacactaagtgcatcttctgagtatattcccattgtcactaacattcagaactttggctcttgtcaaattgcttcaattttggatatctgtgtcactggagaagtgaatcaagctaaatgaagaatgcccttattttttcttctgtgttctctctctgcaaagaggagaatgatcttccccagtattgtgctttctgagacacacctagtgcatgatccaaatggtccttgattccaagtaaaatggcaaagatccacatgtagctggatcccacctgtgatcacaatctttctatgctctcagattccaccttacctcaatgtttgaaaagaaaaaatttcagaccaagaagcagcttctccactcctggaatctctgccttgttcagcctgtctgcctccaccatgtccatcagggtgacccagaagtcctacaaggtgtccacctctggcctccgggccttcagcagctgctctcacatgagtgggcctggtgcccacctcagctccttaagcttctcccgagtgggcagcaccagcttccgggctggcctgggcagaggctatggtggggccagcagcatgggaggcatcactgccgtcatggtcaaccagaacctgctgagccccctgaacctggaggtggaccccaacatccaggccatgcgcacccaggagaaggagcagatcaagaccctcaacaagaagtttccctccttcattgacaagatacgtttcctggagcagcagaacaagatgctggagaccaaggggagcctcctgcagcagcagaagatggcttggagcaacgtggacatgttcgagagctacatcaacaactttatgcagcggctggagactctgagccaggagaagccgaagctggaggcagagcttggcaacatgcagaggctggcggagaacttcaagaaaaagtatgaggatgaaatcaataagcgtacagagatggagaatgaatttctcctcagatgtgggtgaagcttacatgaacaaggtagagctggagtctcgcctggaagcgctgactgaagagatcagcttcctcaggcagctgtatgaagaagagatccaggagctgcagtcctagatctcggacacgtctgtggtgctgtccatggacaacagctgctccctggacatggacagcatcatcgctgaggtcaaggctcagtacaaggtgatcgccaaccgcagcctgactgaggctgagagcacggaccagatgaagtatgaggagctgcagatgctggctgggaagcgctgggatgacctggggcgtacaaaggctgagatctccgagatgaaccggaacatcagctggctccaggctgagattgagggcctcaaaggccagagggcttccctagaggccgccgtcacagacgcagagcagcccggggagctggccatgaagggtgccaaagccaagctgtctgagctggagaccgccctgcagctagccaagcaggacatggctcagcagctgcgtgagtacaggaactggccctggacgcctacaggaagctgctggagggcgaggagagctggctggagtctgggatgcagaacatgagtatccatacgaagaccacctgtggctatgcaggtggtctgagctctcctacgggcgcctcacaagccccggcctcagctacggcctgggctccagctttggctctggcgcgggctccagctccttcagccacaccagctccaccagggccgtggctgtgaagatcaagacccgcgatgggaagctggcgtccgagtcctctgacattctgcccaagtgaacagctgcgacagcccctcccagcctgcccctcctgtggctgccccagagccggggagggaggccgctgtgcaggggagcaaagggaacaggagacccacctgaggctcacccctagctctcagcccacccacgggggagtttactgcctggggacaccctttgcccatgcctccagctacaaaacaattcaactgcttttttttttttttttttttgtacaaaataaaacctcagctagctctttcaaaaaaaaaaaatcagtcccacaaggtcccatcagtctcattctgcaggccaatgaggattttcttcatattttcaatgtgttgagaagaatctgcagaatgttaggacatatatagacagatgaaaatactcacacaaggagtaagaaaaccttcagaggaggcaaatttgcaaagcaagaactgtgcccctccccagttctaagtcaacaaccaccccattaagagtctatcttaattctggggctgtcagcaggtttcctttcgcctgctcttatttgttcattttatggaacacagtagtctgccttttttttcatgtctaaactcatttcctgttgagaaagttcataaccatggcacaacagtaatcatcttgcataagttactcagctcctttctgctcttgtttcctcatctccaaaataagaataaaaataatacttcttttataaggttgtgttgaggatcaaaatagctaatatatgttaaacccttggaacagttcccggactataatcactgctatataaatgtttgccatcatccttcttggatggtttcagtgcccctcggttacctttgccatgactcttatttatttatttatttattttttgagatggagtcttgctctgttgccaggctggagtgcagtggcgggatctcggctcactgcaacctccgcctcctgggttcaagcaattcccctgcctcagcctcccgagtagctgggactacaggcatgtgccaccacatccagctaattttttgtattttagtagagatggggtttcaccatgttggccaggatggtctcaatctcctgacctcatgatctgcccaccttctgctcccaaagtactggaattacaggcgtgagacagtgcgcccagcccccaggactcttattttctaaatcctattagaacatcttctttttcttttttttaaagtcaggatctcactctgtcatccaggctggagggtggtagcacaatcatagctcactgtcacctgcaactcctgggctctagtgatcctcccacctcagccccactgagtagctgagactacaggtgcatgccactacatggggctaatgtattaattttttttgtagagatggaatcttgctatgttgcccaggctggtcttgaactcctggcttcaagagatcatcccatatcagcctcccaaagtgttgggatttcaggtgtgagccactgcaccagccctattagaacaaatttctaaattatatgggaatgtacaaaaacaaaagataaatctgcctgtagaaccttaaaacagtttcatggtcctcataaggttcttcatattcaggagagcgggcattgcaacatgtaaagcctatctcgaagaaagagacttttgcccaaagtctatatagactaagcctctgtctacattatgtcttcttctcaaatcacctccttgacttcatattaccataataatccacatcccattataaacttttagcttttagccagataggctgttttgcaaaagaggaaggcaatggggggcttttgatgttacttttcaggagtagttttccttaccttcttcctgttgggcccctgggatcttatctgcctttaagtgttataataattccaggtgcattagagtatccaatatgccactgaaatctacctctcccctgatattaaccatacaccaaataaaagcagcacataataaaatcatccacatcccaaaatagaaaaagcacccaaattgtttaaattttacatagggagtaagttgtatcacactctatgctaaccatgtttataaccatttatgcttgcacatatgtaatttaaacagctattattgagcatctgctccatgtatgtcaggcactagactgggcactggcaacatactggaacaataacaggggtggttctgttggggaggcagctaagacagaccaaacagtgggagtcccagaggtttactcaataatcatgctaattaatacaagcaaaccttccaactgagttcagtgttccaggtaaaaaggaatgtaatacaaaaagctgacctgggcttgtgggtcatggaaaatttctctgcggaagagacatatgacaaataaagaattgtgaagttacccaaggtaagagaagaaagaacatatcatgaagctagatcaggaagcacaaaggccctatggtgggaaagaagatggccagtaaaagatgcgtgagtcattcatgagacaggaaccactggcagaagacaggatttgtgggggaagagcctcagttcagtctgggacatgaggtgtctgaaatacctttgagacatatcaagggaaaatatgaaataggtggttggatatatacatctggaactcaaaggaaatgtctgagccaaagacataactagatataaatagcttacagatagcagttaaaattaatgatcttggatacagttgcctggaaagaaagcatataatgaaaaaagaccaccttgacagacttcacttttaatggctgagtagcagataagcccaccaactaggttaagaaggagcatcagagaggtagaaaggacaccaggagaatgtggtagcacccaaggcaaggggaggaagagctgcaagaaggtggaagttgttaatagtatttaagaacattgctgaatcatgtagtaaaataaggtctgaacatcattggatgtatttgaggacagggagatcactgttgactttatcagagctggttcagggcagtgattgtgggaatgggagagtgatgggccatgacattcagccttaaataggttgaggaaagattgggagttaagaaagtggagacaaaaattttaggcatctctttcaagaaatctggttgtgaaggagaaaagagatatgcagtggtgggataaaaagtgatttgagtagctgtttgcctggattggcaacctgagccgccccacccttcccgtgcagcgatctgggtgcagaggggccctctccactccatgccagacagatctccaggcattcagacacctgctcactggaacagcagtctgagtcaccccaatcttcctgtgcggagatcctggtgcaggaggccctccccactctacacccaggcagaatctccatgcgtctgaagcacctaccctcctgggttagaagtttaggctgaccccaatctccaggcagagaactcagggatgaggaggtcttgcagctccatgccgaggcacacctctggatgcgaggtggccatccactggattctccctcagtgctggtacttgtgcctgccatcaggggacctacaggtggacctgcctggtctggccctgcccatcttgcttcctcccctccactggggctgaagagggagctcagaccaccgtgcactccatgaatcaacccatttcctgaggcaagcgagagcttcttccagtaaaaaaaaaaaaaatgctatgtggatgggatcacatatattcccatccacatagcattttttttgagacaggttttcactctgtcaccctgagtgtagtggtgtgatcatggcttactgcagccttgacctcccgggctcaagcaatcatcccacctcactgtcccaagtagctgggacccacaggcacatgccaccatgaccagcaatttttttcattttttgtagagacagggtctcgctatgttgcccaggctgttcttgaactcctggactgaagggatcctacttcctctggctcccaaaatgctgagattacagatacgagccaccatgccgggccacacagccagctcttacccataagcgccatctattggcttgtaggtcaaattgcacagcccaatataaaacctggtgacagaagagcatagggctacgcaagcaaagccaaaagaccctacccagcattctctacagtcacacaccctggggtgggaaggaaggaaagggaaagaagaaaaaaacaataatattattggaaaaaaggaaagaaaaagaaaaaattctacctgcatgaaaatagttactaaaattagaagggcaagcatctctagatgaaaaggaactagtgcaagaaacctggcaaaatctgaatgtagtgacagtaccaaaggatcacactagctccccagcaatagtccctaactaaaatggaaactcagaaatgatagctagatagataaataattcaaggcatggattgcaagtaagcagcaatgagatccaagacaaggttgaaagtcaacaaaaagacatttctaaagcaatccaggaaaggaaggaagaggtaaacatcttcaaaagaaatcaaccagaacttctggaattgaaaaactcacctaaggaatttcaaactacaattgaaatctttatgaacagactgcaccaagcagaagaaagaatttcaaagcttgaagactgattttttgaactacccagttagataaaaataaagagaagagaattttttaaaatgaacacagttttcaagaaatattggattatgtgaagtgaccaaaattatgaattactggacattaacaatagatacagaagagaagaaaacaaccatgaaaacatttgaggcaataattcaagaaaagttcctaatcttgctagagagatagacatccagatacaagaaatctagagaacacatgtgagatagtgtacaaactaaacatcatcaatgcatatagtcaccagactgcccaaagtcaatgctaaagaaaaaaatcttaaaggcagcaaaagaaaaaggtcagatcacatacaaaaagaaccccatcaggctaacagtagacttctcagaagaaaccttacaagccaggagagattggaggcctattttcagtattcttaaagaaaagaaattccaaccaagaatttcatatcctgccaaactaagctctataagcaaaggagaaataaaatattttccagacaagcaagtactaacggaattcattaccagtagaccttccttacaagagatccttcaggaatttctcaacatgagaacaaaataatgatacctactaccacaaaaacacacatagcccacagaccctataaagcaccacactatagaaactacaaggccaccagttaacaacttcataacaagatcaaaacctcacatatcaatattaatcttgaatgtaaatggtctcaatgccccacttaaaaggcacagagtggcaaactggatttaaaaaaataagacccattcatcttctgttttcaagaggcctatctcacatgaaatgacactcataggctcaaagtaaagagttggagaaaaaaatctgtcatgcaaatggaacacagaaaagagcaggggtcgctattcttatatcaaataaaacagattttaaaccaacaacagtaaaaaatgacaaagaaggacattgcataatgataaaagattcaatttacagaggacttaactatccttaatatatatgcacccaatattggagcacgcagattcacgaaacaagtacttctagacctataaaaagacttggacagtcacacaacaatagtggaggactatcaacaccccactgacagcattgacagactatcaaggcagaaaaccaacaaagaaactctggacttaaattcaacacttgactgattggatctaatagacatccacagaaaactccacccaacaaccttggaatatatattctttttatttgcacatggaacatactccaaaatcaaccacatggtaggtcataaagcaagtcctaataaattcaaataaatcaaaataattccaaacgtcctctctgatcacagtggaataaaaccagaaattaataccaagaagtctttcaaaaccacgcaattacatggaaattaaacaatttgctcctaaatgactttgggataaacaaataaagcagaaataaaaaatcctttgaaataaaagaaaacagagacacaacataccaaaatctctgggacacaacaaaatcagcattaagacaaaagtttatagtgctaaagacctacctcaaaaagttagaaagatctcaaattaacactctaacattacacccaaaggaactagaaaaacaaggacaaactaactcttacacaagcagaagaaaagacataactaaaaccagaacagaactgagcaacgttgagaccccgaaatccatgcacataatcacataaccaaatgtttgttcattgaaaggatagataagatcaattgctgctagctagattagtgtagaaatagacagaagatccaaataagcacaatcagaaagacaaaggtggcatacaaccaatcccacagaaatataaaagatcctcagagactattatgaacctagagaaaatggataaattcctggaaacacacagtctgccaatattgaatcaggaagaaattgaaaccctgaataaaccaatattgagttccaaaattgaatcagtaattaaaaaaaaaaaaaacctacctacccaaaaagccctggaccaggtggattcacagccgaattctatcaaacattcaaagaggagttgataccaatcctactgaaagtatttcaaaaaatcaaggcggagagacttctccctaactccttctatgaagccagcatcactccgatactaaaacctggcaaagacacaagaaaagaaaactacaggtcaatatccctgctgaacatagatggaaaaaatcctcaaaaaattactaccaaagcaaatctagcaacacatcaaaaaattaattctctatgatcaagtaggcttcattcctgagatgcaaagttggtgcaacatatacaaatcaataaatgtgattcatcacataaacagaactaaaaacaaaaaccatatgatcatcacaatgtggaaaatgttttttaataaaattcaacatctctccatgattaaaaccctcaagaaactatgcttagaagcaatatatgtcaaactaataagagccatctatgcaaacccacagccaacatcatactgaatgagcaaaaactcagaccatttcccctgagaaccagaaaaggatgcccactctcaccactcttattcaacatagtactagaagtccttgccagagcaatgaggcaagagaaaaaaataaaaggcatccaaataggaaaaaagtcaaactacctctcttttctgatgatatggttatatacctggaaaaccctaaagactctaccaaaagtctcctggaactgataaatgacttagtaaagtttcaggatacaaaatcagtgtacaaaaatcaatagcatttctacatatcaataacctttaagcagagagccaaatcgggaatgcaatcccattcacaatagctgccgagagaaggaagggaagggaagagaagggcagggcagggcagggcagggcagggcctaggaatacatctaaccaaggagatgaactacaagttctacaaggagatctacaaaacactgctggaagaatcatagatgacacaaacaaatggaaaaactttccctgctcatggtttgggagaatcaatatgcttaaaatggccatgctgcccaaagcaatctacagattcaatattactgctatcaagctaccaatgtcatttttcatggagctggaaaaaactattctaaaattcatatggaaccaaaaaagagccaaaatagacaaagcaaccctaagcaaaaagaacaaagcagtagacatcacattacttgacttcaaactacactgtaagttaacagtcaccaaaacagcatggtacttgtacgaagacagaaagataggccaatggaacagaatagagaacccagaaataaagccacatacctacagccatctgatccttgacaaagtcgacaaaaataagtaatggggaaagcactccctattcaataaataatgctgggatagctggctagccttatacaaaagaaagaaactgcccccctctctttcaccaaatacaaaaactaattcaagattatttaaagacttaaatgtaagacttcaaactataagaatcctagaacaaaacctaggaaacacctttctggacattggccttggaaaagaatttataactaggtcctcaaaagtaactacaacaaaaccaaaagttaacaagtaggacataattaaactaaagagcttctagacagcaaaacaatcaatacagtaaacagacaacatatagaatgggggaaaatattcacaagttctgcgtgtgacaaaggtctaatatccagaatctataaagaacttacgcaatcgaacaagcaaaaccaaataaccctatttaaaatggacaaaagacatgaacagatattctcaaaagaaaaaaaaagaaaaaaagcagccggctgggcaaggtggctcacgcctgtaatcccaggactttgggaggccgaggtgggtggatcacctgaggtcgggagtttgagacaagcctgaccaacatggggaaaccctgtctctactaaaaatacaaaattagctggatgtagtggcgtatgcctgtaatcccagctacttggtaggctgaggcagcagaatcgcttgaacccggaaggcggaggttgcagcgagcggagatcacgccattgcactccagcctgggcaacaagagcgaaactccatccaaaaaaaaaaaaaagaaagaaagaaagaaaacagaaaaaaaggaaagaaaagcagccaacaaacatgaaaaaattctcttcactactcttcagggagctgcaaatcaataccacaacacaccagtcagaatggctattactaaaaagttaaaaaaaacaatagacgctggcaagactgtggagaaaacagaatacttacacactgttggtgggaatgtacaattagttcagccacagtgtaaagcattgtggggatttctcaaagaaaaaagaactaccattcaacccagcaatcccattgctgtgtatatagctgagagaaaagaaatcattcaaccaaaaagacacattcacttctatgttcatcacagcactcttcgcaatagcaaagtcatggagtcaacctaggtgcccatcaacagtggactggttaaagcaaatatggtgcatatacgccatggaatactatgcagccataaaaaggaatgaaatcatttcctttgcagaaatatgtatgcagctggaagccattatcctaagtgaattaacataggaacagaaaacccaatgttgcatgttctcacttataagtgggagctaaacaatgggtactcatggacacaaagcacggaataatagacactggggactactatagaggacggggagggagtggggcaagggctgaaaaaaaactacctattggacactgttcagtacctgggtgatgggatcaattgtaccccaaacctcagcattatgcagtatgtccagcttgcacatgtaatgccttaatttaaaatgtgagttgaaattatttttaaaaactaatttgagattgagagagggctttgttttgctttacctttttaattatgaaaataattatatatgaaatagcatatacaatatgcatatatatgtatgtgtatagataggtgtgtgtgtgtgtgtgtgcagtttaaagaataaaaataaatatccatggcttcacatccaccttcaggaaaagaacattaccagaactttagaatttcttgtggtccctcgccaatcgtatcacgctgaagggaaattatttttaagataaaagagattcgagcacatttatatggtaatgggaagcatctagttgagaagaactggctgaatatgcagtagattaaagaaaaggatatttgatagtgaggcattattgcaatagcaagagtgaataggctctaaggcacagtaggaggtgtggccatgtattagaagaggtgcaggtctgatgaggggaaattagataggtttggtgttagaaagttcaggaagttcctttttgatgcttcacaactctcagtaaaataggaaatgggctcatctgctgaaaacaaaaaatcttcaaggaaagatggggcgtgatttgaagtagtcattgttgagagttggaggatgagttgctcagagaagtttaatagttctgctgaccagtgttgagggcctatttgaggctgatcatgtattttttttttattatactttaagttctagggtacatgtgcaaaacgtgcaggtttgttacataggtatacatgtgccatgttggttgttggtttgctgcacccatcaactagtcatttacattaggtatttctcctaatgctatccctcccccagccccccaccccccaacaggccagggtgtgtgatgttccctgccctattttggttactgttttggttactgtattcttgtagtcaggtagcgtgatgcctccagctttgttcttttggcttaggattgtcttggctatactggctcttttttggttccatatgaactttaaagtagttttttccaattctgtgaagaaagtcattggtagcttgatggggatggcattgaatctataaattaccttgggcagtatggccattttcacgatattgattcttcctatccatgagcatggaatgttcttccatttgtttgtgtcctcttttatttcattgagcactggtttgtagttcttcttaaagaggtccttcacatcccttgtaagttggattcctaggtatttttttctctttgtagcaattgtgaatgggagttcactcatgatttggctctctgtttgtctgttcttggtgtataggaatgcttgtgatttttgctcactgattttgtatcctgagactttgctgaagttgcttatcagcttaaggagattttgggttgagacaatggggctttctaaatatacaatcatgtcatctgccaacagggacaatttgacttcctcttttcctgattgaataccctttatttctttctctttcctgattgccctggccagaacttccaacactatgttgaataggagtggtgagagagggcattcttgtcttgtgccggttttcaaagggaatgcttccagtttttgcccattcagtatgatattggctgtgggtttgtcataaatagctcttattattttgatatacgtcccttcaataccaaatttattgagagtttttagcatgaagggctgttgaattttgttgaaggccttttctgcatctattgagataatcatgtggtaactgttgttggttttgtttatgtgatggattacgtttattgatttgcgtatgttaaaccaaccttgcatcccaggggtgaagctgacttgatcgtggtggataagctttttgatgtgctgctggattcagtttgccggtattttattgaggatttttgcatcaatgttcatcagggatattggtctaaaattctctttttttgttgtgtctctgccaggctttggtatcaggatgatgctggcctaataaatgagttagggaggattccttctttttcttttgattggaatagtttcagaaggaatggtaccagctcctctttgtacctctggtagaattcggctgtgaatccgtctggtcctggactttttttggttgttaggctattaattattgcctccatttcagagcctgttattggtctattcagagattcaacttcttcctggtttagtttttgtccaggaatttatccatcttcttctagattttctagtttatttgcatagaggtgtttatagtattctctgatggtagtgtgtatttctgtgggatcgatggtgatatcccctttatcattttttattgcacctatttgattcttctctcttttattctttattagtcttgctagcggtctatcaattttgttgatcttttcaaaaaaccagcccctggattcattgattttttgaagggtgttttgtgtctctatctcctttagttctgtattttaagtgacatcaatctgctctgttgtgtgtctttctctttctttctccaggaatatttggtgatatggtttggctgtgtacccacctaaatatcatcttgaattatagttcctataatccccatgtgtcatgggagggacccggtgggaggttattgaattataggggcaggtaccctcttgctgctgttcttgtaatagtgagtgagttctcacgagattttctcccctttttgctcggcacttcttcttcctgccatcaagtaaagaaggatgtgtttgtttccccttcagccatgatcataattttcctgaggcctccacagccatgtggaactgtgagtcaataaaacctctttcctttataaattacccagtctttggcagtcctttatagcagggtgagaacagactgatacatttggccatttaaatgtaagtgtagaaaaaaagaaacttggagagttgcagttctgctggacacatgaagaaaatactgaggatcaaagtagtagagaatattagcaagagcttaaaaagaaatccacattatgatagaagggagaggaacaaaagagagtcacaagaccagaatttccagtgaggatggagggtggtcagccaggagtaggaggcttgaatgaatgatttggaggtaacagaagtttggatgataacacagcccaagctgcagtgggaaggatcactcatcctccactcctggcactgcctttatttggagtggttctctttgtccttcattcacctctactctgtgagatgaagagcttctctgattggtaagctgagagaagaagttattcatgagtacccagttatgttctcccttgcactgccccaaggagcgcattctgatctgctttgctgactttctcctggagaagcctgtacccattcagccaggcaaatgcatttaattctagggcccactatcgggaatcttattgttggctgcatggctaattcagcatctgtaataatgatgagaaattcatttccatctatcttgctctttctttatcttataattcgttcagaacttaattagaaaagaggagtgtaattatttatggcccatcttcaatccaacaccataatttttagagatggaagcttgggaactgtggaggggaaggccattagaaacggagtgatcaaagaacagagagaccgaagtgttagatgagttcttccaatagatgttggagtcactcaggatgtgggacttgggacagagaggagggttagcaaccaggtttcacaatatttaatccacggggaggactgagcatgagatcaggtcaagggtatggtgtgagccaacaaagagctgaattttgttttgttttatttttttaaactgctcatgtctaatgtttggaaatggcaatgggaacaaacaggaaaccagctccatgacctataaatgggtcaacagcaaagtcatgtggagcatgacagagatgatggcatagtgagattaacagccacgggaactcaggctttggaactgaaggaacaacagcagggcttccaggcagggatgatttagtctaaacagtctgagtagtcaggagttcgcttcctcagcctggaaacagaagatgaaaggactgattcccagcaattgcagtccctactcacatggaccaggatggggaccaacccaaaagctgatagtttttgtgttcatgcacagctgaccctagaggtttcaggcctcattcgtgtgacttagggagttggtcccacagcctagtggattgaggtgagccctgtggctgaaagctcacgacgcaggctataggcaccccctccaccgctacagccatcctcacctgtgtacccatgcacctagctaaaacagagtgctgaacacctccagatgcactctcctttactaggaaattaaaagaaacttgtggacaagaagacttacccataaatcttcttagtacccattactttttggtgcgatttcgagaaggctttgcagcccaccacaacagggcttctatcataaggacttctaactgaagttacaaagggagctgaggaaggcaggctggttgcaaggttagtatcttctaccctttaaacagggagtgagagtagtatcaggtgtgtgacaaaacagatgtatgcaaataaataaaatgaatttttaaaagcaaatctcgtttccctttatgcatacccattccttctcagccatggataactggatatcgatcttgtctttttctgctattctattctctcctgttttaaaacttcatctcattgaggtaaatattccattgaagtgaactattacctccgtggaagctcctagcttcctctctgaaactccttcccatcctaaggtcttcgctcacctcttattgaccccacttccatttccacaggcactggtgttccaatctttgggcagcatcagggagaagtgcctgcttccatgcactgacacacttgggtggaaatgtgagggagtcacacacatctccatttccatccacatcgacttggccttggcactcaactgcagcagtttccctcagctccttcaccctaaatgtgcccagcgttgtttttttttgtgtgtggcagttagactactttcaggtacctaggtgggccctcctccagcctcatcattgggtgaccctctggaaacataaccacttcctcctgcattccagcgcctggtgcgccctacagcttgagatcactttgtccgagcagcacgggctgctgcagattccatctctcacaaaacaaaccccatcaagaagcaaatcctcgattgtcttcagacagattccccaaaagaacactcggagatgaagaattggatgcacatgatttattaagaaaatgctttcagaaataaaaaggaaataaaccagtaggggagtgagggtggggaatgggaggcaaaggggaagaaggcaagccagggtgagctttcgggcagattcgtggggaggatggctgcagcctgacccctcaggtgaactttggagtataaatgagcctcagagatgcctggacctgaggcagggagcaggcagtcttcttcccaactccacacccacacccactagtcattggtaaagggccatcaggtggggcaccagctcccagccacctggaactctgagctcctgcagagaaggcaactctgagagcatggggaagtcccctgcaagacgtgcaggtgcagacctttgaaagcagaagaagccttccaacaatcccaggggaccgacaggggacagggcaagggggcagggcatgatgctcttccctgcctccaaaatcctgttccccaaacttttcctcatcttccaactcttccagcatagccccatatctttaccttgacgggccagccagcagctcttctggtgcgtttaccctccccaggtcctttcatctcaaaaccaacctgctcaccattgccagctttgtcatgtttgtcacgtcagtccttggttttgtgtgtctcgtgtgtgtccacgtgtggccatgtgcacacacatgtatatgtatgaaagcattagtcacaggggaagagaaagcagaactcaccattttttgtttcaaattatcagcaattcacatcttcccacaaagcaggagcattgccttttttgaagcccatctatcactcccacttcttcattgggtgccagctcatcttaatccacgttgctgggcagggcctcagatagaactcacacactccctttaggctgctcaagcttttcctctgctgtctgtgcatcctatcacgcctaccacaaactgtcccgaacagttctcagtttattccagccacaccctggatctccctagtgatgtgctcatttctttgaaagttgcctttaagacacacccatcactcctgctcacccctcgaatcctgtcattggttgaggttgattcagttgcagtcgtgcactgcaaaacaacatttcagtcaacaacagactgcatctaggacagtggtcccataagattataatggagctgaaaacttcctattacctagtgatgtattgatcctcaccctgggtaggcctaggctaatgtgtgtggaccttcatacttaattttaaaagtttaaaaggtaaaaatattttaatagaaaaaagcttaaagaatagttataaagaaaatatttttgtagagctttacaatgtgtttgtgttttaagctacatgttattacaagagtcaagaatcaaaaaattaaagttggcctggtgcggtggctcaccctgtaatcccagcactttgggaggctgaggcgggtggatcacgaggtcaagagattgagaccaacctggccaacatggtgaaaccccctctctactaaaaatatcaaaattagctgggcatggtggcaggcgcctgtatcccagctactggggaggctgaggtaggagaatcacttgaaccagggaggcagaggttgcagtgagccgagattgcaccactgcactccagcctagtgacagagcaagactccatctcaaaaaaaaaaaaataataaagtttataaagtaagaaagttacagtaagttaaggttaatctattagtgaagaaagagaaatatatttttatcaatttagtgtagcctaaatgcacagtgtttacaatttgcaattataaattgcagtaatgtcctaggccttcacatgctctcaccactcactcactgactccccagagcaacttccagtcctgcaagctccattcgtggtaagtgccctatacaggcgtaccgtttttatactttgtgcttaatttttactgcactttttttatctttagatatgcttagatacacaaatgctattgtgttaacagttgcctatgatattcaatacagtaatatattgcgcaggttttcagcctaggagcaataggccataccatgtacccaggtgtgtagtaggctacaccatctaggtctgtgtaagtgcactctaggatgcttgcacaatgacaaaattgcctaacaacacatttctcagaacgtattcctgttgttcagcaacacgtgactgcaaatgtccattctgagttaaaggatcagccataggatttcccagatctgccctattagtcacatcctctctttccccatacaaacaccatgtgccaaaatcatgtccacaagggagagtagcagaacagaaactgaagtgccacttttgctaatagagatgaggagggccagtgtcataaagcatcagctaaagtgtttcttgtgtttccctgtactccttatccttacccatttgggccacactgagacctccattactccaggggcagtcctgatgtcagaaacagcaaagcaaggcatcagattcttaaataattctaattttggaatatcttgggtgccttctgcagcaggagaaagccgtctttctgacaactcctttcttatgatattgggatgtgtttctagagcccagattccttctgttgtttcttgctctcttcaagcagtcccagctgagtttaaaaattggccagcttgtcagctggtcctactttctttctagcaaatgtaaggctaacactggatactggaccagactgctctctacttcttttatttttgcttttggaattaaacatttcttttcttaacataatcatccataatttaccttctggggttctccccagtatgaaatatacacgtagaacaagttctcagtccatttgagaacatctatttcacaaacaaattctacccacttctgcacttcttcatatctaaatgaggtaattttatctaggaaacatcttcccattaccccatcatctgacccaggctgggactacattgctgtgcttcaccctggcttgactttaactgggctttttctcctcttccctgcctctctgagcagccctgattcccataagcaaagtgtccaggcacacctacattttgcttctagactttgactttataatatttacacatgagtcaggacaggctaagctacactgcacatcttagggacttgcaagataaaggttatttttcactcacattgtatgtcttttgtgagttgcttctgttgcatgccatcttcatttttggaccagctagtgaagcagcctccacctgaaatattgccagttgctggggcagagagaaacgagacacagagaatcacgtgctgactctgaaagcttctctgtgagtaacatgcattgcatctgcccttatttcattggttagtgaaagtcacaggaccacttctgagttcaactgtgtaagactagaatgctcccacagaagcatctaaggacgaaagttaaaatatttaacctacgagaatacaattgatcagaatgcaccttgactcagaatgacatagtccttgtataataagtccctaggcaccttcatctgtttcttgataaaataaattccatcacccatagtgactgaaaccacagtttgattcatgaaattttgaacacactaaagggttaaataatcagcaaccccaagtcaagcggatacatgaagagaaggaggaggtaaatccaagactgcacaagccaaatgaagccaagaagtgagtctccccacggctcctttcttggctctgcagacacaatctggggatacagatccagggccacctgcctctgtgcaacactaatgagccgaaagccctgaatgtcacacacttgagctccaaggcggatgtgtattgtagctgctttttgtagtttaatgtccctgtgtgctctcctggctgagaaacagattaaaggggaaaacaagctgtgatagcaaaacaacattctccccacggccgcctgaaggcctgttggaagctctgccttgttttgaaggcattcttaagtggaactaagagaatctcatttcccaataatctcatcacagccgcagccacccatcagcctccaccactcactgcatagtgacaagtgggcctcccctgaagtacgctgatcctcaagtgctggttttgccggtgtccttacttggccaggcaccagcaaggcagaattcacaacccactcctcatcctttctttctccagcattccctctggaggggccaaggatcaataaccaaacaaggagcatgccaatgtcataaacagctaagcctatcatttatcatctaaacaagaatgcttttgagaccaaagaagtttgctaaattaaatggggtatataaattgaaatattcactgaccctcaaatagttttatgatgataagtttataaaatagttctctgaaacctatttttaaaaataaattaatttctaacaaataaaaataacacagtctcatgtacatgaaataaaattttttgaaaacttttatattgtttgagcatttaaaataatgtaagcaaaatgatgattgttagtacatattcacttactgtaatctgcttctcagccacatctgttctctgccactgatatttttctaaaaaacttatcctttaaaatgatttgatttttttccaaaacttgtttaagtgtgccttttatggttagtaaatttaaaattcttcgtatgttcacttgactcttctctgtacaccatgatgtatatttaaattgagaaaatgctgtctttatataggcactaaagtgcatcatttaatgtgcttattggacatttgtacgtcttttgaagaaatgtctactcaatttgccccatttttcaattgagttttggttgtgattgttgttgaattgtagaagttctttatgtattctggatattaacccctaattggaaacaaaatttgtgaatattttctcccattctgtgggttgcctttttactctgttgtgtcctttgatgcataaagattcttaaatttgatgtagtttaatttagtttttccttttgttatctgttaaaattaattttaaaagataaactctttaaataataggtatctatgattcttttaaaagaaattaaaatttagatgatgtaaaattagtagattttacctacaaagcaaggtattgcaaaatataataatagaatttcaaaatgaaatgttacactccttttgagctctcaatgtttagttttttcagtttctctattgctttattaaggaaacatttcaacagttttttgcctgcaaatattgttttcaaactgcagttttttaaaaaaaacttcaaatgctgagattgggggggctacatttgttaaatatttggaacaaaatgcagacagattttagattacttaatcacacaaacgttcaataccatttgcaagacactacttaatttgatgtacaaagtaattcttcaaaggctcaaacatttctaaacttcagttgatgatgggcagcaaaggataaaaatctgtatgccttttcattagtgtttttagttttcactctcagcttacatacacacatacaatgcagttcaattgtactggtatatacaaaaattttcacaagtagagatgttattttgattgcaacatgtttgaatgcaattgtgaattatgtttttcttaatttagtaagaatttttttttaccatgagtgcactgcataaaaatttgtatttatattagtacagcaaaagacaaataacttatccctttcttagttgaatttccttgagaaacagacaccgaggctaggattgagtgcacgtagttcattcagaggttcaggaaaccatcaggagagtgggaagatgacattagaagtgaaggcagccagtaacaggctgttcctaagctagctaatatggtgggcttagccttgtaggaagctctgggtatcgctgtaaaacacactatcccaggcaaggggccagggagctggggcattgatacccctctttccttttaattattggctaagaaatgctcctgagggtagtgccctaagtactgctggccttataggtgtggcaaagtgagttagaacagctgtgaatagcagtctactgacaaatacacatgtaccagctagagcataaactgagaaggtttgagcagggcattcaccgaccaattttgcttcaatttttgttgttgaatttgtatcagtctagatcaatcaggaagcaaaaaacacccagtagcttaaataaaagaagttttatacaagggtcagcaaactgtccacaggccaaaattggacctgcttttataaataaagtgtgattgcaacacagccacacccattcatttgcatattgtctatggctgtttttgtgttacaacagcagcggtgagtagtcatgacacagatgtatggcccacggagtccacaatatttactatttggccctttacagaaaaagtttgcctactcataatttaatacaaagaatgaataagctatggtaggacaataactatgaagattcaaagagaaatctaaagtgcagagggaaatatataaaaaagaacaactttggggggcccctccccaagggtaggttcagaattcattgaagagggtgtggacagtggagaggttgctaggttgcccaggccagagctggcccacagtggccaggcaagcaagaacaaacgtttatgtgcagatgagccaaggctggtgggccagtgggcagagtctgggtgccaccacaggagcgaggcctggggcatgtcgtgtttcaatctgggagggggggggaacagagtcaaccctccaggccaaaggtgagccaaggctgatggggggcacacagagggaatcaggcaccctgagggaagcagggcactgctgaagttgctactggaactgggagctgaagtgaccaccttgtgtgggaatctactgcactatgtgtaaggcttgggttgggctccatggctggctggatgggataaaggtcaggcagctcactagatgaccatccccatgtgaccacacatgtgcacatggttggggcttaggaaggagtgcagggagcagcgagctgggtaggccacactctcagtggctcctgactgcagtgccactgcttgaattgagggttgcagaaagctcctggcaaatgcaagagaaagctgtacctgtaggaacctagcagtgaagaaacagaaaaaaaagtgccccatccagaagtgggtaagtcacactggaaccaggaaggaaaccccttcctcctgcaatgtctctccagtggtctctacttacaaagcttaacattgtgccagccagcaaaggaaaacgtatacaaggcccagatctattatcagtgagcaggcaaaaatatgaatctggagcttagaggcaagaaattgacaagaagcaaaaagttgactcttcttcagtagctgaaaatttagtacttaatttttcattaaatatgtaccttcaatattttaagcaactgatacaaatgttttaaattaaacaaatattattaaataataaaataaaaataaaatcactgtgccaaaaccacacagactttattctatgtgttctctagcaagactgctcaacctctatttcctctgcatatgttccacatcgcctatttattttgatgactagtcacctggaagcctttgtgcattctgtaccccaaaacgtgggccaaggcacagcccactggcacacgggcatccacataaaatacttctccaccactgcagagaggggaggaggaagttgtcattggctgcttgtagctgagaacactttgttttatctgaaagcagtatgtgtcatcatgaaaaaggagatgtaagtaatgttgtgtctgtatacatatggggaaagagtaataagttatctctgattattttcacttgttaatatgaaaactatgctcactgcacaggcaaatcacccatgcctagctgagatcatggcagcagacagaaatacaaagtgcaggtctaccaaacccatcccagcttattttaatgtaactactaatagcaagactttaaaacagatatatttaggacaaaagatagcctggtcatgttttagccaggtctttcccaggcaaatttggatgaaaagttaccctactgattccacacttcaaatgctgaaaagctgacatggagattgtagtttagacctggatgaccacacaagacctcatccacctgttctcctcccttgaatctcagagacccttttatccagtccacagagaaaagggcaggtctgtgttattcacccaggcacagtgtatcagaggagatgcggcagagctgcagcactgttcaatgcaagaacctaacccagtagtgaagcttggtccaaagagtggctgcttaggtccgattagatgagatcagccactctttcttccatgaggatgagtgagtggatggatggagagagatgcagaattatgggacaaaatatcctgacatggcaccacctacctccactcattcacgtctgcctcatcctccttcagcacccacatgccttactacacatctggcgacagtcctatctctccttcctcaaaaacgtacctagactctattcccattctttccatccctttccaactgctgtggttttgcctttcattttctccagcctgaactcctacaacagtttcctcacttgccaccacactgaccacatctgcatccctctacagatgtggtcagctccctctgatgaccttgtgttgtggatgagatgaagctcaaactccttagcctgaaagatagtggttcccgaagctgcatgtacatcccagttatctggaggttgtctttaaaactaaaacatggtggtctccatctcaggcttcctgaatccctggaggtacaggaatttaataatgccgtccctacaaggcccttcacaacacagcaccaatctcctttcatcacctcctgcaaccctccataccctgaagccacatagattattttccattttcctactgtgacatgtactttcatgcagtgagttttcatattcttttctggagtatttttttttgccctctttgcctttatacttccagatgcttcaacatttagccccaataacatccgctctgtgaggtccttactcatccactgtgaagaggtaggctctccttagtgtcttacagcgcctatacttagcacaaactgtattttttcttggagttttaaggggcccagaaagtaacatcactcttccttgcttagttcaaagagagacacattattgaattcctgtacctccagagattcagtgagcctgaggtgaagaccactatttgttagttttaaagataattccagataacttgaatgtacattcagtgacatcagatggaaatgaaaatatcagcttcattactgacagactgcactctggaaggtcagatttgtgtgtgggcatgggggcttagtaccacacttttctgtctgaattacactccctttagatgggcagaacctgccttgctatgctgtttacctggaagtagagtagcagagagcttaacagtaggaatggagtgaggggagagaaagagaggcaaagaagcaagtccatttttctcttccaaactcttcatcagataatccactgtgactgacccccagtgaagggctgaggagaggagagaggtggagaaaagcctagcgtggtctggtggaagtccctcatggaaacataagaattttagaataaatgccccctaagagtactgtaattatttttatatgatcatcttactctatttcctagacttctagaatcccaaagatgggattttttcatttcttctgcctggtactaaattcaatacatgtttgttaaatgaatgcttaatcctgaagtgttatttaacacattagattttaaagacagtgatacctcaaattttaaaatcaaacagcttctagtcatttcaaattcccagcagtctctctaatgtaattacatggtttattggttacgtttggacattgtctacaagtgttatttgtggtagactttatcccccagatagctgtgtcttccatctatttttagttgctttcttaatttaaattcaaataggacaaaagccaggacctgatgtcctgctgctgtgtacatagcttaagaatgatttctaaatatttgctaccttttgtaagagaaacagaccttgtgaggcatcacatatctagatggattggagccagatgagaagcatatggtccttatttccaaaatccttgtttgcattggagaggggttggcagttgaaagctgaaacctctccttctgaataaccagataaagggaaagtgtctgcctactcaagttgtggaatagcttggaaatcagtaatgaagagaggccaaaacagacctcggctattggagagtaaagtggacagaaaaaaggcattgaaaccagagacctttggcttggaatgtcagcaggtcacttacatctcagtaccagtttcttcatcttgaaggggagttaatatcacttttgcaaagttggctgtgataactgagtgaggccaggtgtggtacctggcctagcagacaccagtctctgtcacttatccattggactaatagcacaccagcatcatggactagcaactctgcttctctgtcaatgtttgtggagacaggggtggagatgttttctgagcaaatttatttttcaagaactccttcagaggcattgcccatatgtcctatggttgatattttttcatttgtgaaaatgtaaacacacgcttgggcactttcaccatgttaccattgctatactgtttaccttttttacttgaatgcaagctgtgagtttcaatgctcatctggtctacttggctaggatgacatttatgctacttaggaatggttgacatttagatcttagcagtaactgttggaacacttccaggttaatcttggataattggtttaaatccaattctttttgtttttccctgagaggaatgataagaaactattaacagtgattccttttgggtgaaagacacatggcgggagaggaggcagcctctaagatggcccccaaagacccccacctcctagtgttcacctcattgtgcaatcccctcgtatccagtgtagactggacttactaacttgcctctaatgaacagaattcagcagaagcaatggatgtcacttccaagatgaggttttagaaagactgtgacttccaacttgggtgttttttttcttgccttttctctcctctgctcactcagagggcctctgattcccgtattgtgagctgccctgtgcaagactcctgtggcaaggaaccgggggaggcctgcaggaaaccgtctatgagcaacccaggcccttaatccattgcctgtgatggactaaattctgccaaaaaccaaatgagtgagcttgaaagaagaccttcccttagtcaagcgtttaggtgagactgaagctccagtcaacagcttgactgaaacctctgagagacctcgtgccagagacaaccaactaagcagcagctagacttctgaccccgagaactgtgacacaatggtgctttgttatattaagctgctaaatttgggggtaatttattgcacagcaatagataactaataaaggaagagatgatgaaaagggtaataaaaagcagcttttaccttttattttatgcctgttttactgtataaattttctcattttatatatgtacaatatttactttttaaaatattgtcaacaggtgttatttaggccagtggattatggaaaatcctgcaaattggctcactcagtgcaaactccaacagcttctattgccttcccgtactacagaagctagcaaactaacaaacaaacaaacaaacaagcaaaaaaccctgcatttcctagactctcttgaaactgagaacccatatgtgacctagtttttatcaagcaaacatactgcttaggtaaaacttagaaaaaaattagcacttagggatgatgggatgttctagccaatctgtgggtagagatattctgcagtaactgtagtggaggttctatggtctaggtataagctagactgtagtcctcaaaatcaaaagtgtgaagggatagtgtgaagtggccatggagtttccataagagcagtttcatagaactgtgttctatgtggtgccattgttcctgtttgggcaacatccaagataagaacttaactcacttaacacttctcccccctgcttttctcctccttcccaaatttcattttgtttatttttttgagagagtctcactctgttgcccaggctggagggcagtggcatgatctcagctcactgcaacctccacctcctgggttcaagcgattctcctgcctcagcctcctgagtagctcggattacaggtgcacgccaccacgcccggctaatttttgtatttttagtagaggcagggtttcaccatgttggccaggctggtctccaactcctgacctcacgatccacccacctcagcctcccaaagtgccggggttacaggcgtgagccactgcgcctggcccccacattttgaataattagcattaattatttatatgaattattatataattattataataattagcattaattatttaaaatgttaagttaaatttcttttggtggcttcaaaaccgacagtataatggttactatttttgttcaactaactttatcttaactttccttaacttcctgtaaaactctaccctctcctccaactttcttcagtcttgcttccaccaagacttttgagagtgaaagaaggcactatttgtaattacactgggacaagaggcataatcaaatcttatatgttcatgccatataagtaggatcatattcctgtcagttctctccacctgtctgaaaatacatgcttacaatcttttattaatcaaaacgtaagatcaataagttcaaatatacagaaaaatatagaagtatgcaaaaatgtcggcatgtttagattcaccatataagtgagatcatgtggtatttgtctttctgtgcctggcttatttcacttaacataatgtccttcaagttcatccatgttgctgtaaatgatgggatttctttcttttttaaggctgaattgtattccattaagtaaatataccacattttctaaatctaaaaaagtcaaactcatagaagtagagattagaatggtgattaccaggggttaggggtaggaattggggcgatgttggctaaaggatacaaaatttcagttaggaggaataagttcaagagagctgtcatacactgtagtgactacagttaataacaatgtattgtattcttgaaaatcgctaagagaatagattttaagtcctctcaccacaaaataagtatgtgagatactcgatttaaccattccacaatgtatacgtatttcaaaacatcacattgtacacaataaatatatgcaatttattattaattttaaaaacaaatggtttaaaatgctaacattagtcacttccatatggtgagataatgggcaatttttatttccttcttccgcatattttttatgcttcctaatttttgccattatccatgaattatggatgggggacggggggttaaaataatgtttagtcttctaggcagtggatatttagggcattaaatccagggcctgactccacagctgagatgctacttgtggcgatcatcttctcccaagctccacattttagctttgtacagagtgatgtcactgtagaccctgaagtggttcatcctgtggtcacggcgttctgggtcgaccaaggcttctgagtcccacccaatttcctggttttcagtctgtgcctccgggtacttcttcgttggcccctgggcagcatggtgaatgagattcagaaacctggcgtctgcgggttcctccaggttatcatgccaagacataggcttcctcgtaatcctgtgaaccttgcgcaggggattcacatggtactgcgtgtggagtttctgggttcgtaactctttgaggtacagctcccgcaagatctggttctgatggacctcatctgtgaccaccctctctttcgggtgtcccgccatagccttggggctgctccgtgggtccggggctctctcggcgtcctcttaccactcgcttggctgcgggccttctgcagtctctaggcaatggcaccccactccgtctccaggcaacggcgttcgtatgataccgctctggcctctcggaatccagcctctttactagaaccgcctctggatactgccaggaaaaaggctcgccatcaactggcaaacccaggagataatgaacataaaactagacctcacgttgtccaatcacctccctccttgagaacagattcgatgcttttcactcccctaccttctctgcccctggtcctgcagtttgctccgtggttacaaaccaagttccacggagaagccagttcaaatgcagaggcttgtgcagtctggctgcccaggcaggagaggaaaggcgcaggccaggccgaatgttcgcttgccatggtcttggattccccgtgtctgccaggtcgctgctgggaatccacaagtcctggcaattctggaccgcctgggaactgccccagtaggagggaaaccatttctccagggtgagatttgcaagccgtcaggtctggttgggggtggctggatagggagtggggactagagtacaggggactagaaagaagggctatgaggagggtgagggggaaagatagggggacaccgggaaaggggtgcctgacgaacagggcggcggcacacggacgccctggtagtaacagaggaagggccgggcaggaagttccttgaggtagggtactgggaaggggcgacattagtcagcttgggcaaacgggtagggcagaaaatcgaacaacttggacggctctggagaggaggctgacggcaggaagtttgaggagtaacggggggaaggagggctggaagacgagagcgggaaggaacagaaagaaaatgaggctggggttgaggccgagaaattggaggtagctttctagtcatttttccaaatcagcgctgtagtaactcacttgtccaaacgagtcaaaatgagtaactgagatgtgctgagaccgactccagcttttatcccctcaggacattccatcacagaatgcctattatgaaatgtacatttatctccttaggtcatttcatcacagaatccctattatgaaacgtacattctcccctttgttctagtgaggaggccccaccaatcagagaaaagatctgtttcttggtttaagagtgatcatgggaaatagcaaagaaaagaaatggggctgtaatattagtccctgttcttgggatattacgtagttttgcccctggacaggcaaagattgatcaaggggctaacagaggtaggggcttggggcctaggagagcagttctgaagcaagaattgggaaaatgggaagtcagtatcctagtctctttcccttactacattgttcaaagccctttcacattatctacctcactgcgtgaatatgcatgattagagacgttatgttcattttaccagtgaggacactaaagaccacagagggaaggaccataggcaggcagtgggtgggtaagcaggcaggacaagaacttgggccaaaaagagggggcaggtaggagaggccacaaaatggcacaaagcgctgaccagcaccattgcctcctcctgtgtctctggacaggatcttggaggggatgtctcagagaagagctgtagtttttgtagcttacctcttggtccctgtgctcccttggtttgatgacttaatcttcactggaaccagacacacagggtccaagctggtaggatgactgcccactcctgagcacctagtgactagatttggacttccttgctcactacctgagatgcctaactccatcagatgatgaaggaagctgctgccctcccctctcttttgtctgaagtagcaaccctctctgctgaacattcctggtttctttgaatgccattcaaatcatagtctcctttggtcacctattctctcctgtgcttgtatcatcacaagattctgaattttctcccttggcccaacacccttttcctcccatgctgcataaaacttccagttatgctttggaagtccagctacatgatttttagcaaacttccctttttccatagactgcttctttattgacagttccttgcctctccttattttaattgtaacttggatttctcttaaggacattgcttcctttttatctcaagtagaaactacttattctctcaaactctaaagtacttcagagtaagaatgtggtttatagagtctcctcgctccttccgactccttgaaaactgctctgcattattcctctcttcatactggaaaatctcttgctccttatgagttatctttaaactaggaaagaaaacttactgggaaataaaaaagtaacaccttccttataatgacctaaatgaacaaaaatgttaattcatagttcagaaaactttgtctattcagaaaacaagtatgttctctattctcactgtgtattagtctgttctcatgccgctaataaagatatacctgagactgcgtaatttacaaagaaaaagaggtttaacaaactcacagttccatgtggctggagaggcctcataatcatggcaaaaggcaaaggaggagcaaaggcacatcttacatggtggcaggcaagagtgcatttgcaggggaactcccctttataaaactatcagatcttatgagacttattaccatgagaacagcaaaggaaagacccacccccatgattcaattacctcccaccaggtccctcccatgacatgtgggaattgtgggagctacaatttaagataagatttgggtgggacacagccaaaccatatcacactgattgtaaacaacagccaatagattgtttacttttgaccaggttgagggaagagtcaacatatagttccatagagcatgttgcaggcagtgagggaagagaaagcacaggaatttttgaagatctttctaaggtcccttcaatttggagaatagcacttaagaatctggggaagccaagaaaagaaaggagctcagttcctcaccacagaatgacactggtggcaggatcaagaaatagcaggtgcctacatggactttgcattatggagacccaggtcctgcaagcagcctgacccatggctggctgagttactttccactaagtagaccacagatctgaaggaaatatatgtgaggataaagttaccagagtgcctagttttcttcccaatccatcaattatttgaagaactgggctcagcagggcttctcccaaggtgcatgaaacctgggagaaccaccatgcagggagccacagtagaggccaacatgtggatagtttggtggctctgcctcaaacagaggacagaacaaatgaaacagaaacaaatatattcttaaaaatattttagaagaaattttctctaaaatgaaggaaggtagcgatcatctgatcaagaagaaaatttacaatggctggctaatgccacaacattctggaaaacttgctgaactaccaggttaaagatagccttatgaatgctcctgtcacctattaagcttaaaaactgaggctgaactcacacatcttctaagtagcattaaatgctggcagataatggagcaagtttcagaggaatgccacttggatgtggtctgcaggctggcagcttcagcatcacttgggatcttgttagaatgccaaatcctggaccactatcccggacatactaatttgaattctctggaggtggaactcagaaatcagtgtcttaatatgccctccaggtgattcagatgcatggctaacgtatgagaggcactgctccaaactttagtaaaacaaacacatacagctcatgaattttacatcatgctaggttgtcatttgcatatgaaggtaacagacagccatctcttctttgtataaaatcaggaagtatatttctcatgagtatttgaaacaggaggaattgaataaaggaattcagtttcactgttgacgtaagagctaagataacaaatgacattaagacacttcaagattagcccaacagccagtccctgggctgtctggacaaaggagtcaggccaggggccagagttgcctgaaggaatctggaatcctggcaggcctgtccagtggggatggagatagtgctttagacaacggggagctggtgcctgagatgctgactgagatggattgggagaaaaagactctgcttcaccttcctccatccttccagtttcttgcagacattcctgttggcgaaatctagctgaaaaatcagctgagtcaagaacctatggctcagggcacagcaggggaagggcaaggaaggactctgagggccagcagggcagggactggtacgaagtctatacccagtctaccaaatgataaatcaaactaagtcacaaatggggaagggtgtgaaaagaccggcagcagtgccatcttcccaggcttaggatgtggttgtagagggccttgtgctgaaacaggcctcaagtggcttaatgctcagctgttgtcatctgaaaattcttaataatttttgaggaaagtctctacattttcattttgaactgggccttaaaaattcggtggccacccctgactgagactaaacagtaaattatttaaaaatagaaaaataatgttcatggtacagaatgtagatgttatacctatttatcgaaaagctacataatgttaaaaataacgataacagacacataaaaatcctaatatgttctgacgcaatcttaaagcttatagaaggaagtctaagtgggtgagcgctgtcatcttccacagggagaagtagattttgttttgctttatgaggttgaatgaagatgacttggaatgttcacttttaagtatgttacttaaagttgaaacaagatcagtcttaataattttcaaattaccacagggagaagagtgagatgacctaaaaaaaaaatatataggccatgtagcaaagatacaaactaagaaagcacacttaaacaaaatgagaatgaaactgtctctggtaatacctgcaaatggtatttactcaagtattgaatcacaaaattaaacccaatgagttaatgtctgtatgagatacaattaaaacggtgcatcttgtcgacactaatattagtgtcgacaagagatactcctaaagcaagtgcaatcgaaattttaaataaacagatgggcaaaatatgtcaggggaaacttgccaaagagtgttactttgttgatgaaaagtgtcaaactctgtaaaatatttgaaaagatttattctgagccaaatatgagtaaccatggcctgtgacacagccttcaggagattctgagaacgtgtgcccaaggtggttgaggtggagcttggttttatacattttagggaggcatgacacatcaaccaaatacatttaagatatgcattggttcggtccagaaaggtataacaacttgaaggcagtgtcattaggggcgtcgaatatccaaatacagacagtgaatcatacaggtctgcagtaaccttaattcttgcctcctcagaagaaagaatttgactgagagcttaaggcagaaaaagagacagaggcaagtttcagagcaggagtggaaggggtttttgtttgtttgtttgtttgtttgttttttgagatgagtctcgctctttcgtccaggctgttgtgaagtggtgcgatctcggctcactgcaacctccgcccgccccgggttgaagtgattctcctgcctcagcctcctgagtagctgggattacaggtgcccaccaccaagccctgctaatttttgtatttttagtagagacagggttttgccatgttggccaggctggtcttgaactcctgatctcaggtgatccaccagcctcagcctcccaaagttctgggattagagacgtgagccaccatgcccagcctggaagtttattaaaaagatgtagagcacgaaagaaagcaaaatacacttagaagaacaagtgaggcatttgacctttggacttggggttttacatgccggcatatttcccgggtcttgcgtcccttttcccatgattcttcccttagggtgggccaccacatgtgcggtgccctccttgtgctcgggaggtgagcacgcacagtgtgtttaagaagctgtacaaatgcctgcctgaggctttcttcccttttccggtggaatccccctggaaggtcatattccaccttttgtctcttaatttgcacgccccagctgactcgcccaactcctgaaagctgccgattaccagtcacaggtgtttcctatcaacatagggagattgcctttccctggtgctggctgcgaccaattattattttccagtgacagttaacaaccgcctgaccatcacctgatggtcacctgactttcctggtaggggtgcgggggaagccctctcctgcccgaccccatgcctggctagctatctcctgtaacgaggggcttccaggttatacaggtagatttaaaatttttctgattggcggccgggcgcggtggctcacgcctgtaatcccagcactttgggaggccgaggtgggcggatcacgaggtcaggagatcgagaccatcctggctaacacggtgaaaccccgtctctactaaaaacacaaaaaattagccggacgtggtggcgggcgcctgtagtcccagctactcaggaggctgaggcaggagaatggcgtgaacccgggaggcagagcttgcagtgagccaaaatcccgccactgcactccagcctgggcaacaaagcgagattccatctcaaaaaaaaaaaaaaaaaaaaaaaaagtctgattggcaattgcttgaaagcgttattatccatagaaaggaatgtctgggttatgataagaggttgtggagatcaaaattgtatcatgtagatgaggcctccacgtagcaggcttcacagacagtggattgtaaatgtttcttatcagacttaggatgtgtgttactgttaatgctggaaggtataatgaggcatgtccaaccccaacttcccatcacagcctgaaccaatccttcaggttaacttgtagactgccctggcctaggaggaagtccattcaaatggttggggggcccttagaattttatttttggtttacaactttatgtggttgaagagtcaagttcataagagattcctaattgtcatgaagccatagcatcaaaacatcatgtgagcaattcttttcatttataagctattcttgaaaaagtttatgaaaatgtaatatgccaaagctgataaaccctttaagttacaaagcgaatttcattccaagagagctactgtgtggcaatatttctaactacaccttaccttctgggtctgcaccctccattacaacagccgctggccatacttgagcactgcagagtgtctgagagcatggcctgtctgaagtgagacacgctgtaaatgtaaaataaataccagctttttaaggcttaatatgaaaaaaatgtaaattgccttattagtaattttttatacctattttatgctgaaatgataatgtttctggatccattgtattaaataaaatatatcgcaaatttaatttcatgtgtgtctttttaattttttcttttttttttttttgagatggagtctcgctctgccacccaggctggagtgcagtggtatgatctcggctcactgcagcctccgcctcccaggttcaagtgattctcctgcctcagcctcctgagtagctgggattacaggcatgtgccaccacacctggccaatttttgtacttttagtagagacagggtttcaccatattgcccaggctggtcttgaactcctgacctcgtgatctgcctgcctcggtctcccaaagtgctgggattacaggcgtgaaccactgtgcccaaccatctttttaatattttaatgtggcctctagaaaatttaaaattacctgtgtggcttgtattatattccaccagacactgatgttccagtgtctggaactatatttattaatatagtttcaatgtagttcatgtagtttcattaattttgctttactttcataataaatgcctgaaggaaactgaggatttgctacttggttacctctgataaattccatctttattgcattagaattaatcttatgaaaaagctacagttcttaccatcagcatcaacccctttatgtttagatgttacgatcatttttataaaataataaaggtgagatcaaattaatattcagataatttcataagacaagagagtaatagtatcagaaatgaactctaagccaggcatggtggctcacatctgtaatctcagcactttgggaggcaaaggcaggaagactgcttgaggccaggagtttgagaccagcctgggcaacacagcgaaaccgtctctgctgaaaggaaaaaaaaaaaaggaagtggaccgttgactggctgataggcacccccaccatgaaaaacaactcagagagttttgaggtcagtttgtgtaggaaagtctgaattcagcacatcagagctgatgtagaggaatcaaaagtcatttaacaaagtttaacttttatgaaaatcagatgtaaagaagtcaaggattatctataagaatcctgctgaaaatatagaatgtgacaataatacaagcatagtaacataaatctcttctagtcattgacagattacacagtaaaaaattgttacagctgaataatgctatattatatatacttacatatatagtattattcatatatgtataaatagatacagataaatagatataaacctataaatatcctatccctttctttgaaaatatacctcctttaagaaaaatataaacatatcttctgattgggcccaaagattcaataatgtggaggtgttccattgtattagaccattttcacactgctgataaagacatacccaagactgggtaatttataaagaaaaagaaggttaatggactcacagttccacgtgtctggggaggcttcacaatcatggcagaaggcaaaagccatgtcttacatggcggcaggcaaagagagaatcagagccaagtgaaaggggtttcctcttataaaaccatcagatctcatgagacttattcactaagatgagaacagtatcagggaaaccgcccccatgattcaattacttcccactgggtccctcccacgacacatgggaattatgggagctacaattcaagctgagatttgggtggggacacagccaaaccatatcacccatcttctcaaatctacaaacaaattaaatgcagttgcaaacaaaaatacttacttttgtgatttgatcaaatagtttaaaaggtcttgtaaaataatgtataactgagaagtgccagaagacattctaaaaataaaaaataatgagataggtttgtcctttgcacatagaaacacatgaaatcatagcaattaaaatagtacagggaaaggattagacaatgaatgaatcacagaaaattggtatatgataaatgatcacttagaataggtgtgggaattcagtcaatagcaaactacttcagaaaaataaaggctaattcctatctcacttcttaaatccaacaaaaatacaaaatggatcaaagtttgtagcataaaaaagaaaatcatatatatattcatctacattaccttggcttactactacaatttgcattttgtggcttgtttacgcttatgtgtttaatccatctagtgatatctatttttgttcttctagttctaaaatgcttttaatttctgctattctcattactgtctttttcaaacatttctcaacattctcacaggttttctttctaatcactcacaggtttattctcatatattgacttagaacttgtagaaagctgaaactggatcccttccttacaccttatacaaaaatcaattcaagatggattaaagacttaaacgttagacctaaaaccataaaaaccctagaagaaaacctaggcattaccattcaggacataggcatgggcaaggacttcatgtctaaaacaccaaaagcaatggcaacaaaagccaaagttgacaaatgggatctaattaaactaaagagcttctgcacagcaaaagaaactaccatcagagtgaacaggcaacctacaaaatgggagaaaattttcacaacctactcatctgacaaagggctaatatccagaatctacaatgaactcaaacaaatttacaagaaaaaaacaaacaaccccatcaaaaagtgggtgaaggacatgaacagacacttctcaaaagaagacatttatgcagccaaaaaacacatgaaaaaatgctcaccatcactggccatcagagaaatgcaaatcaaaatcacaatgagataccatctcacactggttagaatggcaatcattaaaaagtcaggaaacaacaggtgctggagaggatgtggagaaataggaacacttttacactgttggtgggactgtaaactagttcaaccattgtggaagtcagtgtggtgattcctcagggatctagaactagaaataccatttgacccagccatcccattattgcagagtgtctgagagtgtttgctttatgaggttgaatgaagatgacttggaatgttcacttttaagtatgttacttaaagttgaaacaagatcagtcttaataattttcaaatttataatcccaaaggattataaatcatgcttctacaaagacacatgcacacgtatgtttattgcattcaggggaaccccagcatagtgggagaagcacaagtggctcggaagttgagtgctgagatccatgcaacccccaaggaggcctcactcacccagcatcagggagaggaaggcaggtgtggagttcgagcagtcacaccaccagtgtcagtagccctgtcccaggatcccagagctgtcaccttacagctgcagagaaaccagccctgtatctttattgcagcattactcacgatagcaaagacttggaacgtttattgcggcattattcacaatagcaaagacttggaaccaacccaaatgtccaacaatgatagactggattaagaaaatgtggcacatatacaccatggaatactatgcagccataaaaaatgatgagttcatgtcctttgtagggacatggatgaaattggaaatcatcattctcagtaaactattgcaagaacaaaaaaccaaacaccgcatattctcactcataggtgggaattgaacaatgagaacacatggacacaggaaagggaacatcacactctggggactgttgtggggtggggggaggggggagggatagcattgggagatatacctaatgctagatgacgagttagtgggtgcagcgcaccagcatggcacatgtatacatatgtaactaacctgcacattgtgcacatgtaccctaaaacttaaagtataataataataaaaaaattaaaagaaaaataaaaaaagaacttgtttttattatgttttaaaagcagtctttagggattttgattggagttgtgtaaaatacacagatgaatgtgggaaaaattggtacctttataatttgtctttccaaccagaaatcagaaatatcgcttcattgattcaattatacaagtatctccgtaactttagttgttttcttcaatattcgcctttcacatttctttttcttttcttttcttttcttttttttttttttttttttttgagacattgtcttactctgtcacccaggctgaaatgtagtggtgcattcatatctcaattttttagagatgggggctcgatatgttacctaggctggtctggaattcctggcctcaagcaatcctcccgcctcaaccacccaaagtgctgggatttagaggcatgagccatcacacccagcctctcatttcttttttaatttgcttctaggtgtcttacaatataggtttctatcatattttctttcttccctggagtttgcttgcaaagtttcgacttaatcgtgctcctcagttttatggtcggatggcttgtcatttttgtgggtttgtctatccattagttattagttgttgtgccattgggggtgcgtacataggcagtgatctcttgaatggctgcatcagtcttagtcttcctggtttctcacttgcaacatgcaccttcaggtaccctcaaatgtctcagtggtgaattccatgcaggctagggaactccttcctctgcaaattcccctcacttcaggaacttggctccttaattcctagctgccttggtagccctgaacaatttgggcctgcccaagctggtgagaccgtatcagcctctggttcattttggactctgttgggcctctacgcctgcagtgtggattggcaaatgctctgcaggtacaaagctttggaggaggcccagctcacctctgtgagtttcctttctctctcctaagccctgactaccttgcttgccctctgatatctccaaacagttttgttttgttttttcatgggagtcctggaggtggcattttttttccagcttttagagttgagtaagtcagattatcagccactctgtcaaagccaaacacaagcccatccgaccagcttctaattggttaaactacactgcatcctttcacttcagttctcaactgtgatcacatttttatcaagtgggaaatgaaagttaaggaaataaatggttctaaacaggaaacttggataatgtagtgaagatcacatgacaaggcagacgtctgttttcagaatttaaggttttgaagaatatttcctaattgaaaatctagcttggtaaggtgagtctctgccctcatgtccccaccaaatccactttgttccatgatcctgcaggtaccaagactaggataacagaaagaggcctctgatagtgaagaaagggacaatcactctatcacatggtagcacacagaagatatgcctaaggctggttgcaggtgtgaaggacctctgtctattgggtaaccagctcccttcacttctctggatcattctgactgaaccaagtggagctgacagaagctgtcctcgagtccccggggcatgggtggcagccggtgggctccaatgaggccatttgggggagaggaagaaagaattggaatgggtttccctgctgagtgtgatggggaggccatgtgtgattgaggggattagctttatttggagctttagctattatacctgactggctttgagtgtgaccaggtggcttcaaataggaacaccctgtgttccgaatcaagccaactcatgggtgcatctgattggcaggctataatttccttgaagtctgtttcagaaaggtaggctttccacagtggggaactagtcaaagctagaaagggcattcaaaagatttggagcacttgtgaatgataggactccccaagagatagagacaccagggacagaaagcatcaaaaaatgactgtttctgattaaaatacaaaggaagaaaaagaaatcttaaacacttccagaaacagatgaggcaatgacgtttatgactcattaagggattattctgggccaagctgtttaaatccttaccacaagtcttggaggcaggcattgttatccccattttatagggagaaactgaggtgtcaagaggtgaagtgaaccgtcccagaccccacaggttatacatgacagggccagtataacacaaatgtctccgtctgaaacctgagccactcactgccactccatactgtctctccctttggggtagatctcagtggctggagagtctctctgttcaacgttggtgttgacaatcacaacaaagttaagtgaggtttggcaagtggatgtcccgtatgtagaaagatttcactggacatactcttttttaaaatttttatgactccaagggaaaatacaaattactttttaaaagttcaggtatgtggataacttcatttttgtgacaagtgaaagaatgccctgaaattgtatatgaatgcaaatcagtgtggtattttatatcaattacatgacagacatgactcacataaatatggaagaaggagtggccatttactagcatccttgtaaaatagaaagcagtgtcccttgaacaaaatttcattttacctggactgtgtttaactaacagccagcataggaatcacctggcaacgagcctgggatcttgagatcgcagcactggaactacaggaactttctcaagctctgtggaaaaatctgcctggtaagagctaaaaacgtcccattggtccaattttagaactttccctctgagtcttttagaagtaacagaaacccagaggggaaagcagggagaaatggaaagagctgtgacccagaagcggagaggggctccgtcaagcctgggtctggtactccttagcttcagcaagtcacgtcacctttccagcctgtttcccttttctgtaaaatacaagttaatatgacaatataattaatatattaaaatatataaaatcccagattttaataatatgctattcaaatatattaatatgctttttaaatatactaatatgcttgtagtgtttctcaagttcatctcaccacatgtcccttgttttctgagctcgctgggggattgatgctccacggagcgctgctgggaaacgctggaccagagccagttccaaagacttccttctgaaaatcctaggtttgttctgcaggtgtggcctaacagctccatcttttttgtgttcagaaacattcatcctgtgctatcacatgcggcatcgcctcaggtaagacaagcagaacagggagcaaaggaaaactttcattcattaactcaacacacattgagtgcccactagggtcaagtatgaggccccatcttggcaatggattttagagaccacagacaagcaagggtctgtggagaagtctttccatctgtagtttccaaggagtcctgagacttggaatccactgctgtgtttgaagggtttgcgctgggttgaggaggagagtttacctggactatgcttgtacggaggtgtatggcaacaacataatatcgagacaaaagcagagccagaattgctaaccacaggccaagaaaaccaatgacatatctaggggaaactggaaatatttactcccaagtattaacagtgattaccatgaagtgttgtaattaggagcagctttaaatttttttttttttttttttttttacttttttttttggagacagagtctcgccctgtcacccaggctggagtgcaatggcgtgatctcggcccactgcaacctctgcctcccgggttcaaatgatcctcttgcctcagcctcccgactagctgggattacaggcacgtgccaccacgccagctattttttatgtgtttttagtagagacggggtttcaccatgttgggcaggctggtctggaactcctgagcttgtgatccatccgcctcagcctcccaaagtgctgggattacagatgtgagccaccacgcccggccacttaattttttttttttaatgaacatgtgtagcttttgtgatcagaggaagataaaacagctatgttttatcaatacctctatgcttattaaatacctcaatgttctattttttaaaaaatgatggtcaagacaccggtctaagtgacaaaatcatttcagcctcaggaagcttccagggaaaataggaaatagacaaacgatttgatatttagtttttaaatagtataaaaagagactacagatgaaagatttggagctctcacctgaaatcttatgggagtgattatacatggcgatgccaaagggcaggctgccacggtggacacttaaaacagttttctccccaacactgggcatgtgccctaacgcgacatacgagcttataaatatctacgtttgcatttataagctagacaactttaattacttttttcagttatagctctttctgtgaagtcttacttcagttgacagctgaagtcacctcaagtgggaggtgtggcctcatgtgcccactcatgggccacacatgcttggccttctgactccgcactagtgtaaaccatctacacccttacattggatccaagagccaacattgctctgttaacagcccacctctcccagtctttggccaataagcaccagagagaaagtcacagtctcagagatggacgggcactgacttgttctctgacctcatcaggctcctcacacagccttgcatgacagcttatcctccattccttggcagcagcctgaaaccctcaaacttgaatacagcgcccagctctccttttcctactctgtttttaacaaaccgcatcttcttctttttctcgaagaaacgagcagtctttgggcagaactcactcaccttcctgcatccccctctatcaattggtctgtgtcccccactctccccaccggggaagggacgtctcagcacctcctgtgcctgtcccctgggccactccctctcactcccgtctctgcaggccctcactgcttctcttcactctgtgtctccagccactccctctacttgcctctttcctgcaagcattaaaggtgctcaagcctcctccatctgaaacaaactctccttcaagtccgtgtcctcccctggtcctttcttcctttgccctattctttctgtttgagacctggtgagtttgaagtgactgagaagggtcacagtggatatatctagtaggatttggatatgcgagtctgaagttttggaaggctacctgggctaacggcatggaattaggcatggaattagggcatggaattaactagcaaacaaaagatgatcatcaaaaatgcgagagtgaaggtgatggcccagggatgtggtttagagaccagaggtctaaggtagtgaaacccctcaggtgccacaactttatgaagcttgaagccacctaccccagaagaactttcttaaatctttaaaaattataacaacaaatattgagcaataaatatgtaccagtcattgttctaaatgcttcataattttcacaaacaacaggtatatattatcaatgacttcactttactgaagaggaaaatgtggctcataaacgttgtgtaactttggaagagttgcagctaagcaaataatgaaacctggccaggcatggtggctcatgcctgtaatcccagcacttttggaggctaaggcgggcagatcacttgaacttaggagttagagaccatcctgggcaacatggtgaaatcctgtctctacaaaaaaaagcaaaaaacaaaaattagccaggcgtggtggtgtgtgcctgtagtcctagctacctgggactataggcgcctccctgagcctgggagggggaggttgcagtgagccgagccacggcactccagcctgggtgatacagtgtcaaaataataataataataataatgtctcaaaataataataataatgaaacccatgtcatggcattctaaaatcggcttgtgttccatattctataaaataacttcttgacagggagcagattagatgatatgagagatcaagagagtttttacttaatttgtgtgtacacatacatagagttaatgataaaaaatgctttataaataattgcttataaggattaatttgcccaagaacttcatcaatatacaaactataaaggatcatgaaattattttaaaaattattcacaaatttatttagcaactatttattgagtgttttcataagtcaggtctgatgctgaatagcacaaatataaagatgggctagaggcagccccagatctctgggggctccctgtcttgtgagggatacagctgtgcacatactgactgcaatgaggaaaaagccacgaaagaagtcactagaagacaagcagcctcgtgcttgggctccagagtcaggcggattgagcctttgttgttttattccaacagaaaaggaacactaagtctcattgcattgttgcagagattacaggggatggtatgcacagactcccaaaggcaatccatgaatggcagtggacactttaggatgatcatgaaaataatggttagtattattaagtcagtgtaaacacaattgtggtttttgccattgaaagtaatggcaaaaaccacaattacgtttgcaccaacctaatatttaccaactcttcccagagagagagttaagtaagccttcttggaaaaggtaatgtttagattgaggctaaaaagttagaaggaagtttgccaagcaaactaggaggctagttcatcccagacagcaaagacaaaatgtacaggatggcaaaaatgagaaagaacattccacgtacagggacctcaggcagtccaacttgctcagagtgcagggagttgcagaggggttggggaaatggactgaccatgaagaaaattgcttaggaatttggatttttatcctttaaatcagtgaacttcaaagtaaagtgcatgccctcctaaaagttaacaaaatgattcactggtttactgaaagtaagattagaacttctgtgagtacttcaacacatttttacctttttaatgtttacattttgcctgttttaagatgaacacactgattttgcatagcagtacatttatgcaatttataaataaatatgcatattttggggtgaattctaaaaacttttatgcagataagagtgtgtgaacaaaaatgtagaaagccactgaggagttccaagtgggaaaatgatgtgaacagttttgggctcatggtgaatctgtctgagagtagggaggagcacagacagaatgtggcagaaaacaaaggcaaggccagccaggaagtggctgctataggccaagcagtgtttccaaattcccaatagattagtctttgggatttgtgaacaaaactgtggaactccctggaattgtcatgaattcctcaaatcacaagctattctgtcattttcaaaacattttatttacctgtttttgaataataatgagtaagcataataatataggtaaattattttttctgggatgggttatacactaaatattttaattttctgctaaaaacagatataataataaacagctttaaaaattggaccaatatattgtgacaagattatatatttcaataacatgtaaaaatgttctctatctgataataaaacattataagctgagaatattaacatgcaacaaatcgctgttaaaatcacttaaaatttttaaaatactggctgggcacagtggctcataatcccagtactttgggaggctgaggcggctggattacctgaggtcaggagtttgaaaccaccctggcaaacacggtgaaacccgtctctactaaaaaaatacaaaaattagccaggcatggtggcacacacctgtaatcccagctactcaggaggctgaggcaggagaatcgcttgaacctgggaggtggagattgcagtgagccgagatcatgccactgcactccaacctgagcaacagagtaagactccgtatccccaccaaaaaaaaatttttaaataccatatttaatatttaaaagttattaattcttaaaatggaaatgttaaatataccaaacaccaattgtcctacttaatagcctcagttttttttttcatgacaaacattccaaatgtagaaaaaatttctttcatttcacattgacattggttaattaagactgcaccaaacagcatcttgaagttggatattagggcagttgctgcttcatttaagtttaatcttttttaatccaacgaaaggatttttttcattgcaatgaaaatattttgtttacttgccctgattttggttttgttattgaaatttataatttatattgctttgctaattcagattttttatccatttctaatttcccaatgaagcattccaaaacaatattcatagcttcttttcttcgcatttcttctgttaaagtatttataaacaactatagcttacagcaaatgttcaaacactggaaaacatcaggaaatacaagtgagtagtattcaaataacctaacatttggatctcctagcaaggttaacactactagacagaatcaagtttcaaaattgccaatttaaagacttattctacattcataatgtattatttcttggaatccccctcataaggtttatgtaaagtgaaccataggtatacatttcttaatatttattatgatttgcaagaatccttgcttgcagcagataggaccatagtacactcttggaacacagcaactgctacgagccagactgttggattagatgaggatgacgtccctcctccacactcccattcccatttcccaaaatgttgaccttaacctttgactctcttgtaggggtttcctgctcttaatgtcaatggattcccttgaaacagtaatgatctctttgttgattattaagcttcaatcatcacagaattataatacttttttccattgtctcaatttcttcactgatttttctcaagatttgcaaaaaccaattttgcagtcaatcctgagaaagaattacttcatgggtacactaaatccaagtgtaaagtcacaaagaactaagctagagcagcagtagtgggttacagaggaggggtggattggggtgttcttctgaaagtagagacaagagcctgtagtatctcctaagggatgtgaagagtgagagacagaggagattgttctagaatgactaaaaaaaaaaaagatttctggctgggtgtggtggctcacacctgtaatccagcactttgggaggccgagacgggtggatcacttgaggccaggagtttgagaccagcctggccaacatggcaaaaccctgtctcttttaaaaatacaaaaattagttgggagtggtggtgtatgcctgtaatcccagctacttgggaggctgaggcataagaatcactttagcctgggagacggaggttgcagtaagccaagacagtggcactgcactccagcctgggtgacagggcgagactctgtctctaaataaataaataaataaacaatttctgtacagacaggcctgtctatcgtaggcagtgctaaagggaaatgtgattaattcatgttcaggttttctattggctaggtaaccaaccatccaaaaacttagtgtctttcattaggaaaatgcaaatcaaaaccacagtgaaataccaaatgatacccattaggattgctatttataaaacaaaacaaaaaacaaccaaaaacaccctcagacaataacaagtgttggcaaggatgtggagcaattggaacacttatgcattgctgtgagaatgtaaaatggtgcaggcaattcctcaaaaatttcaaagtagaattactataggatgcagtaattctgctctgggatatacccaaaagaatctaaagcagagtcttgaacagatatttatacactaatgttcacagcagcattatttataacagcctaaagatggaagcaaccatcaataaatgaatggtaagccagtcacaaaaggacaaatattgtatgattccacgtacatgagatacctggagtaatcaaattcacagaaagtagaatggtggttgccagggactggagagaggagggaatggggagttagtgtttaatgagtacagtttctcaatttaggatgaggaaaggggtcgagatggatggtggtgataattgcacaacagtgcaaatgaactcaaggcgacagaattgtacacttaaaaaatagttttgcccacgatgatcctgagtgatgagcaggaatttaacgatgctgcttctgttcccagtatagagtcttcccagagtgacagcaggaatgccaagcatgggtcttgtccaggtctgtcctgctctggctatgcaaggtgggcgagccacttccccactctggccttagtttcctcttctggtgaacaaagggagaagagtggagggttccccaggttccctcagcactcattttttctgcttttccatgggacaggctactatgaggctcctgactcacctggatttgaaccccagacctgccggctccctgctggtgattttgggagtcactctcatgtgtggtggttgatgctggctgtctgctagggtctttgctggggctgtcatctgctccacctatgcagagcctccttggatgcaggacctgggctgtcttagagcttgagcatcctggtagaacaagatggaagtgcatgatgcttttatgacctagccttggtcacctctgccatgttccagtggtcaaggcagttatattgtaagaaaaacatgtgggatatattctagtaggccatttacaagtcattcttttctcttctattttctttatccatgaagggcttgaagaagtcagagagaatctgagtctttcccagatcataagttatcacaagtgtaacactggagaccattcctattttgtatgtatttcagtgtgcctgttttatttaaacagctgctgctggtggtaacacgtacataagactgaaacacagcaaaaggacaaagcagcttagaatttccacagttggaacagacagaagacatttgacacatccacatcgttccatatgctgagacccaagacctgctgtcagtaatctcaaaatcattgcaaaatgctctctcatcctacacccatatctgtgatcaggattctggaatggacattttctcctccctcttttatttttatctaaccatttttatagatcttcagtaaatttctttcaggaaaataagatcactgttaaaatcatgattttggctggctgatgaaattttccagattatcttctttaaaagactacagaaacatgattttactttctcttttcatttagcttaaaattaaaagtcaattttttaaaatcattgatcctaactacttttccagcatcctaacactggtcacaagatgcacagattgagaaaataaaatcacgccttccaaaagaaagccagccaagttttgccgccttctttaaaaaagtacatcacccacgagcctgatgagatggcaaatgcacagcttgagttggttctaagaaaaatgcctcagaagattcattctaaaagtgtactctgaccttactaagcaagactacaaagtcacagtgatacctaacgacatcaaaatagtagctgatatgaatatcttcctttgatgtaattaagaaatacaccaaccagtgacactcaacacagagttctttccaggttagggtgaacttggaattaaactgttgttagaagaactgtcaagacagtttcatttcttactcaagtaaaacactgagggaacaactacaaattagaagatacaaagccgtaaggaatatttgcttccaaggagagagtcaaagagatacaatctccttactaaaagaaggaaactgataactgcaactataaactataactgctgatgatccttttaacacttcttatacatttttttagtcattcaagtaatgtataaatatattcttataaaaaagtattagttgagcccagaggttcaagaccagcatgggcatcatgatgagactttgtctctacaaaaacttaaaaaattagccaggtgtggttgcacacacctatagtcccagctacttgagaggctgaggtgggaggatcacttgagcccaggaggctgaagttgcagtgaaccacgattgtaccactgcacgatcaccctgggctacagagtgagaccctgacttataaacaaacaaacaaacagacaaacaaagtataaagccaaagaaaacctctctttcccggttcttccatcaatgctcaccccactccaggtaacttactgctgttatttctatgcattgtacacacatacctatgcatttacttgattgtatacatacctaaagaacatgattgctttgttttattgtccataagtggaaccagcttgcttccttacactttacaatgtcttggtccattttagtacttgctagaatttcatagcatgaatcatagtttatgtgggccttactgactgatatttacaatatcattggtcatggttttttgtttttgttttttgagatggcgtctagctccgtcacccaggctggagtgcagtgacacgatcacgtctcactgctgcctcaacctcctgggctcaagtgatcctcccatctcagcctcctgagtagctgggactacagttgcatgtcaccattcctggctattttttttttttaatgtttgtagagatagggtctgtgttgtccaggctggtcttgaactcctgggttcaagtgatccacctgcctcagcctctcaaggtgctgggattacaggtgtgagccactgtgcccggctgtcatgctttttgtgtacaagtgtgagaacttctctaggatacatagttacaagttgaattactggaatgaggctatctatatttttaattttaattaatgttgtcaagttaccttccaaaaaaaaaaaaaactgtgatcaatttacacctccaacctacagtatagaaatgtatctgttccctgtccccctgccaacagcctggcagattttattacttttccctaagtattagtgaggttgagctttttctatctcttgttttgccatttgtttttgctgtacagtgaatcgcttcttcctatcttttgccgatttcttacttgggttatttgacccttcttttcattttaaaaattgatcctagttgctcaagatatttagaggaatttctaaaattctggaaggcaggaaatcatatcttcatccttttgtattcctttggacttacaactgtgctaacttatttttgtaacatttacaaaattaaagatgggttttgcttaagccacaactacatacaagattgcaaagtggcaaatacacacaaaataggcatagtaactacactaaaagttgatgtcttggaaaggactagtctagcaatgtgtagaaatatctggtcagggaataaaaaagatttggatacatttttattaagaaattggcatatcctttttcattagaaattcaagcaggaacaagaaaaaaaaaactgaaagaatctgtgttcaaggacagactcacagattgatttgcaccatcaggaagctcctgggtgaatggacttgagcccactggaagggttttaattcttggttgtcaagacaactgtattccaacagactgtgtcagcagaattcttcaacaatcctcaccttcccgctgcttacaaaggtctgttaatgtctccttactcaatagaccaagcttttgcattgccgtctgattaggaggcgagaaacaggactctgctctgagaacaacccctccatctcccagagtcaccttcctgcactcctgatgtgcctcactcagcctcccttcctgctcattgcccccaatgccctcttcctcctgctctggcatctctacattccaaaagccttccttgacctttccaacccaatcaattttctattccagccccactaatcattgaagattatgttcacgctctgaagcactgctggcgagaggaccgattggtagagtcgttctggaaggcatgtccccttctccggagtaatttggcaaaatgcttcaaaactcttatgggtatatcatttgagctgtgaagttactgtaaggacataatgcactaagatatatataaccaaaaagagaatatgggaaaagggggtggggtaagacgacaatgagaggtctcgccacaagatggtgtcttagtttttctctgtttagcttttaccttgaaccagggcaggaaggaaataataccaaaatgttgataatcttggatattgggatttggggtgatttttagaacaattacactgtgcattttcatgttttccaaattttcttcaatgaaaatataaaaatataaattgctttatgatcagaaaacatattaaaaaccaccaacaaataaattcaaacaggaaaaaaagaggaggaggaaacgtatagatgaaaagagagttaagaaatatatcaacgtgacttacttggctccagacttgaacaaattaactatagaaaacatttgtaagataatcaggttaatgtgaccattgactggatacttgatgacatgaagaaattattgtttagttatgataatcagattatagttttaatattaaaaaagagttcttatcctttcatgatatatacctaaatatttgcaaatgaaataatactatgtgtaagatttgcttcaaaatgatctggtggcgtagggggaggtaggtgagtatagaggaaacaagattgactactcaagtaggatggtgagtacatgaggattcatgatagtattctatttttgtatatgttggaaattttcagtaacaaaacgttttaaaagatagtaacaatgaatagcatacagccccatgaagcatagcaggaataggtaagggtggcattgaggcaggaggctgcgcttggaaattaattccccaaaagtcaatttattcatatatttctttgcctctggcttctgactgtcactctccaacttctggtgcctctcatgctttgcacctcaaatttgaagcaatttcatcccctgattctcaaccctcttgcttctgtcaaaggcttataaatgatttttctgtcttggctaagagccccttggcttgatgatctggaaaaatattccccttggcagggcctggggatccccatcctcccatccttctctaacttcagaagaaaccctttctagacatagtcaagacccacaggatctgctccctcagtgctaaaagcgtgaaatcaatgtctcttgtccaggacttctggcagtggaatgtttgtcccagcggcttctcaattctcttgctatgttggtgttatggctaatacatatctgtgttaccatccaaaggagaatgtccgccttttaaaggtaggcgttagttcttcaaatataaatattgtgtccaggaattcttgggcttacccgatggtcttagtacaagcgtagccatacactgggtacatgttgttccatcatccagcctaaatgacccaaagttctcatattaatttgcactgataacagaagtaagcaatatgttttccttatatacattttttttagtgtttcattcctttgaaaaataattacaaatcacagatgggataggagtgagagcaagatctttgcatctcacttcctgggctttgataaatatgctatattaccagcaatgttaatctttaaattgttcataaagacccatgtttcttgctaaatatattgaattctccatttataaatatttttacgtgtgactttttcaaaatatctgcagtatcagtttgagttggactatagttctacacgtggagccaaactcctatggaagatgggcggcctcttccacagggcactgtgatcaacaccaggaaggtccaggtcccaagggcctgtctcatgcctggattaccactgacttcatggtcagtggtctagtccctcctaaaatattttccgcagtagcagcccgaatgatctctgcagaatataggggttggtaaacaggtctataccggttaagtgtattaaaaaatatattcaccgtaacttttcctattcccaacctcctctcccctctcaatctatatagtttggataggactgactcccatttagtggcttcaagtgtccacatgcaaaccaagctgggccaatcacagttaatagagaaaattttctgggaccattggaaaaggggctctttttcttgtgaactgtgcctcagatggactgtaaatgcagttttaggaaaaatcttagctcaagtctcttaaggccaatatgtcttttccattcaggaacctcactatttgttactggaaaaaaatgagatttccattatttttgtggccacaaagaaaaattataatcataaaatttcagctgtggctactgccagtgaccaggctgctgaggttattaaagccatttttctatcttaaatgaatataagaaattgtaggcagtttgggaagaaaactacaatctaatatgtttccagggatcttgaaggagcatcctaactatgtattaaggatgcacagccttgaatacagggtcatctaaaggttatgtggcagggaacaaagatatttcagacaggactgaggttgctactgaggtgcaaggaggaacgtaagctaaaaaagcaagcaacaatttagtttctctgttggtcttccatattgggcatcaaacaaaatggtaccccttgggaaactgccaatttcatgaacactttttggatgaccatgaggccgaatcattcttcactgtctggctctgcttctggatttggttagcaaaatgataagattagaacgggccagcccttacttagcaaagttgtgtcatctccctttgggagcatttcaatcaagagatacatattgataacccactgtgtgcaaagtactttgttttcctgctgcttctttctccctctttccctgcctgctccctcttcctcctcctccacctccttcttttttaatatccttatagcataggaaggatcatgccagactctttggaccacctcagagccacaatggtgacagcactattcttggcacttgaacagagaagaaagggagactgaatgcaaattgattccaaattaggcttctgtagtgactaaatatacttctctgtcttaggtactagatttgggtctgagttgcctggggctgatgcagttaactccactgttatcctgctagtcagttgtcctagtctgttttgtgcttctgtaacagaatatctgaagctgggtaacttattttaaaaggaggtttatttggctcacaattctggtggctgggaagttcaagataggggcagctgcagctggtgagggcctcaggctgcttcaactcatggcagaaagtggaaggggagctggcatgtgcaaagtaatcacatggggagagaggaagcaaaagagagaaactgagggagccagactcttgttaacaatccattctcaagggaactaatcacttacccatgtcggggggcatttatctattcatgagggatctgctcccatcacccaaacacctcacactaggccccaactcccaacattaccacctgggggatcaaatttcaacatgagtttgggtggggacaaaccatatccaaaccaatccacaacatcagtgaacagatacttgagtgtcttttacatatatccatccccagacatttaacagaggcactggggatagacaaataatggcactccttactctttaggaaataatagtctaatgggaacaaaatgaatcattaaattattccaagggctcaaatatctttggataactccaggttgctatggaggcacttaacagggaaggtagccttatctggaaaggcaaagaaggcaattctggggaagcaatgtttaaactgaaggatgtgtaggaattagccagaaggcatctaggggagtgccctcctttcttacttgccatcactttctcccctaatattaagttaataccctgtccctatttattgacgagtatggccctgactctagctgacactattcacaatggagaagcaatatgtgagaatgcagctcaaagtcccggcttaaatactgacaaactgcccatccttgtggtaaaactcctctgggcaaccagtggttctccgaggctcctcagtttgtttatctggattgtgcatggatggcaggttgtgggtgacaactcaactccagtaagtcaatcttgcttcctcaggctgcacaaggatctcctttgcagatcaagccctggcatcaccagagttcaggaggcccaggcacaactccatccttcttgcaattccactttgaccaaatttagtttgagttgtgtttctgtcgcttgcaaccaagagtcctaatgcaatcatgttactgaaagtttgtatatccaatatatatatattttgtatagtatatgttttgaatctaaattttaggctacgttttttaattgaaataaaaataaatcttaaagaagctacctacgtaaaaatgaacttccaatcatggtaatataatttacaaatattttattaaagctcttaagagcagcttttctaaatttttggaattagaaatgtatgttcttgagccttttcacattgtttataagtaggcaattctcagttatacattttggtgcagcctggcatcaaagtataggagagaaagcgtggaaagtcctacctggagaaatgataaagacacatggcatttttggatagagatccaatgtgtgagtgggctcaggtgggcccccttgtgtttatcagaagttcaggcagtagcccttaggacggaagtggaattctgttcctattgctgagacagagcccaacagcagaataaggaattatgttgtattagtttgctaggactgccctaagagaagaccacagactgggtcgtttaaacaaccgaaatgtatattcttagagttctggaggccagaagtccaagatccaggtttgggcaggtttggcttcttctgagggctgtctccttggcttgtagagggccatcttcttgctgtgttctcacatggtctttcctttgtgcatgggcatgtctgtgtccaaatttccttttctttttttttattttattttatggagacggagtctcgctctgtctcccaggctggagtgcagtggcccgatcttggctcactgcaacctccgcctcctgggttcaagcaattctcctaccttagcctcccgagtagctgggactacaggtgcacgctgccacgcctggctaattttttgtatttttagtagagacgggttttcaccatgttgcccaggctggtctggaactcctgagctcaggcaatccacccacctcggcctcccaaggtactaggattacaagcatgagccaccacgcccggccaaatttccttttcttataagggcactaatcatgttggattagggcccactcatatgacctcattttaccatacttacctctttacaggtcctatctctaaatagtcatcttctaaggtaatggagttaggactgcaacatatgaatttggggagggcataattcagcccataacacttgtggtaacatactcttattaattttccttttaggaaagaactagcttgtgagaactagtaatattatcgttgaagaatgcattatcaagcaaaatagagaagaaagctgcaaaatagatgggagacacaagtggatcctgccttgcggggaggatagaagaaaggaccctgtagtgacactgaattaataagctagccaaagatgtgggtattcagacacacaacagatgggcataggatctgcgtataaaaataacagagtgtgagagtaactgataaacctgctgtttctagggggatttagatatgcttacagtggaaagaggccttagagaacaacttggcagctcagagttctgtctgcagcaacctgacacatggtcaccagccttggctcagagcagagctccagggggcacacccatctgtagatggacatctccaaatgttagaaagtttttttttttttttgagatggacttttgctttgtcacccaggctggagtgcagtggcgcaatctcgactcactgcaacctctgcctcccgggttcaagtgattctcctgcctcagcctcctgagtaggtgggattacaggcacatgccaccatgcccagctaattttttgtatttttagtagagacggagtttcaccatgttggccaggctggtttcgaactcctgacctcaggtgatctgcccacctcagcctcccaaagcactgggattaccggcgtgagcctctgcacctggctgattttaggaagttgttttatgttaaacctttgatgctacaactttcattgattaacctcagcaactggacttctgaaactatgtgaaaaaatgctatcttcactttcccctttgcatgcgacaaacttctaacccttgcacatttaatgtcctcagttttcatgtttttgaaatcatgtactatccaattcctccactagtttcttaaattttaagatttcaaatttgatcactctcctaacgactcctgtctgctttgtcaaaatccttgttttaaaaaaatgccctaagcaaagtgttctcagatgcagaatggagaatgctactttctgtgaataggacgaatagcccattaaaatgctgcattcaattttcatttttaggagtcactgatggtccatatttgtagtcaagtaacagaaaccaggctgattattaatggattgctgtattagttacctactgctgcataacaaattgtgccccccaactcccaaatttagcaacttcaaacatttatctcacacagttcagaagatgatcagaaatccaggaatggcgtaggtaggtggttctagctcacagcctatcatgaggatatagtcaaggttttggctgggattcctgactctgaggatttgacagtaacaggaggatcacttccaggttcactcatatggctcttggcagggtgcttccattgttcaccaaatgggtctcttcattcacaacatggcttctttcagacggcatgatatcaagctgctgtctcattacctaatcttggaagggatgttctgtccattctgccatattcttttggtcacacaaaccaaccctggtagaggtggggatcaggggaccatcttggatgctgacatttgtgaagcatttgctacgtgctagttactcttcctgtgctagcactagctaagcattttgcatgcatcgtctcacctaatgctgttgacatcctcccaagtagatgttattatcatcaccccatttacatgaggcaagcaaagcttagaaatgttaagtaaattgttgcttagtaagtgatagagcagagattaaaacttagatctaacttcagaggaaaatgctccagttttcttacccaaggcctcttttcatttggactactaaccgagtctctcctgactcatccttgtatgaataattttttgagtataattgcagaattttgcatttcatctctattaattgtgccataattattaaaaaattacacagtaattttcattcttgagtctgtcatttgtgagttcctttcacccttacttgtctcatctacaaagtctcttattttcacacagaacacgatgtaaatggatcataaaccaggaggcatagatgtgtctataaaaccaaacacactaagattagaataaaatcctagtgacaaaatgtatgcagtttctaaactgaaatgatttgccctctttagccagattttgtcaacagagatagaaatgtgtaatttgatgtagctgagttcacccagtcttttgaatccatctaaaacgggctcaatgcctttctccactggtctttgggaagactagtctcttgacatttctgcaaattttagggtttttacattcttcttgtctcttgtgggcctaaattcctgtttccattcgactccagatcctgcctcctgctgttcacttctttctactcctcagggtcccagatgtgggacacagctaatcagttttccctaaaaactactcagagatgacatcgtctttataccaaactttactgaacatttgaggaagatggaagggtttagcagcaatgcaacataaaatggaatattagcctttcctttcttaaaatgccctttgattgctcaggttgcttgattgactctttccctaaaaccctcacctctcaattctcctcactttagaaagcttcactcttaatcctctatggaactctaggctaattcctgcctatctaaagattcaataatttgctctgcttaggagcaaggaatttgaggaggctttgaagttttagtgtttcctcttcctcttcagcctccattctgttgagccaccagtctttataagtggaagtgtgtagtataaatatttcttttttcctctgatatgacttacataatttccctgagaaggcagaaccagtttggctttaagtaacattattttcctcattctgttacatgcagtattgcatcaatagaactacgcagtggagactggatgagatacttcttaggttgccaggaacagtcatggtttcactagtttgcttggagtcatttattatatatatatatatatatatatatatatatatatatatatatatatatatatatatatgtatgtgtgtgtgtgtgtgtatatatatatatatatatatatatatatatatatatatatatatatatatataaacagagatggggtttctccatgttgcccaagctggtttcaaactcctgagttcaagcaatcctctcaccccagcctcccaaagtgctgggactacaggcatgagccatcgtaccaggcctggagtcatttttaataatgccctttatactctcaaagtactctgatttggatcacaaattatataatcactctactcaaagaggagttgatggaattttgaaaatatgtcactgacatgtcaatatcaaagcaaaaaagattgaggctatctggaataactggggcaaaaagattaattttggaaaaaagtgttttaacttgtattagtccattctcacacggctgataaaaacatacccaagaccgggcaatttacaaaaaaaaaaaaaaaaaaagaggtttaatggactcttgggcatggtgaggaagcaataaagatcaacttgcgtggcaaagtctgcattttccaccatcagagccatgaggtagttcatcaagttttcccagcccagacagaggtgtggcaggggcttgtcagaagcagcagggttaccgcaaggactgatgaccacagctggctgggactgaagacatcctagaaatgatggcagcagatgaagatgctggcaaaggccggtgggatgatggcattccagccaatgccggcctggacagagctccactgaggaccacctgcctccttctaattgattctggggcacaaggagaccattcctgccacaacacccaaacttcaaggcaacctagaagagaagggggtgcctaaactaatcaagaaaagcctcatttagctgagtttactatgaactaaattaagtttatgccactaggtagaatgtgaactcaagagaaaacttaaaaacctattcatttgtagacctgagtttgtggactaagattatacttgcttcacagacaactgcaatgcagtgtgacaaggcagattggtccctaggtactatatgaggacaagtgagaggtctcctacccagtctgaggatgtcagggtgagcaaggagtcccgtctgagcagagtattggaggatgaaggctagctgcagtacaggggtgaagggaaccacaagtatactcacaatggccagagttcagggagagaaaaagggaggcagcgaagttaaatgcaatgggttgcttaagccaagccaaagactgcaagccctttcacacacggggcacaaagactcccatgggactggagaaggggaatggcatgactttgttttcattaagaaccacgattctgggtaaatgtaaagaaaggtctggagagtggccaactctggagacctgcttttgcaggctgagtttctcattctcgctcctgtcttatctttactatgaatgttgcattgatcctaatgactccaaaacctgtgctgcatgagaaaagaaggaacttcattccagatttcataaatcagcatttagctaagagcgccaggaatgggttacagtttagtaccaaaattggtggttttagtagcctgtgtcctgataatagaaaccagaatgaaccgatgtagtatttagcacatagaaatgtctcccacacacatatgtatacacacgatttaatgttactgagaaagggctttaggagaaactgagtaacgtgtacacttttatttaccaatgtttacttaaaagtgacaactgacactgctatgtgcagcccatgatctgatggtggtggggcagtgattccctgggcagcccagttctgtggggtggctttgtgaattgcctgaaagctcccttattgtttctttgattcccatcaatgattttgtaagccatttaacactttgtaataaatccctttctattctaagagtggattttgctttctatccactgaccaaaacagctcaaataagtatgttttaacaacaaaaaaatcaaatatgcaccagttaagatcaggcactctgaaggcaactgcatgggtttgaatttcagctaggtgttccactatcagctacctgaccctggacaagttacttaacctttacgtgcttcagtttcttcatccataaaatgacgatgatggtaataacaccaatttcatagggatacattaatataattaaatagtataagcaaagtgcttctaataattcctaacacatagtaattactcaatgcatgtttggtttttaatattaaaatacagtagaaccttgaacaatgtgggggatgaggtgctgacaccccatgcagtcaaaaatccacgtataattcccccaaaacctaactactaatagactactgtggactggaagccttactggtgacataaatagaccattaacacatattttatattttatttatattatatgctatattcttataataaagcaagctaaagaaaatagtaagaaaatcataaggaaaagaaaatatatttactactcattaagtagaagtggatcatcataagtgtttcatctctgtcgtcttcatactgagtaggctgagaaggaggaggaaggggagggcctggtcttgccgtctcaagggtggcagaggcagaagaaaatccatgtataagtggatccttgcagttccaacctgtgttgttcaagggtcaactatatatagctttacattgtaacaacagcaaaatgaactacaaatctgttggaaacttctcaaaaattctcaaggatgaacataattaaaccagtatgaaatccctttggctaaaaacaaaagcaaactaaagtactccaaaataattttgcacctggctgttttacacttcaagaatagctttcttggctgggcatggtgacttacgcctgtaatcctaacacttcggaaggccgaggtgggcggattcctgagctcaggagttcgagaccagcttgggcaacatggtgaaacctcatctctaccaaagtacaaaaaattagctgggcatggtggtgcgtgcctgtactcccacctactccggaagctgagacgggagaatcacttgaacctgggaggcggaggttgcagtgagccaagatcatgtcactgcactccagccaaggcaacagaacgagactccatctcaaaaaaaaaaaaaaaaaaaaaaaaaaaaagaatagcttatgaagtgtgtactttgcaactatgttcttccccaaaacgaggggaatgggtttcctttttacctatattttaaattgggctagtcacacatgaaaaataattgactaacacttggattattttgccatatttaagcccttataggttgatgaaaagtaaaaaggattgaatatcctttaataaatcacccaatactgtttattcaaaagaaaagacattctaaggaacgaaagctagtgttttttattaacgataaaatctatattgttcaggaattttccagtgtgttacagcaatttctgaaatgataaacgaacatattttattattttccttttaaatcagttacttaaaaatgaagactgtttaattattttctccttttctataagtaggattttctttatgtccaaataggacttggtaactaggataatttacccctgaagcaaaatgacttcactgaaattagcaaatcctattgatgatcttaaagtaaacttttctggaaatgagcttgctcaaatcataagtgaggattaatgtaaatgtaataaactgaatctgtaaattggtaatgttgaaaagaaaaaacaattgggtaagaacaaaactgaaaactagcagtgtagcagaaagcacactagtcttgggataaggaaatgctgagaaggctgaggggtacattcaataataacaaagagccttccagttctaagtatttgtgactaacaacaacaaaaaaatctgttgtttgctagagaattcttaactctaatgtgaagatatgttctgtgcatttcctttgaacttggccctatgatttcttttcttttcttttcttttttgagacggagttttgctcttgttgcccaggctggagtgcaatggcgcgatctcagctcaccacaacctacgtctcctggggtcaagtgattctcctgcctcagcctcctgagtagctgggattacaggcatgtaccaccacgcctggctaatttgtgtttttagtagagatggggtttctccatgttggtcaggctggtctcgaacgtgcgatctcaggtgatccacctgccaaggcctcccaaagccctgggattacgggcgtgagccaccatgcccggctggccctgtaatttcttaaagggatcagaagccctgctctgaagttaggcagtcacctctgtgacctcaacaacatctctacattttgctttctttatctgtaaacctaggtttatcagatcttcttcctggcgacgctgtgacaattaaatgaactgctgctcatgggaatggctgggtgacttcggtagctggcatgctgtcagtactcactagcaccctgtcctttccccaaaaagaaagaagcagaaagctgtatttgttcccatttatgggactaagagatcaggaacaataaggatgtgttttgcgcacttttacactcattagaggatgaccatatatcccaaggaagatgaagccagtaactgtaagacacaattacaagtttgacttttctccctctatgatatgctctgttccatgagggcaatggaggcaccagagaaggcaagaggaaacatcattagtccgtccttcagcatcaggtggtcccactgctcctgaggcaccctcagttttcagggtcactggtttcctccctcctggcaaactctagccacaagcgctcagactcgaaggtgttgaactctcttttcttccttacaagggtgccagaattcttaactgcatttgtttatcccagtaaaagtgagtccttcacaatgagaagagctaacatttattcaatcaacaaatgctgagtgtccgccatggccagatactctttgacagtcgtcacagcacacagaacatgtgattagtaaacataatggtgcaggacatcagcctgctaatgttattcccaggtgtcatcaaatgagtgacaatttgtacaatgtttcattaaatgcctatttagaggataaccatagttgatgacacagaaaaaagccaaacccagaatgcaagaatcgtagccagcagagcacgtggaaacaacgtccaagttgcaggtagcagcttgcaggataaccacagttggcgacgctttcaggcagctgggagaattctcagttgtccattttatggttaaatggttttactaaggtctaaaaaattcatttctaactcctagacttatgtttccattactatataaagaatgagccaaacaaataaataacaaaatattcactatggaccccaaaatttcaaggcatgaagagagccccaaattctctgtgaactgcaaagagaaaccattagtacaggaatagatgaagaaattgtttttgagtataatataaacataaacaaatctcttaacagcacgagtgtcaacaaatgcttttgttgttgcaaaaacagtctcaaaaagagtggtgacaaggagactgacaaggagaaatgagctattttttcatctccaaaattgcacttcctggtccacggttcttagcactgcagatgttgcagaactgtgcagcagagttctaaaaatgcaatttaaaaacacatatttaaaaaatgatcttctttttctactctcatattcagaaacactaaggtagcgttagtcagggggtggagaggaagtaataggatggcactcctttctctggagtttatttctggttaacataggatttagtctagatcagctgttactctgtgactccaaggacacccaacagcagaatacgtctaatgtgacctggaggaatatgacactaaaaaaatgatagcatcatggaacacaaatcaggctgagaaacacataagatacacaatggctctctactgttgttgctcatctctacagcatgacagctgtcaactgggcctgaatgaattccttcaaatgggtatgcttttatgtttactatagtacatagaacatttctaaatatttttacatttgaaaactagattaatttttgttatgtgatataaatccacattgtaatttttttttaacccatacagccataaggatgaagggttacagtttaaagcacattcctctaagtgtgttaatttccctctagttgataggtgccaagctgccaactcaccatgctgggcatgggcaggcactccttgtggaacatgtgccggcaatggaagaccaccacgctgaagggcttagctgcatctggcgaggagggcagagaaaggaggagaacttaatgcaacaagcaagatcattttaaaccaatcccgactgaaagtcgagttgcagtttaattttcagcaataaggtgcctttagagaatggcttatttacaaaagcattcctgaggggtggtatgatcagacacaaaacaggtattataatcatgttgctatgcgattcacaggttacttgcttagcctctgtgtcacttacccagactacattgaggacaactgtaggaaaaccagcaagtgtatgtgccaatgcgcccctaacccctataatcattatacaccacagctgaagttgagtctgtggcttcataaaaatgctttgccagtccacctgctacctttgccaagaccacacactgactcagaggcggacctgggttacaagcccaggctgtggtgaccttgcattttactgcacttgtgcttgggcagatcccctcatctgttcctgctctgtgtggccagcttatttttggtaagatttagtgtcatcagcagagtaaatttggagttaaatctaactgtagagtgggaatgtatgtggttcctttttgctgcaacactgtctgaaatgctatggaagctcacttcttcacctgagcccatgcagttttcaacagaagcacttaaacatccaaatctaattcctctagaaaagaacctaagtagaacaacttctcatggactgccccatgaaataatcctttaatcctaagtaaacatgaggtcaactaggtcttttagtactttgttatgctgaacttatatttgaaaagcatttgttagcatcctaacaatgctttgttagtttccgcttttgaattatgcaaatttcttctgtcataataaaccttaagaaggtgcttttcattacagatgaagacatatatctatctgccaagaactagaaataaacaaatgcttatgtcttttaaagactcacagttccaattagatggcagggattatgtatgtttccactgaaatgtgagatgacttgggcatgtagaaccatatatcagagaaaaacactaaagaaaagggaatgctacctataaattttttttcccagacatgtatatggttcttctaccttgaaatttaaatgctgatggttagttttcattttgtttttaccctagactagcagttctaaaagaagggcccctgaaccagtggcatcaacattacctgggaacttgttagaaatatacattctcagttcctgccctggaagtttggaaccagagactctagggagtctgactgggtcagcgatctgggttccaataagcctgccaggtgacgatgactcaccctagagcttgagaacctcagctctaagcaatggcagcaccagcattccactgagcaggatggaagccacaacacttctctccactgggttattctgaaagttatatagttttataaacggtagttggctaattccaaaattttgattccactcatcattaaaatacatgtttgggatttttttggggaaaaccttcttacctgatggaagaataggggaaaggcacgactcacagatgttctcctctgtaagaaaacacacatactttggattatgccctgtttatacctgcttggccatttctgaaagcagggcacgtggttccatatgattatttcaattttacccaccatcaacaagaacacctttcatttgagttcggtgcattttcttcagtaaggacaaagagtcagctacgagaatcttcttgcagccttcacgaagcagaatctaatgcatacattttaaaagaaaagccatcttaagtagactcaaatctgaggggtgaagggacactgtactggggattccaaaagctggcatgcttgaaatactcaaaaggggcactcactgattctcttgccctcagtaccctcttcctgccaaaccactgccaggctgacctggccagccaggatccactcattactctgtgcgtcatttcatcatttcttccaaccatacacgggctcctgtagcatttgtataatcaaacataaattccaaagtctggcaaagaaggccctatattaactaaccctattgctactttagagggcttccttatacagatcctcttgggcagactttggctcctacatcatgtgttcattccattcttcagatctttacccagaatgaaaacctgctattccaaaatcatcaatttatttcataaattaatctatttactgcacaaataagtactgggtccctatcacgtatagggtactgggtatagataataaactaaacagatacaatctctgtcttaaatccccttgaggatgcaacctatctttttctttccaaatctaatccaaaccattcagcatagtgctatgaatgtggtgtgtgtgtgtgtgtggtattaactgactataataaccttcaaatttggtgactcctgggaggggtttgaaaaatgaccatgaatacaaatattctctcataagagtccttttctttattcttcatcccagcattatagcttttgtttctttacacatttttcttattcccctgcaggctttttactatttcctcccttcctgcctggagaatgacaagagacatcacaatgctttggcagcctcagaagtcagaagcacacagtggaggatgatgcccatttctggctggtaccaatgttgtatttcagaactggaggcacgatggggtccaagatcctcccctgcttttaggtggggacacagcagggacaggcgacactttacctttcatgtccattctgtggggcacagtgtgagctcccaccctttgctgggttttcttaggtattagtaggaaactgagaggctccaggaggtgtgcataagccagatgtcatttcatttattattattatttttttttaaccagaacttgttgctgctttttcagagggagaaactcaaggcctgaaggacagagacgctctggggctgtgcctgtggcttctccctttgggccctatgtgtcttatcatacgcagttatgtgcagttacacatgtcacatcatagaagttcacattaacagacagcgctgtctcaccacagcccagctctgaggctgagaagcatgtgtctttcacgggcaagtgccactgtttagagggggcactttggctttcttcatactgaagtcactctcgacttgacaagctagatgggcattttgctttcataagttttaaattcatgccactggggaagaaaagtaagggagcagccaactgcagccctctatcctcagtggtccacgtgttcctctgaaaatcccaaagagcactggctttgggtgaatccagccgaaagcctttttcccctaattatacaaagacaaattaatattcaggaaaacaaaactaatgtctagattaaagttctatgcctgccatttctagtattgatgaacaggaaattacatgattttagtattcctacattaattgagaaactgcctatgaagttttattctttaaaattctaccaggaatcaattttttttggatttttaaaaaaatacattaaaattttaacagactgcattaaaacatacaggtagaagagaaaaataacaaatacagtaagaaagatagctaagaaatatggatgtcaggaaactttaaataaatttaaaagcaaacatataaagctgcttagcctccaagacaaaaataaaaaacttaagagtaatggtttcaaccacaacatctcagataaaacaattttaaaaaatggctctgactctcgtgggtgctccaggcccatggcatgaattatataagagaaaggcagggccagcagtctagacagaggccactgtgtctacaagctaaaaaagaaaacagcaaaatatgcaaaccaggaaggagccatatcctcagcaggattacatttttctaaacaggtacaatctgtccgcctgcagatagcattttctaggaaaattcattattcagaggcaaacagccaggagaggggaaagtacacaaatacagcttactgctatctcctacttcatttggtcaaaattcaaggctcccaatcagaaaaacaggaaaacattttaagtttcatttatatgatcccaggcaggtatttcaaaatatgagactatcctctatagaatgtaatcatttattctataacatctgtaataatgtgtaggcaattaaaggtgataagtgaaggaagacagtacaagattataatgtactacaatctacaggtattgctttcaacatcagacataggacaaggcattatgttgactatggattcctagtagcaactccatcagtgactcatgaaaaatgtgctgttgttcacattcatttcaccctcaaaaattcatacttgcaatttcccatgagtgtcttttttataaagacactgatggccaaaagtcagatgccacagcagttggcgtaagcaggtcatcctcacctctttttgaccttcacactcatgattttggatgactgctatgtttcaaggtcatcttacccagcctatcttcgcaaccacagactatcatcaccttccccatctcccttctaacttgcaaatgtgatgttctttacatacttagggcacatgcacactcttctgttactcaggtttcgatgaccagaatggcactgagcactgctgctcttgatctgagcactatctttcattattttgtgctatttttctttttaaaatatgaaatattaaaaaaaaactgaaaacaaaaaaagacccagtccctaccacctagatttaacaaatctgttgatattttcccacgtgcttcagatctcattccagaaaataaagtattacagacacagctgacactttcttgccctctaccattcctgctccttcttttcaaacacaactccaacttcatttagtgtgtgtccagctgaaatatacagctggctggggctcatgtaacatagatctggtcaacaagataaacatcaagcctgggaaagcagccctttcaaatcaaaaagcaaagcctcattaggaaaaaaccccttgcttcccgcatgtgccatatgaagtgtggatgtaaagcctagtgatacggcatctactttgtcaccaagaggcaacaaccctgaggtacactctcctgttaatgcatgctgaggttatgtccagtttagggctactaaggaaatccaaaggacattcttgtacagatctttttatggaactgattttcatctcttgagtaaatacctaggagtgaaattcctgggtcatggagtaggtgtatgtttaatttttcaagtaaatgacaaacagttttccaaagtggttatatagcattttatactcccacatattaagttggatatctaataaaaatatcttccctcttgaataataatcttactcttaatttttatgttaagagttaggaccagtttattaatttccatgaaaaattctttggatattttgattaaaattttattgaacatacagatgattattttagggagaactaataacatttatgatatggatgtacttttaacaattaaataaatggtcaagttcaatttgctattgatttatgtattatttttgcatttgtgtttttaaaaaaaagatagggctataattttctcatactgccctcacgtaatgctggtattagggttacactagcattccataaggaactgaggaacttttccattcaattatctggaaaagtaaatgtaacacagaagctgctttttatttagttttattatttttaattaattttttttgacaaggtcttgctctgccacccaggctgaagtacagtagcatgatcagaactcactgcagccttgacctcctgcacttaagtgatcctcctgcctcagcctcccatgtagctgggaccacaggcatgagccatcacgcccagctaatttatgtatttttagtacagacaggttttcaccatgttgctcaggcttatctcaaactgctgagctcaagccatccgttcacctcagcctcccaaagtgacgagattacaggcatgaaccaccgtatccagccagctattttttaaaaggataaaacttgtctctaaaactgtctatggaataagtgcctttattgtagctatacattttgactaccaatgtaatttagttaatgattataggtctattctatttgcttgagtaaacttttacaacttattattttcctagaaaattgtacagttcttctgagttttcgaagatattgatataaactcgtattctttgtttatttcaggtgttgaaaacttagtctgcaaggactttgttttttacggttatgctggttgtttccccgtgcctttttcttaaactttatggaatttgcaaatacattttgtgatgtttcctgaaggtttatagactacagaagcttataagcatgcagttttgaagattatgtcctccttcacaccaaaagtagtttttgttttccaaagtatgtctaactggcctttcaaagatcaatcatttttaacccactaaaaactttctcacctgtttcctcctgttttaccctggtttcttattctctgtgttggacagcctctgatatcactttcagaacttaaaactagtttgaaacatctctatgaaatatctctacttggtaaattaaacagcaccattattaacctttgctttgtaacctatgtctcttattagagtatcactgacaatcggatggttgtggtagctcacacttataatcccagcactttgagaggctgtgataggaggatctcttgagcccaggagttcaagcccagcctgggcaacatagtgagaccctgtctcaacaaagaattaaaataaaaaaaattagccaggcatagtggcgcatgcctgtagttccaactactccagaggttgaagtgaaaggatcacttgagcccgggaggtcaaggctacagtgagctgtgactgcaccactgccatgctccagcctgggcaacaaagtaaggccctgtctcaaaacaaaacaaaaagaatttcactgaggataaaccagtcttttctttcctcaacttcataatggtattaattttcatctcaaaaaatacttgtaggcatagcttagaaagtacaatattatctttcagagatttattttccttacaggactttcctatatttttccaagattattcaaatctaggggtcaatttcttcttacatcctactccaggattcttgttttcttgatattactttgtttccttccatagttctaagtttttctaaattacatattttatcaacgtgacctttactcttcccttttcgtcattttgaagtcaaccagctatggcttctataaacaacctgttacatattatattttgtgctactgtaaatttaaataagaatgaatttacaacacgactgttgaaaatcaacatgagaacttagatttgccttatcttccccctttctccttatttctctgcagttcatcatcattgataataatcccaaccaaaagcaaaacaccagacccacagagattttataaagcaataaaagaactgtatatcagcaaagttattatggttcattagaaacagcggccatgcgaaaaatgccatcaaaagttgccaagtttctgaaatttttattttaaaagattcttcgaacactaaacattttgctgacattgccttgttcatactgcaatgcttatcattagaactgcaaatgacagacagctacctggttttaaaagcccccaatatgacacagggtagactgagaaacttttcccctcatttctaatccttcctttaggtcacaatgctatgggacttgaattcttcttgaaaaagctttgctttcggctgggattcttataaaaatgatgaactgcagagaaatacgaagggaaagagatcctaaggtcttatgttggagttcagaaacaatcttataaacacaattgtatttaaatttctaatagcacaaagtatggatgtaccaaattaattttaaaagctacagctggttgtcacaggccacctatgtcacctaaaagctgtgataaggcaaaactgaaataatttcaaaaggaaaacaacaaatctcatttggtcttaaaagtttatttcatgaacatataaattcaaaaactctctcttagaagaaaattaggagcttatatactgagagtcaaaaagaaacccacgtaggcccaaaaaaaggttagtaagaaagaagccattatttcctcttatcccatttggattgcaaaatagagatatgggaaataaaggactatggggactgcagcaaatgcaaatttgggaaaataactttggaaggcatggagatgtctgaaatcagtttatcagtttggatgaggtatgtgtgtgtacatgtgtgtgtctctgtgtgtgtacatgtgtatatgtgtatgtgtgtgtgtctgtgtgtatggtgtgcgtagtttaacaaaatggaagtgttaaggcattttacttctcccagaaacatcaatttagatcatgagcagcatgaacaaagggctgtgtctcgctcatccccaggtctatgagaccaaatggaggccctgttagcacagaacatactgtctgacacaggaggtactcatgtatctgaataaatgtgtttataagtcatcaagtatatggcactttgaaaacaactattccatgagacattaaggcctctgacagcccctctgttaagaagacacccatcagtgttgctgacttcatctgagaagggctgtcctgctacctagccccggccagggttcaatccaaggggcagttgggaggaacagggcaggggagggaagggagtcaagggatggacaatttgtcattttttttctttaaataaatgtcatttttgaggcaaaagaaaaaaccgtgaaaaataaaccccaattatacctaaaaatctaagctgctttattagatcccaaaataaatattaaggcttacattaaaatattaagttaacattaaatatgcagctgtattcaatatgtaaagagatatttataaaacgcctctgttaagaactttagaaacaaaagatattttagagatcatctaatctcaaggttctcaaatttcaatacatagactagtgccagactaggtgtgtaagaaatatcaaggtggtttaaggacatgctccctagtccttcccaagagagtctcattcagcagatctgggctgggtgcctgaaactatgtaacgtatacaagaatccagatgatactggtgtgcagccagacttcacaaacactggcttaatctaactgggaagccaagctccagaaagctgaagtgccttaccaaagtctcaataggcttgttaatggcaaagccagaacaggagcccacgtctgcaaataccatgtccaccgctctttaaaagacaacagttgcctatttgtcttccatgccaattctgtatgtgactctggcataaactgccagtacaatgaatgcatctccagagaccaaatgggcccagcagtgagagatacacaggatatgatgtggaagaccacacaacagcactatgtagatagtccctttttatccagagataacataaatgaagtacctcaaggcacttcacagacactgctagaatagaaaggaggatgagaatcataattgtaaaactgaaagcatgagcaccaaaaagttttggcacatatttgtcttatacatggattaaaaacaaaagcattcacaaatagttaaacctaattatagggagtggcaaatctcatctacaaagcttctatctcaagaaaaagaacagtacagggtggattttccctccctcatcaggtgagttgaccttattttcaatatgcagagattccacattcgcaccacttttgaaagttggtggaaaaggaagttgggcaatgcctcccttagattggtagctggggagagaattatctatctttaaaaaactaaaataaaaacaggccaggcgcggtggctcacacctgccatgccagcactttgggaggccgaggcaggcggatcatgaggtcaggagatgaagactatcctggccaacatggataaactgtctctactaaaaatacaaaaattagctgggtatggtggcacgtgtctgtaatcccagctactcaggaggctgatgcaggagaattgtttgaactagagaggtggagtttgcagtgagctgagatcacgccactgcactccagcctggcgacagagcaagactccgtctcaaaaaaataaaaataaaaaataaaaacaaaacttcataaccctagtcttggtcatagatacagacaaaataaaacataaatcaaaagcaagagtaatggcaagcattacccatgaaaagaaaacttaaaactgccaaattgtaggaggcagagcagcaccaagtgcacaggcttggaatcctggctctactgcatgacatgggcaaatcatgcaacatcttctagcttcaactttctcatctgcaaagcaggggcgagggcctgctgggagaaccacgtggcatgattctgccaagtgtaaaaggatacaaatatgggggtcgatcaccacaataacacaagtccagaggagtttccatcacagtggaaactcctgagtgttgtgtccatcttgtaaaggctaagtttctgtagtgatctttgaaagttttgtaatcctgtgacccaaaccagtgcccaaagctgaacatcctgctccagagagaaatgtagagaaacctaactaggcaggtgttggcctaaaggcaattcagctttgtacccaatgccttagatccagttagccttaagaatgtctgcagcccctaaagcatctaagatggacgtttaatctagcccctgctcccttttatttttctggggaaaacagaggtccaaggatgtgcaatgacttcttcaggatcatctacaactttccttaagggttagactcacaccagggactcatgaggcttagcctggtgagatttccactgcaccatgacacctctttagaagcaagttaaacatgcttgctattttcttttcccaagaggtgttacccataatgaaaaaaactaagaccccactctaattagcagattttttagagattacttgtggctgtaaaaggtaatgtagtcactgatttaaaaaaggcatgagatttagtcagaggatctgtgatctgtgttcaaacccagttcatcaccttcccagactggcaaatcacttaacttttctgagagacaaccttctcatctgtaaaacaaagatgatatttcctacagaagtgttgtgaagattaaatgtttgtcaaataaaaccgtcaaaagaagtctttaagaacaaagatgctgaaattctcaagggaaaaaagcctccaactacaaaaatggacataaacgctcaacaactacatgctaaatttataatgttttaaaaatagaaaatgtaaaaacattagaaatttgtagcataaactggaaactggtcagtttacataaaaactgaagtataattgataccatattgttttggaagttatatcaaaataagtgctatttgtccttgaaatcaggcctaggaacatttaaagcttatgaagtgcaatacatgccacttgcatcttactgacttcatgaagcttttaaaatttgtgcagtgattacactaacaaggtagccgggtataaaaacatagaaagttaaagaaattaaacactgctgatgtagttgattatactacttccttaaactatgtcatgtcataggcatctaacaaacctaatgatgctaaccttcggttgaagagagctgttacattttagaaaacgtgaaactaaaagcagaagagttactcatttcaagtttttcccacaacattctctaacccgcttttccaattaacaactggctaatgaatgatctcccaaagcagtgcccaagttttaaatgctgtatactctattgtcaatctccctttagagattcccaatgcataccagcaagaaaaggtgctgagaagccctgtgagaacatttccccaacatctgaccatagatccctacattactgaatggttcttgatagcccctggggttactgtcccacccagccccatcacacacacagtcacttccagattcctggaaattgatgaacatgcaaaatttctcccaaattttcagattgaatagggttgctaattttttactttgctaggtgagagtatgtgaaaaacaacatagttttataaaatacaaaataaaaaaagaataaaataaaaacatgcaagtgaaatccttctggaaattgcaaaatgctctctggatagatttatttttacagtgaaccctaataggttgcctagagaaaggaaacacattaagcggtcattaatacattatgtaaaaagagcagaaaaatattttaaactctttatctgtgagggaaaaataatgcctggaattc

SEQ ID NO: 89 - DNA, 165627 bp, Homo sapiens
gaattcttggggcttacccgatggtcttagtacaagcgtagccatacactgggtacatgttgttccatcatccagcctaaatgacccaaagttctcatattaatttgcactgataacagaagtaagcaatatgttttccttatatacattttttttagtgtttcattcctttgaaaaataattacaaatcacagatgggataggagtgagagcaagatctttgcatctcacttcctgggctttgataaatatgctatattaccagcaatgttaatctttaaattgttcataaagacccatgtttcttgctaaatatattgaattctccatttataaatatttttacgtgtgactttttcaaaatatctgcagtatcagtttgagttggactatagttctacacgtggagccaaactcctatggaagatgggcggcctcttccacagggcactgtgatcaacaccaggaaggtccaggtcccaagggcctgtctcatgcctggattaccactgacttcatggtcagtggtctagtccctcctaaaatattttccgcagtagcagcccgaatgatctctgcagaatataggggttggtaaacaggtctataccggttaagtgtattaaaaaatatattcaccgtaacttttcctattcccaacctcctctcccctctcaatctatatagtttggataggactgactcccatttagtggcttcaagtgtccacatgcaaaccaagctgggccaatcacagttaatagagaaaattttctgggaccattggaaaaggggctctttttcttgtgaactgtgcctcagatggactgtaaatgcagttttaggaaaaatcttagctcaagtctcttaaggccaatatgtcttttccattcaggaacctcactatttgttactggaaaaaaatgagatttccattatttttgtggccacaaagaaaaattataatcataaaatttcagctgtggctactgccagtgaccaggctgctgaggttattaaagccatttttctatcttaaatgaatataagaaattgtaggcagtttgggaagaaaactacaatctaatatgtttccagggatcttgaaggagcatcctaactatgtattaaggatgcacagccttgaatacagggtcatctaaaggttatgtggcagggaacaaagatatttcagacaggactgaggttgctactgaggtgcaaggaggaacgtaagctaaaaaagcaagcaacaatttagtttctctgttggtcttccatattgggcatcaaacaaaatggtaccccttgggaaactgccaatttcatgaacactttttggatgaccatgaggccgaatcattcttcactgtctggctctgcttctggatttggttagcaaaatgataagattagaacgggccagcccttacttagcaaagttgtgtcatctccctttgggagcatttcaatcaagagatacatattgataacccactgtgtgcaaagtactttgttttcctgctgcttctttctccctctttccctgcctgctccctcttcctcctcctccacctccttcttttttaatatccttatagcataggaaggatcatgccagactctttggaccacctcagagccacaatggtgacagcactattcttggcacttgaacagagaagaaagggagactgaatgcaaattgattccaaattaggcttctgtagtgactaaatatacttctctgtcttaggtactagatttgggtctgagttgcctggggctgatgcagttaactccactgttatcctgctagtcagttgtcctagtctgttttgtgcttctgtaacagaatatctgaagctgggtaacttattttaaaaggaggtttatttggctcacaattctggtggctgggaagttcaagataggggcagctgcagctggtgagggcctcaggctgcttcaactcatggcagaaagtggaaggggagctggcatgtgcaaagtaatcacatggggagagaggaagcaaaagagagaaactgagggagccagactcttgttaacaatccattctcaagggaactaatcacttacccatgtcggggggcatttatctattcatgagggatctgctcccatcacccaaacacctcacactaggccccaactcccaacattaccacctgggggatcaaatttcaacatgagtttgggtggggacaaaccatatccaaaccaatccacaacatcagtgaacagatacttgagtgtcttttacatatatccatccccagacatttaacagaggcactggggatagacaaataatggcactccttactctttaggaaataatagtctaatgggaacaaaatgaatcattaaattattccaagggctcaaatatctttggataactccaggttgctatggaggcacttaacagggaaggtagccttatctggaaaggcaaagaaggcaattctggggaagcaatgtttaaactgaaggatgtgtaggaattagccagaaggcatctaggggagtgccctcctttcttacttgccatcactttctcccctaatattaagttaataccctgtccctatttattgacgagtatggccctgactctagctgacactattcacaatggagaagcaatatgtgagaatgcagctcaaagtcccggcttaaatactgacaaactgcccatccttgtggtaaaactcctctgggcaaccagtggttctccgaggctcctcagtttgtttatctggattgtgcatggatggcaggttgtgggtgacaactcaactccagtaagtcaatcttgcttcctcaggctgcacaaggatctcctttgcagatcaagccctggcatcaccagagttcaggaggcccaggcacaactccatccttcttgcaattccactttgaccaaatttagtttgagttgtgtttctgtcgcttgcaaccaagagtcctaatgcaatcatgttactgaaagtttgtatatccaatatatatatattttgtatagtatatgttttgaatctaaattttaggctacgttttttaattgaaataaaaataaatcttaaagaagctacctacgtaaaaatgaacttccaatcatggtaatataatttacaaatattttattaaagctcttaagagcagcttttctaaatttttggaattagaaatgtatgttcttgagccttttcacattgtttataagtaggcaattctcagttatacattttggtgcagcctggcatcaaagtataggagagaaagcgtggaaagtcctacctggagaaatgataaagacacatggcatttttggatagagatccaatgtgtgagtgggctcaggtgggcccccttgtgtttatcagaagttcaggcagtagcccttaggacggaagtggaattctgttcctattgctgagacagagcccaacagcagaataaggaattatgttgtattagtttgctaggactgccctaagagaagaccacagactgggtcgtttaaacaaccgaaatgtatattcttagagttctggaggccagaagtccaagatccaggtttgggcaggtttggcttcttctgagggctgtctccttggcttgtagagggccatcttcttgctgtgttctcacatggtctttcctttgtgcatgggcatgtctgtgtccaaatttccttttctttttttttattttattttatggagacggagtctcgctctgtctcccaggctggagtgcagtggcccgatcttggctcactgcaacctccgcctcctgggttcaagcaattctcctaccttagcctcccgagtagctgggactacaggtgcacgctgccacgcctggctaattttttgtatttttagtagagacgggttttcaccatgttgcccaggctggtctggaactcctgagctcaggcaatccacccacctcggcctcccaaggtactaggattacaagcatgagccaccacgcccggccaaatttccttttcttataagggcactaatcatgttggattagggcccactcatatgacctcattttaccatacttacctctttacaggtcctatctctaaatagtcatcttctaaggtaatggagttaggactgcaacatatgaatttggggagggcataattcagcccataacacttgtggtaacatactcttattaattttccttttaggaaagaactagcttgtgagaactagtaatattatcgttgaagaatgcattatcaagcaaaatagagaagaaagctgcaaaatagatgggagacacaagtggatcctgccttgcggggaggatagaagaaaggaccctgtagtgacactgaattaataagctagccaaagatgtgggtattcagacacacaacagatgggcataggatctgcgtataaaaataacagagtgtgagagtaactgataaacctgctgtttctagggggatttagatatgcttacagtggaaagaggccttagagaacaacttggcagctcagagttctgtctgcagcaacctgacacatggtcaccagccttggctcagagcagagctccagggggcacacccatctgtagatggacatctccaaatgttagaaagtttttttttttttttgagatggacttttgctttgtcacccaggctggagtgcagtggcgcaatctcgactcactgcaacctctgcctcccgggttcaagtgattctcctgcctcagcctcctgagtaggtgggattacaggcacatgccaccatgcccagctaattttttgtatttttagtagagacggagtttcaccatgttggccaggctggtttcgaactcctgacctcaggtgatctgcccacctcagcctcccaaagcactgggattaccggcgtgagcctctgcacctggctgattttaggaagttgttttatgttaaacctttgatgctacaactttcattgattaacctcagcaactggacttctgaaactatgtgaaaaaatgctatcttcactttcccctttgcatgcgacaaacttctaacccttgcacatttaatgtcctcagttttcatgtttttgaaatcatgtactatccaattcctccactagtttcttaaattttaagatttcaaatttgatcactctcctaacgactcctgtctgctttgtcaaaatccttgttttaaaaaaatgccctaagcaaagtgttctcagatgcagaatggagaatgctactttctgtgaataggacgaatagcccattaaaatgctgcattcaattttcatttttaggagtcactgatggtccatatttgtagtcaagtaacagaaaccaggctgattattaatggattgctgtattagttacctactgctgcataacaaattgtgccccccaactcccaaatttagcaacttcaaacatttatctcacacagttcagaagatgatcagaaatccaggaatggcgtaggtaggtggttctagctcacagcctatcatgaggatatagtcaaggttttggctgggattcctgactctgaggatttgacagtaacaggaggatcacttccaggttcactcatatggctcttggcagggtgcttccattgttcaccaaatgggtctcttcattcacaacatggcttctttcagacggcatgatatcaagctgctgtctcattacctaatcttggaagggatgttctgtccattctgccatattcttttggtcacacaaaccaaccctggtagaggtggggatcaggggaccatcttggatgctgacatttgtgaagcatttgctacgtgctagttactcttcctgtgctagcactagctaagcattttgcatgcatcgtctcacctaatgctgttgacatcctcccaagtagatgttattatcatcaccccatttacatgaggcaagcaaagcttagaaatgttaagtaaattgttgcttagtaagtgatagagcagagattaaaacttagatctaacttcagaggaaaatgctccagttttcttacccaaggcctcttttcatttggactactaaccgagtctctcctgactcatccttgtatgaataattttttgagtataattgcagaattttgcatttcatctctattaattgtgccataattattaaaaaattacacagtaattttcattcttgagtctgtcatttgtgagttcctttcacccttacttgtctcatctacaaagtctcttattttcacacagaacacgatgtaaatggatcataaaccaggaggcatagatgtgtctataaaaccaaacacactaagattagaataaaatcctagtgacaaaatgtatgcagtttctaaactgaaatgatttgccctctttagccagattttgtcaacagagatagaaatgtgtaatttgatgtagctgagttcacccagtcttttgaatccatctaaaacgggctcaatgcctttctccactggtctttgggaagactagtctcttgacatttctgcaaattttagggtttttacattcttcttgtctcttgtgggcctaaattcctgtttccattcgactccagatcctgcctcctgctgttcacttctttctactcctcagggtcccagatgtgggacacagctaatcagttttccctaaaaactactcagagatgacatcgtctttataccaaactttactgaacatttgaggaagatggaagggtttagcagcaatgcaacataaaatggaatattagcctttcctttcttaaaatgccctttgattgctcaggttgcttgattgactctttccctaaaaccctcacctctcaattctcctcactttagaaagcttcactcttaatcctctatggaactctaggctaattcctgcctatctaaagattcaataatttgctctgcttaggagcaaggaatttgaggaggctttgaagttttagtgtttcctcttcctcttcagcctccattctgttgagccaccagtctttataagtggaagtgtgtagtataaatatttcttttttcctctgatatgacttacataatttccctgagaaggcagaaccagtttggctttaagtaacattattttcctcattctgttacatgcagtattgcatcaatagaactacgcagtggagactggatgagatacttcttaggttgccaggaacagtcatggtttcactagtttgcttggagtcatttattatatatatatatatatatatatatatatatatatatatatatatatatatatatatatgtatgtgtgtgtgtgtgtgtatatatatatatatatatatatatatatatatatatatatatatatatatataaacagagatggggtttctccatgttgcccaagctggtttcaaactcctgagttcaagcaatcctctcaccccagcctcccaaagtgctgggactacaggcatgagccatcgtaccaggcctggagtcatttttaataatgccctttatactctcaaagtactctgatttggatcacaaattatataatcactctactcaaagaggagttgatggaattttgaaaatatgtcactgacatgtcaatatcaaagcaaaaaagattgaggctatctggaataactggggcaaaaagattaattttggaaaaaagtgttttaacttgtattagtccattctcacacggctgataaaaacatacccaagaccgggcaatttacaaaaaaaaaaaaaaaaaaagaggtttaatggactcttgggcatggtgaggaagcaataaagatcaacttgcgtggcaaagtctgcattttccaccatcagagccatgaggtagttcatcaagttttcccagcccagacagaggtgtggcaggggcttgtcagaagcagcagggttaccgcaaggactgatgaccacagctggctgggactgaagacatcctagaaatgatggcagcagatgaagatgctggcaaaggccggtgggatgatggcattccagccaatgccggcctggacagagctccactgaggaccacctgcctccttctaattgattctggggcacaaggagaccattcctgccacaacacccaaacttcaaggcaacctagaagagaagggggtgcctaaactaatcaagaaaagcctcatttagctgagtttactatgaactaaattaagtttatgccactaggtagaatgtgaactcaagagaaaacttaaaaacctattcatttgtagacctgagtttgtggactaagattatacttgcttcacagacaactgcaatgcagtgtgacaaggcagattggtccctaggtactatatgaggacaagtgagaggtctcctacccagtctgaggatgtcagggtgagcaaggagtcccgtctgagcagagtattggaggatgaaggctagctgcagtacaggggtgaagggaaccacaagtatactcacaatggccagagttcagggagagaaaaagggaggcagcgaagttaaatgcaatgggttgcttaagccaagccaaagactgcaagccctttcacacacggggcacaaagactcccatgggactggagaaggggaatggcatgactttgttttcattaagaaccacgattctgggtaaatgtaaagaaaggtctggagagtggccaactctggagacctgcttttgcaggctgagtttctcattctcgctcctgtcttatctttactatgaatgttgcattgatcctaatgactccaaaacctgtgctgcatgagaaaagaaggaacttcattccagatttcataaatcagcatttagctaagagcgccaggaatgggttacagtttagtaccaaaattggtggttttagtagcctgtgtcctgataatagaaaccagaatgaaccgatgtagtatttagcacatagaaatgtctcccacacacatatgtatacacacgatttaatgttactgagaaagggctttaggagaaactgagtaacgtgtacacttttatttaccaatgtttacttaaaagtgacaactgacactgctatgtgcagcccatgatctgatggtggtggggcagtgattccctgggcagcccagttctgtggggtggctttgtgaattgcctgaaagctcccttattgtttctttgattcccatcaatgattttgtaagccatttaacactttgtaataaatccctttctattctaagagtggattttgctttctatccactgaccaaaacagctcaaataagtatgttttaacaacaaaaaaatcaaatatgcaccagttaagatcaggcactctgaaggcaactgcatgggtttgaatttcagctaggtgttccactatcagctacctgaccctggacaagttacttaacctttacgtgcttcagtttcttcatccataaaatgacgatgatggtaataacaccaatttcatagggatacattaatataattaaatagtataagcaaagtgcttctaataattcctaacacatagtaattactcaatgcatgtttggtttttaatattaaaatacagtagaaccttgaacaatgtgggggatgaggtgctgacaccccatgcagtcaaaaatccacgtataattcccccaaaacctaactactaatagactactgtggactggaagccttactggtgacataaatagaccattaacacatattttatattttatttatattatatgctatattcttataataaagcaagctaaagaaaatagtaagaaaatcataaggaaaagaaaatatatttactactcattaagtagaagtggatcatcataagtgtttcatctctgtcgtcttcatactgagtaggctgagaaggaggaggaaggggagggcctggtcttgccgtctcaagggtggcagaggcagaagaaaatccatgtataagtggatccttgcagttccaacctgtgttgttcaagggtcaactatatatagctttacattgtaacaacagcaaaatgaactacaaatctgttggaaacttctcaaaaattctcaaggatgaacataattaaaccagtatgaaatccctttggctaaaaacaaaagcaaactaaagtactccaaaataattttgcacctggctgttttacacttcaagaatagctttcttggctgggcatggtgacttacgcctgtaatcctaacacttcggaaggccgaggtgggcggattcctgagctcaggagttcgagaccagcttgggcaacatggtgaaacctcatctctaccaaagtacaaaaaattagctgggcatggtggtgcgtgcctgtactcccacctactccggaagctgagacgggagaatcacttgaacctgggaggcggaggttgcagtgagccaagatcatgtcactgcactccagccaaggcaacagaacgagactccatctcaaaaaaaaaaaaaaaaaaaaaaaaaaaaagaatagcttatgaagtgtgtactttgcaactatgttcttccccaaaacgaggggaatgggtttcctttttacctatattttaaattgggctagtcacacatgaaaaataattgactaacacttggattattttgccatatttaagcccttataggttgatgaaaagtaaaaaggattgaatatcctttaataaatcacccaatactgtttattcaaaagaaaagacattctaaggaacgaaagctagtgttttttattaacgataaaatctatattgttcaggaattttccagtgtgttacagcaatttctgaaatgataaacgaacatattttattattttccttttaaatcagttacttaaaaatgaagactgtttaattattttctccttttctataagtaggattttctttatgtccaaataggacttggtaactaggataatttacccctgaagcaaaatgacttcactgaaattagcaaatcctattgatgatcttaaagtaaacttttctggaaatgagcttgctcaaatcataagtgaggattaatgtaaatgtaataaactgaatctgtaaattggtaatgttgaaaagaaaaaacaattgggtaagaacaaaactgaaaactagcagtgtagcagaaagcacactagtcttgggataaggaaatgctgagaaggctgaggggtacattcaataataacaaagagccttccagttctaagtatttgtgactaacaacaacaaaaaaatctgttgtttgctagagaattcttaactctaatgtgaagatatgttctgtgcatttcctttgaacttggccctatgatttcttttcttttcttttcttttttgagacggagttttgctcttgttgcccaggctggagtgcaatggcgcgatctcagctcaccacaacctacgtctcctggggtcaagtgattctcctgcctcagcctcctgagtagctgggattacaggcatgtaccaccacgcctggctaatttgtgtttttagtagagatggggtttctccatgttggtcaggctggtctcgaacgtgcgatctcaggtgatccacctgccaaggcctcccaaagccctgggattacgggcgtgagccaccatgcccggctggccctgtaatttcttaaagggatcagaagccctgctctgaagttaggcagtcacctctgtgacctcaacaacatctctacattttgctttctttatctgtaaacctaggtttatcagatcttcttcctggcgacgctgtgacaattaaatgaactgctgctcatgggaatggctgggtgacttcggtagctggcatgctgtcagtactcactagcaccctgtcctttccccaaaaagaaagaagcagaaagctgtatttgttcccatttatgggactaagagatcaggaacaataaggatgtgttttgcgcacttttacactcattagaggatgaccatatatcccaaggaagatgaagccagtaactgtaagacacaattacaagtttgacttttctccctctatgatatgctctgttccatgagggcaatggaggcaccagagaaggcaagaggaaacatcattagtccgtccttcagcatcaggtggtcccactgctcctgaggcaccctcagttttcagggtcactggtttcctccctcctggcaaactctagccacaagcgctcagactcgaaggtgttgaactctcttttcttccttacaagggtgccagaattcttaactgcatttgtttatcccagtaaaagtgagtccttcacaatgagaagagctaacatttattcaatcaacaaatgctgagtgtccgccatggccagatactctttgacagtcgtcacagcacacagaacatgtgattagtaaacataatggtgcaggacatcagcctgctaatgttattcccaggtgtcatcaaatgagtgacaatttgtacaatgtttcattaaatgcctatttagaggataaccatagttgatgacacagaaaaaagccaaacccagaatgcaagaatcgtagccagcagagcacgtggaaacaacgtccaagttgcaggtagcagcttgcaggataaccacagttggcgacgctttcaggcagctgggagaattctcagttgtccattttatggttaaatggttttactaaggtctaaaaaattcatttctaactcctagacttatgtttccattactatataaagaatgagccaaacaaataaataacaaaatattcactatggaccccaaaatttcaaggcatgaagagagccccaaattctctgtgaactgcaaagagaaaccattagtacaggaatagatgaagaaattgtttttgagtataatataaacataaacaaatctcttaacagcacgagtgtcaacaaatgcttttgttgttgcaaaaacagtctcaaaaagagtggtgacaaggagactgacaaggagaaatgagctattttttcatctccaaaattgcacttcctggtccacggttcttagcactgcagatgttgcagaactgtgcagcagagttctaaaaatgcaatttaaaaacacatatttaaaaaatgatcttctttttctactctcatattcagaaacactaaggtagcgttagtcagggggtggagaggaagtaataggatggcactcctttctctggagtttatttctggttaacataggatttagtctagatcagctgttactctgtgactccaaggacacccaacagcagaatacgtctaatgtgacctggaggaatatgacactaaaaaaatgatagcatcatggaacacaaatcaggctgagaaacacataagatacacaatggctctctactgttgttgctcatctctacagcatgacagctgtcaactgggcctgaatgaattccttcaaatgggtatgcttttatgtttactatagtacatagaacatttctaaatatttttacatttgaaaactagattaatttttgttatgtgatataaatccacattgtaatttttttttaacccatacagccataaggatgaagggttacagtttaaagcacattcctctaagtgtgttaatttccctctagttgataggtgccaagctgccaactcaccatgctgggcatgggcaggcactccttgtggaacatgtgccggcaatggaagaccaccacgctgaagggcttagctgcatctggcgaggagggcagagaaaggaggagaacttaatgcaacaagcaagatcattttaaaccaatcccgactgaaagtcgagttgcagtttaattttcagcaataaggtgcctttagagaatggcttatttacaaaagcattcctgaggggtggtatgatcagacacaaaacaggtattataatcatgttgctatgcgattcacaggttacttgcttagcctctgtgtcacttacccagactacattgaggacaactgtaggaaaaccagcaagtgtatgtgccaatgcgcccctaacccctataatcattatacaccacagctgaagttgagtctgtggcttcataaaaatgctttgccagtccacctgctacctttgccaagaccacacactgactcagaggcggacctgggttacaagcccaggctgtggtgaccttgcattttactgcacttgtgcttgggcagatcccctcatctgttcctgctctgtgtggccagcttatttttggtaagatttagtgtcatcagcagagtaaatttggagttaaatctaactgtagagtgggaatgtatgtggttcctttttgctgcaacactgtctgaaatgctatggaagctcacttcttcacctgagcccatgcagttttcaacagaagcacttaaacatccaaatctaattcctctagaaaagaacctaagtagaacaacttctcatggactgccccatgaaataatcctttaatcctaagtaaacatgaggtcaactaggtcttttagtactttgttatgctgaacttatatttgaaaagcatttgttagcatcctaacaatgctttgttagtttccgcttttgaattatgcaaatttcttctgtcataataaaccttaagaaggtgcttttcattacagatgaagacatatatctatctgccaagaactagaaataaacaaatgcttatgtcttttaaagactcacagttccaattagatggcagggattatgtatgtttccactgaaatgtgagatgacttgggcatgtagaaccatatatcagagaaaaacactaaagaaaagggaatgctacctataaattttttttcccagacatgtatatggttcttctaccttgaaatttaaatgctgatggttagttttcattttgtttttaccctagactagcagttctaaaagaagggcccctgaaccagtggcatcaacattacctgggaacttgttagaaatatacattctcagttcctgccctggaagtttggaaccagagactctagggagtctgactgggtcagcgatctgggttccaataagcctgccaggtgacgatgactcaccctagagcttgagaacctcagctctaagcaatggcagcaccagcattccactgagcaggatggaagccacaacacttctctccactgggttattctgaaagttatatagttttataaacggtagttggctaattccaaaattttgattccactcatcattaaaatacatgtttgggatttttttggggaaaaccttcttacctgatggaagaataggggaaaggcacgactcacagatgttctcctctgtaagaaaacacacatactttggattatgccctgtttatacctgcttggccatttctgaaagcagggcacgtggttccatatgattatttcaattttacccaccatcaacaagaacacctttcatttgagttcggtgcattttcttcagtaaggacaaagagtcagctacgagaatcttcttgcagccttcacgaagcagaatctaatgcatacattttaaaagaaaagccatcttaagtagactcaaatctgaggggtgaagggacactgtactggggattccaaaagctggcatgcttgaaatactcaaaaggggcactcactgattctcttgccctcagtaccctcttcctgccaaaccactgccaggctgacctggccagccaggatccactcattactctgtgcgtcatttcatcatttcttccaaccatacacgggctcctgtagcatttgtataatcaaacataaattccaaagtctggcaaagaaggccctatattaactaaccctattgctactttagagggcttccttatacagatcctcttgggcagactttggctcctacatcatgtgttcattccattcttcagatctttacccagaatgaaaacctgctattccaaaatcatcaatttatttcataaattaatctatttactgcacaaataagtactgggtccctatcacgtatagggtactgggtatagataataaactaaacagatacaatctctgtcttaaatccccttgaggatgcaacctatctttttctttccaaatctaatccaaaccattcagcatagtgctatgaatgtggtgtgtgtgtgtgtgtggtattaactgactataataaccttcaaatttggtgactcctgggaggggtttgaaaaatgaccatgaatacaaatattctctcataagagtccttttctttattcttcatcccagcattatagcttttgtttctttacacatttttcttattcccctgcaggctttttactatttcctcccttcctgcctggagaatgacaagagacatcacaatgctttggcagcctcagaagtcagaagcacacagtggaggatgatgcccatttctggctggtaccaatgttgtatttcagaactggaggcacgatggggtccaagatcctcccctgcttttaggtggggacacagcagggacaggcgacactttacctttcatgtccattctgtggggcacagtgtgagctcccaccctttgctgggttttcttaggtattagtaggaaactgagaggctccaggaggtgtgcataagccagatgtcatttcatttattattattatttttttttaaccagaacttgttgctgctttttcagagggagaaactcaaggcctgaaggacagagacgctctggggctgtgcctgtggcttctccctttgggccctatgtgtcttatcatacgcagttatgtgcagttacacatgtcacatcatagaagttcacattaacagacagcgctgtctcaccacagcccagctctgaggctgagaagcatgtgtctttcacgggcaagtgccactgtttagagggggcactttggctttcttcatactgaagtcactctcgacttgacaagctagatgggcattttgctttcataagttttaaattcatgccactggggaagaaaagtaagggagcagccaactgcagccctctatcctcagtggtccacgtgttcctctgaaaatcccaaagagcactggctttgggtgaatccagccgaaagcctttttcccctaattatacaaagacaaattaatattcaggaaaacaaaactaatgtctagattaaagttctatgcctgccatttctagtattgatgaacaggaaattacatgattttagtattcctacattaattgagaaactgcctatgaagttttattctttaaaattctaccaggaatcaattttttttggatttttaaaaaaatacattaaaattttaacagactgcattaaaacatacaggtagaagagaaaaataacaaatacagtaagaaagatagctaagaaatatggatgtcaggaaactttaaataaatttaaaagcaaacatataaagctgcttagcctccaagacaaaaataaaaaacttaagagtaatggtttcaaccacaacatctcagataaaacaattttaaaaaatggctctgactctcgtgggtgctccaggcccatggcatgaattatataagagaaaggcagggccagcagtctagacagaggccactgtgtctacaagctaaaaaagaaaacagcaaaatatgcaaaccaggaaggagccatatcctcagcaggattacatttttctaaacaggtacaatctgtccgcctgcagatagcattttctaggaaaattcattattcagaggcaaacagccaggagaggggaaagtacacaaatacagcttactgctatctcctacttcatttggtcaaaattcaaggctcccaatcagaaaaacaggaaaacattttaagtttcatttatatgatcccaggcaggtatttcaaaatatgagactatcctctatagaatgtaatcatttattctataacatctgtaataatgtgtaggcaattaaaggtgataagtgaaggaagacagtacaagattataatgtactacaatctacaggtattgctttcaacatcagacataggacaaggcattatgttgactatggattcctagtagcaactccatcagtgactcatgaaaaatgtgctgttgttcacattcatttcaccctcaaaaattcatacttgcaatttcccatgagtgtcttttttataaagacactgatggccaaaagtcagatgccacagcagttggcgtaagcaggtcatcctcacctctttttgaccttcacactcatgattttggatgactgctatgtttcaaggtcatcttacccagcctatcttcgcaaccacagactatcatcaccttccccatctcccttctaacttgcaaatgtgatgttctttacatacttagggcacatgcacactcttctgttactcaggtttcgatgaccagaatggcactgagcactgctgctcttgatctgagcactatctttcattattttgtgctatttttctttttaaaatatgaaatattaaaaaaaaactgaaaacaaaaaaagacccagtccctaccacctagatttaacaaatctgttgatattttcccacgtgcttcagatctcattccagaaaataaagtattacagacacagctgacactttcttgccctctaccattcctgctccttcttttcaaacacaactccaacttcatttagtgtgtgtccagctgaaatatacagctggctggggctcatgtaacatagatctggtcaacaagataaacatcaagcctgggaaagcagccctttcaaatcaaaaagcaaagcctcattaggaaaaaaccccttgcttcccgcatgtgccatatgaagtgtggatgtaaagcctagtgatacggcatctactttgtcaccaagaggcaacaaccctgaggtacactctcctgttaatgcatgctgaggttatgtccagtttagggctactaaggaaatccaaaggacattcttgtacagatctttttatggaactgattttcatctcttgagtaaatacctaggagtgaaattcctgggtcatggagtaggtgtatgtttaatttttcaagtaaatgacaaacagttttccaaagtggttatatagcattttatactcccacatattaagttggatatctaataaaaatatcttccctcttgaataataatcttactcttaatttttatgttaagagttaggaccagtttattaatttccatgaaaaattctttggatattttgattaaaattttattgaacatacagatgattattttagggagaactaataacatttatgatatggatgtacttttaacaattaaataaatggtcaagttcaatttgctattgatttatgtattatttttgcatttgtgtttttaaaaaaaagatagggctataattttctcatactgccctcacgtaatgctggtattagggttacactagcattccataaggaactgaggaacttttccattcaattatctggaaaagtaaatgtaacacagaagctgctttttatttagttttattatttttaattaattttttttgacaaggtcttgctctgccacccaggctgaagtacagtagcatgatcagaactcactgcagccttgacctcctgcacttaagtgatcctcctgcctcagcctcccatgtagctgggaccacaggcatgagccatcacgcccagctaatttatgtatttttagtacagacaggttttcaccatgttgctcaggcttatctcaaactgctgagctcaagccatccgttcacctcagcctcccaaagtgacgagattacaggcatgaaccaccgtatccagccagctattttttaaaaggataaaacttgtctctaaaactgtctatggaataagtgcctttattgtagctatacattttgactaccaatgtaatttagttaatgattataggtctattctatttgcttgagtaaacttttacaacttattattttcctagaaaattgtacagttcttctgagttttcgaagatattgatataaactcgtattctttgtttatttcaggtgttgaaaacttagtctgcaaggactttgttttttacggttatgctggttgtttccccgtgcctttttcttaaactttatggaatttgcaaatacattttgtgatgtttcctgaaggtttatagactacagaagcttataagcatgcagttttgaagattatgtcctccttcacaccaaaagtagtttttgttttccaaagtatgtctaactggcctttcaaagatcaatcatttttaacccactaaaaactttctcacctgtttcctcctgttttaccctggtttcttattctctgtgttggacagcctctgatatcactttcagaacttaaaactagtttgaaacatctctatgaaatatctctacttggtaaattaaacagcaccattattaacctttgctttgtaacctatgtctcttattagagtatcactgacaatcggatggttgtggtagctcacacttataatcccagcactttgagaggctgtgataggaggatctcttgagcccaggagttcaagcccagcctgggcaacatagtgagaccctgtctcaacaaagaattaaaataaaaaaaattagccaggcatagtggcgcatgcctgtagttccaactactccagaggttgaagtgaaaggatcacttgagcccgggaggtcaaggctacagtgagctgtgactgcaccactgccatgctccagcctgggcaacaaagtaaggccctgtctcaaaacaaaacaaaaagaatttcactgaggataaaccagtcttttctttcctcaacttcataatggtattaattttcatctcaaaaaatacttgtaggcatagcttagaaagtacaatattatctttcagagatttattttccttacaggactttcctatatttttccaagattattcaaatctaggggtcaatttcttcttacatcctactccaggattcttgttttcttgatattactttgtttccttccatagttctaagtttttctaaattacatattttatcaacgtgacctttactcttcccttttcgtcattttgaagtcaaccagctatggcttctataaacaacctgttacatattatattttgtgctactgtaaatttaaataagaatgaatttacaacacgactgttgaaaatcaacatgagaacttagatttgccttatcttccccctttctccttatttctctgcagttcatcatcattgataataatcccaaccaaaagcaaaacaccagacccacagagattttataaagcaataaaagaactgtatatcagcaaagttattatggttcattagaaacagcggccatgcgaaaaatgccatcaaaagttgccaagtttctgaaatttttattttaaaagattcttcgaacactaaacattttgctgacattgccttgttcatactgcaatgcttatcattagaactgcaaatgacagacagctacctggttttaaaagcccccaatatgacacagggtagactgagaaacttttcccctcatttctaatccttcctttaggtcacaatgctatgggacttgaattcttcttgaaaaagctttgctttcggctgggattcttataaaaatgatgaactgcagagaaatacgaagggaaagagatcctaaggtcttatgttggagttcagaaacaatcttataaacacaattgtatttaaatttctaatagcacaaagtatggatgtaccaaattaattttaaaagctacagctggttgtcacaggccacctatgtcacctaaaagctgtgataaggcaaaactgaaataatttcaaaaggaaaacaacaaatctcatttggtcttaaaagtttatttcatgaacatataaattcaaaaactctctcttagaagaaaattaggagcttatatactgagagtcaaaaagaaacccacgtaggcccaaaaaaaggttagtaagaaagaagccattatttcctcttatcccatttggattgcaaaatagagatatgggaaataaaggactatggggactgcagcaaatgcaaatttgggaaaataactttggaaggcatggagatgtctgaaatcagtttatcagtttggatgaggtatgtgtgtgtacatgtgtgtgtctctgtgtgtgtacatgtgtatatgtgtatgtgtgtgtgtctgtgtgtatggtgtgcgtagtttaacaaaatggaagtgttaaggcattttacttctcccagaaacatcaatttagatcatgagcagcatgaacaaagggctgtgtctcgctcatccccaggtctatgagaccaaatggaggccctgttagcacagaacatactgtctgacacaggaggtactcatgtatctgaataaatgtgtttataagtcatcaagtatatggcactttgaaaacaactattccatgagacattaaggcctctgacagcccctctgttaagaagacacccatcagtgttgctgacttcatctgagaagggctgtcctgctacctagccccggccagggttcaatccaaggggcagttgggaggaacagggcaggggagggaagggagtcaagggatggacaatttgtcattttttttctttaaataaatgtcatttttgaggcaaaagaaaaaaccgtgaaaaataaaccccaattatacctaaaaatctaagctgctttattagatcccaaaataaatattaaggcttacattaaaatattaagttaacattaaatatgcagctgtattcaatatgtaaagagatatttataaaacgcctctgttaagaactttagaaacaaaagatattttagagatcatctaatctcaaggttctcaaatttcaatacatagactagtgccagactaggtgtgtaagaaatatcaaggtggtttaaggacatgctccctagtccttcccaagagagtctcattcagcagatctgggctgggtgcctgaaactatgtaacgtatacaagaatccagatgatactggtgtgcagccagacttcacaaacactggcttaatctaactgggaagccaagctccagaaagctgaagtgccttaccaaagtctcaataggcttgttaatggcaaagccagaacaggagcccacgtctgcaaataccatgtccaccgctctttaaaagacaacagttgcctatttgtcttccatgccaattctgtatgtgactctggcataaactgccagtacaatgaatgcatctccagagaccaaatgggcccagcagtgagagatacacaggatatgatgtggaagaccacacaacagcactatgtagatagtccctttttatccagagataacataaatgaagtacctcaaggcacttcacagacactgctagaatagaaaggaggatgagaatcataattgtaaaactgaaagcatgagcaccaaaaagttttggcacatatttgtcttatacatggattaaaaacaaaagcattcacaaatagttaaacctaattatagggagtggcaaatctcatctacaaagcttctatctcaagaaaaagaacagtacagggtggattttccctccctcatcaggtgagttgaccttattttcaatatgcagagattccacattcgcaccacttttgaaagttggtggaaaaggaagttgggcaatgcctcccttagattggtagctggggagagaattatctatctttaaaaaactaaaataaaaacaggccaggcgcggtggctcacacctgccatgccagcactttgggaggccgaggcaggcggatcatgaggtcaggagatgaagactatcctggccaacatggataaactgtctctactaaaaatacaaaaattagctgggtatggtggcacgtgtctgtaatcccagctactcaggaggctgatgcaggagaattgtttgaactagagaggtggagtttgcagtgagctgagatcacgccactgcactccagcctggcgacagagcaagactccgtctcaaaaaaataaaaataaaaaataaaaacaaaacttcataaccctagtcttggtcatagatacagacaaaataaaacataaatcaaaagcaagagtaatggcaagcattacccatgaaaagaaaacttaaaactgccaaattgtaggaggcagagcagcaccaagtgcacaggcttggaatcctggctctactgcatgacatgggcaaatcatgcaacatcttctagcttcaactttctcatctgcaaagcaggggcgagggcctgctgggagaaccacgtggcatgattctgccaagtgtaaaaggatacaaatatgggggtcgatcaccacaataacacaagtccagaggagtttccatcacagtggaaactcctgagtgttgtgtccatcttgtaaaggctaagtttctgtagtgatctttgaaagttttgtaatcctgtgacccaaaccagtgcccaaagctgaacatcctgctccagagagaaatgtagagaaacctaactaggcaggtgttggcctaaaggcaattcagctttgtacccaatgccttagatccagttagccttaagaatgtctgcagcccctaaagcatctaagatggacgtttaatctagcccctgctcccttttatttttctggggaaaacagaggtccaaggatgtgcaatgacttcttcaggatcatctacaactttccttaagggttagactcacaccagggactcatgaggcttagcctggtgagatttccactgcaccatgacacctctttagaagcaagttaaacatgcttgctattttcttttcccaagaggtgttacccataatgaaaaaaactaagaccccactctaattagcagattttttagagattacttgtggctgtaaaaggtaatgtagtcactgatttaaaaaaggcatgagatttagtcagaggatctgtgatctgtgttcaaacccagttcatcaccttcccagactggcaaatcacttaacttttctgagagacaaccttctcatctgtaaaacaaagatgatatttcctacagaagtgttgtgaagattaaatgtttgtcaaataaaaccgtcaaaagaagtctttaagaacaaagatgctgaaattctcaagggaaaaaagcctccaactacaaaaatggacataaacgctcaacaactacatgctaaatttataatgttttaaaaatagaaaatgtaaaaacattagaaatttgtagcataaactggaaactggtcagtttacataaaaactgaagtataattgataccatattgttttggaagttatatcaaaataagtgctatttgtccttgaaatcaggcctaggaacatttaaagcttatgaagtgcaatacatgccacttgcatcttactgacttcatgaagcttttaaaatttgtgcagtgattacactaacaaggtagccgggtataaaaacatagaaagttaaagaaattaaacactgctgatgtagttgattatactacttccttaaactatgtcatgtcataggcatctaacaaacctaatgatgctaaccttcggttgaagagagctgttacattttagaaaacgtgaaactaaaagcagaagagttactcatttcaagtttttcccacaacattctctaacccgcttttccaattaacaactggctaatgaatgatctcccaaagcagtgcccaagttttaaatgctgtatactctattgtcaatctccctttagagattcccaatgcataccagcaagaaaaggtgctgagaagccctgtgagaacatttccccaacatctgaccatagatccctacattactgaatggttcttgatagcccctggggttactgtcccacccagccccatcacacacacagtcacttccagattcctggaaattgatgaacatgcaaaatttctcccaaattttcagattgaatagggttgctaattttttactttgctaggtgagagtatgtgaaaaacaacatagttttataaaatacaaaataaaaaaagaataaaataaaaacatgcaagtgaaatccttctggaaattgcaaaatgctctctggatagatttatttttacagtgaaccctaataggttgcctagagaaaggaaacacattaagcggtcattaatacattatgtaaaaagagcagaaaaatattttaaactctttatctgtgagggaaaaataatgcctggaattctttgaaccacctgcccccggagagcattttctgactgcattctccaacaagatgcctgagctccagtggggactccagatgcagcagcttccacaggctctgctgccttccctgttcatctctccctcaccctctgagaagccaccccttggttgggggattcacaggcaaccacagctttttggacccactagctaaataattctgaacctccttaacacattaccgaactacatacttacatatcttaaggaaaagctctaattaagaaaaaatatttagtagcttctttagtagatatttttatgttaggcattcattttgcatctaataataatttcatttttattaccagctgactcagaatgatgcaaatttatttattaaaaatgaatgaacactgagatcacagtggtgcccatgagcttggttctctggaagaatgacctagtcatagggatgcactatgtggtcttgcagtcattgcggaggctggcgaaaaagaaaggcacaacttttaacctagtgcaagcttcttgcactacagctgaaaggcagagggataattatttactacttcccttgggggagggttgttcagagacacctaaatgacttctcatcaaatgtggatttgaaacctagagcatatcctggcatgcctggggttggtaagggtcaatgaagtaaaggtcattatcaagctcactcacactcagaggcttataagttctgatactgaaaacactttcaccaaagcccaatctgaccttcaaaattagtgacttccccaggcagggacgtcacctttctggattcctagggcgtggcatgaaaagccagctcctcacctcacctctctttgcctattaacccattcccatatttttatttccttcttgactttctcattctccttccaataacctttctcctgggtcatctgcaaacctccaaatcccactggaaatatatgcctatatatcgttaagctttttgcggaacaggtaatctacttctttggcttaacgaataccaatttctctcccatgaacccaatttcccacaaagctctccggagtgaaggctgcatgatctctcacacccccacccccatctttagacttcttcacttttaaagtcgtgttgtccagttaatactactgtcccctgtggagaagctggagcctggcttagagcaccttgtttcttcctcctggccttcatgtccattaggatgactcagaaaggctgtggcctcagtttctctactaattctacacaaatgacctttaccatcatcccactttttgaacacgtatacaccatgactccgcttcagaaacattaatgacatcacactctctggcacaacctcttgtccctgcagctctgccatccctttcatctcttacatctgtttttgatgccaccaatgttcctgcaatatcttctcctttccaccctgcctcttacctaaggctgtcaccctgagtgcaggcagacctctactttgcaacctgcatggtgaatcctggcccaatggatctcacatcataatgctcctcagctaatagccttttcttttggctttacctgcaaaaattgtttctaggaaagtaatttcatccattattaataaaacctcattttcaagtaaattagaggaagaacaacagtccgaatttttaaggaaatgttttaattcaagttctatagaagttaccagcatcctgaaaaatagtaattgctagagtctttttaaggaaaagattaagatgctttgtaattagtataataatttatatgaaaataatgagttccactgttcttatgacaaattctgatttaacaaggataataaagttgcactattctagaaaacagacaaaaggttaaataaaatcctatattttaacagctttcaggcaacagactactgaatggcttcaagaaaaattattaccttactgaaaaacatttttgttaattccctcaaacggatacaatacttattctccctaaaaatgttggggtggcccgatctaatggccactataactgctttcatactcgcctcgattccatgttatattaaccatacaaatgtaagaatgtctgctcaaaaacaagtgaaaattggagatggctaaagaatcaaatagccttcttaaggcctttaaggtattactggacaacgcaattttaaaggtgatgtttctaattactctatttgaacagttttctaaatatctgggcctaaataaaatgtaaccataaaatcgaaagtttttaactgatacctaacataaaccctagaaatatttatccagtactaagtcaactaattcagatgctcatttgtccaagaaaggatacttacttgcaaattgtagtcttgcagaattttaaccaaggaatctctcaaattggggatctccattccttccttaatacggtgaatcagtagaattgggtcaacatgtgtgccaatgttgtttaacaagccagtaataaatgctacaaaataccacataaaacaatgaacatataagcaacattataatgcaattttatttgcacataatttgcatataatgcaattttagatcaaaagtaactcaaagaaaaaattatttccttcaaagtaagtgttaaaaccatttgaatttctaaactcttaagaattaatcttctaaacttccaagaactaacgctccttaagacatgaaggagaaagtaaataagaactgttttaaaacagttgaacaaatgattacttgccttcaaaatacagtttttagcatcaaatgggtgtaaataatatttattgacaactgactatggctcaggtatcatatacactttcctcaaatactgtgcaaggtaggaatgctgtgtccccattttacagacaagggaaatggggtgtttaatttttccagggtcacacggctaataagtaatgtgcccaaattcactcaggccagcctcaagtttatgatatgttctgccacatcactttgcctcttgagatccttaaactactactttatcttgctagttacaagtgagattctttatattgtcaagaggatagttattaaagtcaatttcagattaaggtagttacatgaacacaaagacttcctaccaaacttaaaaaaaaaaaaaaggaaagaggaaatttcaaatcactactgctagttattttcaaaagagttgggtttctgttaggtgactgcttttgttttttcctttccaaaatgggagacccaatgcaaacagtcaagctgaggaccaacaaatacaaactctgggtgttgtactgataaaaatagtgcaggaaagaggctaaatactacaacacaaacatccaaatatcatcaatgtccagaacagttacatgtttccaaaaaagactggtaaggtctatacacttaaactataaacactcccatatacaagctaaaaacaaaaaaaaaccacaccaacacaacccagatgacatttattcaatttgcttgcagcaggtaaaaatatgcctcatggggacacaattaataaactgtgtagccacctgttcttcatcacatgcaggtaatgcaaagtgatgaggctccaggttttccagcacaggaggagtattggaaatcattacaacacacctggcctatttttattgtaggtacgctaccattttcttaacccaatgtatcttgaaatagtttttaatctagacataactggttacactgagagaaaaaaaagttataaccagagatggcttttatgcttacgtggtttgtcaatggaatataaaatcaaatcttcccacagctctccatcatcttgctccttggcaaattcgattgctttatcaacatcatgtaattcctccataatcatcttcagggcacttcggctattacccattcggccttggtggggtgaagatgggagaaagagttcatttaaggtattttaataatttttttaaagaaattgcatatctcttaatttgtttacataggtggaaagctaagacaaggctattttctcatgtgacaccaacatttactgtctataacatagcaaaataagtatctcctatttactggatatttactctgtactgagtactcatttaagtgcctcatataaatgacatcatataaccatcactacaaccctatgaggcatgttctactaatattcctcttttatagaagaggaaatagaaatgttagtagcttgctaagatcatacagctactaaatagtacactgtgaatttgaagccaggtctgtcatactctgacttacttttgatagacttatatatattctggaggtcaataccttcacatgcagatacacttaaaatgtttaaaggccctaaagtcattctgcctcatgaggtagctgtgcatactgcttttctgatacactttgtgccaactgcaaactcaactatcagagggcttcctcattttcttctctcccacgttcaggggaaggcctttcaataaccctcatgagatgaaagtatttatcaaccatgccttctattggctaattgtctttacatactttgctcactgacctatggcattttaatagtttaaagttttccatgagtttttaatatagtgcatgtaagaaagccttactcagtggagggacaacaactgcctggttgtaggttgtcacccttacccctgtctctgggcttgcaggaactagtaaaggatcttgaatccttccccctgcacacggccattatcaactgataaaagctggcttgtgaatgaaatgatatcccatttgataccccttccacagcattttgtgtttcttacaaatattatttccacagtttatgtctctaaaaatggttagttatttaaaaatgtttacaggattatcaagtttttataaaatcagactatatgtccctaataagtcctctactgcttctaagacaatatgacaaaaatttattccaccaaaatatttcttggggagaacactgtttggaattagtgaattgatgagctacctaaaattgtgattagaaccccaggaacatgctgaagtaacaaaatgcagccccaaaagcacttctcctaagaagggcaggtgctataactggacagttctgggtttgtggctgagcacccatgaatctgcatacacataaaagggaatagaggatttggattatttttcaacagaggcaaagaggccaatgagagtgagtgctgtataagggaaaggcgtaaagcggaaaaaccctactgaggtcagcagggaagtgacaatggagaaacaccaaatatgaatgttatgttatatgctacattatgcaatcctcagtacaacccacattgttgtcatgcacgtggctcattttggaagaatgtgaaaagatgacaagttttgtttcttggtatgcatggtacaaaaattgtgactcatgtggaggtaggagccagaagaccaggaacactgacacctagattatattaaaaagctctcctccttctccaaaactatggtattcaattgcatttcctctagttatttagggtgtgatttctaaaagtgattatttattttctaccaatatgatggtaatataagctgattataattttttagaaaatgaaaaaacttgtcaactcatctacaacttaatctatgttgtgaggtataaactgataaattttgatatgttgattatacattgccaatatgttatttcaacatttatgaaacaactcttccttctttactgtgctgtgaagtctgtttcatatattaaattattgtaaaaataggctcatattctgtgttacgttggtctaaaacctatgtcctttcttacacaatttacttcatgttgtcatcccatttcttagtttatggggaccaaaatgaataaaagctacttactcagaagataaactgtctcttctacaaagtttctctgttgacagatctcaagagccttcaattaaagcagggtaaaaatgttactataggcgaccaaataagaacaaacagtaataaagtcatttaaacttacacttgaaagaatttttccacagcttctttaaaaataaaacaaagcaaacaaataaagaacacatctccctagaatagctgcactcagttacctctcagaggtactggactctacacaattcaatttaaaacatatttgaagctactcagaacatttcatgagcaagagtagaaaacaagacaccaaatgaaaagaaagggcctttcccactaagctttctctctttacactacttcaggtttccttacagcactgcttccttccaaatctgtagtcatttgtttaagctctgtttccctccattaagatgtaaggaatgttgctcatggttgaacttttcctagtattgtgcataccataagctcaggaaatatgaattcatgctgcatgaatgaacgaatgaatgattgaatttactaggaatatttgtactgccagatcacaggggctgaaagagaactctgctcaaggatctgtcaaaggtgagaaggaaaaaacacttttgatgatcaagaaggatccaaaaaggagcaactatgcagatgagagcatttccattagtcttaaaaaaaaaaaaaagacctactatatattgataaattacttactaattctaaattaatcaggatacatttactatattctctgtgctgggtgctagagggtcaggttagatagagatgcaaagatgacaataataaaaatgttagtgatgattataggtaagaggaaaacaaagaagagaataatggaggaggcttagtaggagcattagcagcatgagtccacccccgggagctcagggtccaggaagtgacagagatgtgacaacgcattattccacgattagagtaacatgaacaaagggccatgtgtacagaggagggacactgaaactgtgtggtcctcttgtgagaagcttcaaggggaagtggcatctgaaccgggtgcagtatgatgaatgagtgcacctgggaaaccttatctcataccctgcctacaaaactttctattgcatcgctccactcagacttaaagctgagaatctctaccacgacttacaaggcatccacaacctagcccttaatttctgtgcagcttcacctgcctctgctcacctctccattgcgtccccttgcctgaaatgcttcccttaccctgactctccactattggatggcactaccttacgtcatgaggtcaaggtcacccaaggtggacgaacaagaggaaggagccccggtctctgaccccgcggcatggtgctctcagcagggccactccaccaacacttccacgtgacagaaaaagaaactgttgctctgttaagccacaattattttgggatttttatcactcacagttgaatctaatcctagctaataccgagaaaatcttcctttattttgattaaaaatatggtttacctattcctatatggtcttgcctgtcaatcaccattgtaaatgatgaaactttcttaccaactcttcactctcctgcagtgatactactgcagagacaaaaaacataagtaagaagttaaataataaagcaaaatagtgcaaatacatcagaggacacgggattcaaacaaaaaaccactgagaagccaactgagtgcctagatttgttctgggtgttaagatacagatagtttatagttgagtgggactgccattcacagataaatagaacactgtaatacaactgaataaggagaatgtttagagaaagatagtctgactaatgataagcatttatgctgcttaaaataatttattattaaaaggtatccatgaatcaattctgtacttggaaattcacttacacactttaaaataccattcaagatttcagacagaaccattacccattttcttctgcacatgagaatgcttaagaacatgctagtctcaaaccacaaaagagtttgcagtttgaagcctcacctgagttatccaagacagcagccacttgctctatgtgtctatttaagtttaaattgattaaaattaaattaaattgaaattcagttccttggtagcaatagccagatttcaaatactcaattgtgacatgtggttggtggctactatgtgggacagagtagattataaaacatttccattgctgtagaatatgccatagaatagcaaggctataagatcctgtatatactttcaaaaaggaagtcatgtgggaagaaatgtctgaaggtaagctgaagttaggaatgacacggaatgtaagcagatgagtatcaccaagttcaaagataatttgagtctctgaaatttcaatttcacataattttagatgtttcatgatgagtttctaacagtatcttaaattatcctcttctcacaaatgagaaaatggactttagaaatctctagaaattttgagtaaagtataaaaagaaagcatttagattcttgaatgttcctggaccatggtgctccctctagaggaaacagtagggaaactaagatttttaaagtagacacacacaacacatgcgcgcgcgtgcgcgcacacacacgcggacaatgcagtgaaaatagaagtgaaaaatcagaataataatagaacttgagtaaaaaatgatgcaaaaataatattttaattctcctctttctgatttagtatgaaggtaaagaatgaagttagaaaactgagggtaactaataagaaccttatcaaatgtaaattaaataattatttctacctatccttgatctcgtcatcttttatccaatcttctctttaaatttctttaatgaaaatctgcaaacttggcatctctcagctttattcttccgaattcagaaatactgccaccttgtgaatactattagatatgagagcgatcacaaattccggtataaatctgctgaactataaaactgatgatctgctcttaaccactctaggcacaagcaaatcagatttgcaaaatgaaaaccagtgcctgatgaccacatctgtaaattacaggacagtttaacagttaaaaaaaataatctttcatgattcttgcaatactaggaaatatcttatttccattaactttttaaacctgaaaatgattccccaacatagtggaaaaaatacagagcctaaaattaagtcatccaggttctaagtcttggtccctcaacttattagctctagactttaggcttttttccagctccctaagacttggcttgtcatgtataaaacgactctatccacctaactgcacttttgtagagattaaataaaacaatatacatgaaggcacaacatacattataaagcacaaaagaaatacaaataatttttattatctttaaaaattgctgtagatattataaattcccacaaactctgtatttcctttagaacaaacaatttcataaaagtttatgattaatttttgaatttcagagtcgtggtgattttaaatcctgaactctggcctttgataactataactagggcttttgatgtgacgtcaggatctttccaaagttttgggccaaatactattgattgtgggatttcaatcaattcaaaataaggttaacctagattcttgaagatttcaatcagttgccaatctgaaatcacctcctctcaacaattagccaattgttggcaaaggaagacaaccaaaggaaagacaaccaaaattagaaagatatagtgtcttcccagtaaaggaagacaaccaaaattagaaagatatagtgttctgccagaggtaaattataaacaacagtggatcaatgggttctgaatatgcctttgaaagcttaaacacttctcatttaaagtagaaacaaagaacaaaaaatcctcttgtaccaataggactcaacaatctctaaattctaaggaagcagacagaaatttctttggggaaagggaggctttataatttcaaagttctcaatttcatattcaggagaaaaagagatcacattttctatgagtcgctctttatacaaaacaggcagacaggtattccgtgccctttactagcaagcttgggatgcgtttaattggagaaatccactttgtcattcgcaaattggtacatacgatagcttttcatgtcacatgtaaacataaaagggatttgtttctaagatgactgagtatatacagaattctttcttattattcttttttatttatttaaagagagttttgctttctcgcctaggccggagtgcactggtgcaatcatagcttactgtaacctcaaactcttgggctcaagacttcctcctccctcagcttcctgagtagctatgaatactgactggcatgtaccactacactggactaatgtttttatttttgtagagacagagtcttgctatgttcaccaggctggtctcaaactcctggcccaaaactattttcccaccctcagcttcccaaagtgctgggattagaggtgtgggctaccacacccaaccagaacttactttaaggaaaacggagtgagaatcttgagttagtaatactgtcatgaacctctcctttaagacagctttgggtacctgatagggtagagtgctatgttttctacaaatatacagatttcccacaataggtcctgacaaacagataatctcttatgaagaagtctcagtaacctgaaacatgaaaacccatttagggagtcctaaaaatatggattactacttgattatcttataatggtctgtttcaccattaccacctctaatccatgctcaaaattctctttcagtgggacacgagataaatttttaaaaataactgtgtctaaaacataattggttttactatgcttgtgctgagttcttttacattcaatatgttgtttccagtggaccagagagaaaaattctacaaggtctacacaaatgctctaagcaagccatatgtgtaggaagcatcacatgcaggtctgcaacattctgctgctccctactgggtgaagcagggtgtcttccactgagtactactagacccgaaaactttaaaccaggtgggcataaagtgtgtgagagatatagagatactggaacctgggtggcgcctctgcatcttgtgcttagggaatgggaagggctgttaatcacccacatgtgacctctctgtctcagaggtcaatgggagacttcaggagactgccacatcctctctgaaatatacaatgttctcttgaaaagtgagaaacaaatgaaggagcactgttcaaagaataagattctcactctattgccaggttataaagtcctatgttgagagaagagggtagtatctgtttttacttttagagtaagataatgaatttccaaattaagtcctcagaaaatgtcttagggccccaaatataaaatgctaatgtcgttttataagttaacaggcaggcaagatttttttcaataattgtggactttaaaaatccattgagctaaattggttcacagtactccaatgcatttaataatcatgggctaaggaagcatacacggaagttgtaagtgtacataaactgtgttatcatccagcttctttgcacatatctctaatgggtcaaatatgttttttattttgttggtccacacagctgactttcaaaagtatctggccatccaaatttagtcagacatttgtagatgttagtggtagatggtattgagaactgtaggacataatactgttggcttttaggctgcccagttgttagcacatatatagttaagtacttcagtttattttgaaacagcagtctcataaaacttactagtccttatttagcccgaactaggatcttgcatgtatataatttattcattcattctctcactcatgatgcaacacacatttagtaaatgtctaatgtgtggtgggtactagatttaccaaaatgagtaagacaaattccttgtctttgaagaatttccaggagacagagactagtaagcagataattatagtggaatgtaggatgtaggagaaacaaagaaaaacatagggtagacacttaaagaagataggatgcaggacctaagctatgacctcagtttatcaaacctgattcctgactggagcaactgcttctggcttaggacagtctgtgtctccctcccaggctcttgactctgaggtgtcactctgatcctgggagatggactgagacttctaatatatcatttttgcctgatggttgattaagtcctagaccctggattaagctgttcttccaattaaacctgtcacagaaatgcttcagctcttcaccaaagtctaatccaatgagatctccttttcttgacagaatgtcccagccaaaaacctacttctttgagagcaacagtcttccccctggaaagggacagatgaacagagatagaaagagaagaaagacaaacaacttaccatcaatgacaacctcttcatccaaagtgtacaagtcggggagtctgtgccttaccttttcaagtgggcaatgggtactgtctcggagaaagggaagtaagtttggtcgatcatattcagcataaagactgatctgtttttcatggtaacgctgccccttatggtggtctctcttgaaaagcttatgcaaatactaaaaggaacaaaagataagccgtgacccattaaaatgagaaaagcaatacctggctaacattgctatttttagctctaaacacctcccatggacaggttgggggagaagcagtcttcagggaaaacctctaggtgatggagaagtggaaaggaaaaccctttgggagagcaaaggattccgataatttctctagaagggccccaaaacctgactctgccacgtaccaactgtgaccttaggcaagtcactaatctctctgagactcagtttatctacaaaaattttattgagttactgtgacaattaaacgagttgccattacgaaatcactcagaaccaatgaacttagcatacactaagaactacagaaatgttaatgacagtagttgtcaatatcatcattggtatctgctttggctcagaaataaaaagatgagtggtcttcccagatcataaaaattattttacacaaaagagggtagagtcctgggacaagcacatattcttaaaaactcaagtagcgggcactaaactcatttccatacattctgcatctcctctttgttgactcttcaaatgaaatgctgcctaaactggtaacatcaaaaacaaaaatacaaagtaaaaatcaagaagaatgcaggtgttctgaaacagttttcaaaactgattccttaccttagctgtctgaaaaaaagttaacttcacaggaaatcagtaattcactttctcctcacaggcaagattaagtctatcaatacagtactcagaagtcaaaaaacaattcaatgtttagttaatattaaatgtaaacaaaaaccccacaatctactgaagacaggaagacttaatcaccaatcccacgagcattaacaccttgggttgctgtttccaagtggattggtttataacagacatagagcaccagccgccctgcagctgagactgtaaatgcgctgatgtttgttattgctgttgaatctagtcacaatgacgcctaaccatggacacatgcaccttaagaaaccaatcttcaggcttcctgttcacttcttcctaaggcaaaacggagcagtacaagcagtagactgaactcatgtgccaggcagaggtctgatgaacaccaccgccagtccactggcactggggtcagtgtgttagcggggatatgtggtgctgtttcccagagtgcaaaaaggacagggaggccctgtcacatgaatgctgagtcaaatttatatatatagaaacaagacattgcctggcagggaagatgagccatgttagtgtgggctgtgccaccacttcaccattgcactgattacattgtcgcacagagagctactgcccataatcctgtctcctggcttaagtaagtcagaaatcactgctttataaatgaattcctaaggtggttagcaatgtggagccttgcttgggaagcagataatcttgagatttccaatcatgaacaatgcagcagtagcatctgagcaaaagagaaaaaaaggtgcctctcattcccttcctgcagtcttcaaaagcttcaaagcagaaaactgacttttgaaaaaaatgctctattccctaagcctcctcctagggtgcaatgagatgggcaaagatacaagtgcacttattgtatctgatacccatagtcctactgatataatccctaagtgtgctaagttttctcttgtataacttttaaaggacatagaaaacaactattcctgctttactctcatgatgatgcaatgcagagaattgaagtagccccccaaagaaatctagaataacaggccttaattacacaaccaccaatagcacacaagaaatatggaattagctattgtcatggtgagggacaaaagaaatgagactctgcccttttatcgctctgtggtctggatatggaatggttgtctgacatttccttagcaggagaacttggtacagtatctgcggtgccatactggcctttactgtgatatatgccatggttatatttaatggcaactacagagggagagtgcttattcctagacacaacataacacaaaaacattcattatagttaaatatatagttatgttacatatatttatattatagtaatataatagatagattggtaacttttttccatcacaattcaattgtgggtcaaaattcaactgcctgatctacaattaatccctgaccttgaattcacagcatatgctgcattttggtaattacagaacattgtttgtggtgaaacctccaactggaatattaacctccttgaagaattcactccagtatcctcctcgcaccaatactgaaaggtgattcacccactggtcaatcaaaagggcaaaaggaggagactgccatgctcaccacatgctgtagctctggtctgtcttccaattcttccactacctttttaatctagataaaaaagaaaagtttcaaggtggagtcatgaggacagaaagacagctacaaaattatctgataaactctcttcttcacagctataggagtcccagacgttcatctggtaacacatataaaaacaaatgacactcactgaaattttatcttcattgtccaaaagcatgtcaacagctttctgaaacatataagaaaagccacagtcaatgaaatccgttatttaagaagagaagactaaacacaatgcagtgtacctaccacagttcacaggtggaaggcttattttgtatacttaaggaggcccttggctttacaatggctcttatggaaaatgacatttgtgaagaactgcattttcaaatgcatctcaatctgaagcctatgtgttttgcacactactaaaatggtgctttgctataacttcccaaatacaaaacatcttgactgcccatatcctagccccccgccctccgatgtctcggataccttcacaccttctcatgagactctcagtagttatggagagcatctctttaccagtatatcaagaaaatgagcttttcttccagctacttcaacctcgacctagtctccctatgagactccacagacagaaggagctggttttatgaggagaagggaataagagtcagaaagagaatgagatacctgaagtttcataatgacataaagcttttggactttcagaatttactttagccacttttatcattcaggaaacacaaactagacagtttatgtcaagaggaagagggaaagcagcacaccagactgagcctcacacggaacacctgggggccctgttctagactctgctacgacctagctgtctgctccaaatgttacttttgttctctgaaatacgagggtgttggagtagattatccctaaggtctcttctaaccagaagactctgattccttacatctggatcacattctagaatagcaattagtttcagctcattcatcttttttccacaggaacatatgcaaaacgagctctggagaacaatggaagggggtgcatgaggggagactagatatgaggaaaatgtaattaatttttacataagcatctcatcctctgccagacaagcagagcctctctacctgaacttccttggagctacgtaattcttcgtaaatctgtagtccctaaagacttgactcagtattttaaaaagggctaaagcatctttgagaaaaagacgtagctctagctcctatctaaattaagtttaagttggtggagattaatatagcacacaatatctctaaatacagtacaatataattgaaaaatgcattaatccttttggagcctttagggttctacttttaggtttatctaaaatttcaattttttgaataagaacactgttttataaacctcattatttctgtcatgagcacttgtaattagatttcttttacacacacacacacacacacacacacacacacacacagcttgcatcactttgcaagcaccaatgtgagctgtggctgggtccactcattagggggcgtaaatttattattaggttattcaaatttgtcacacaataaaataacattccacatgtcctggacatgagcatcacctcaaaccaggggaaaccccacatgctggatacgtgaacaccaagaaataaaatagtaataagtcggtcaagatggaagttcacttaattttaaaattctggaaaacaggttaggagggataaatgagtcaaagtatatacgtggtttgtttctataaattatatgaattgttttagcaagaaattactttatatgcgcacacacacaactttaaaagttctctatcaactttgaattgctttcacagaataactacattatgaaaaggattcctgaatgccaaacaactagaataacaacatctagcgagggtcagagtgttctaaagattgtcggcataaagccaagttatgtgattcattcaccaatccagcatttggatagatatctaagtattaaatatttggaatagtaaaaataattgacagtactaaaataaaaagcacattacctctgaatcaaaatccattaataaaacaattttatccttgatagaactgaaaagattatgcttgtggatcaactgaaaaacgtctttatgtcttaatgttaagtatatttccagagcattgccatagttcttgtcataggtgtacctggtaatacaaattttttacattaatattcatcaacagttctaattaaaacacacacagagagatcatggttcacaatattaaaaatggaaacactcctttagagagaaaagttaactttatttcaaaaaatattcctatttttgaataggatttaactatacacgaccaataagtatttctttctcagaactttgcctctcatgttgccaaaatttaagaaaattcacaatattcaagtaataaaaatggtctttattgggggtctcagtctcaaaagttttacaaacatccatacagcaaagaaactaggatccaggatgaagttctcattttagtaacagaaacatccgttccaattcttacaagcagtattcagctgacaaatggctaatattccaaaagctgattttaagggggctgtgtctaactgaaatgtgtttttccattgaaacaatgtttttcacattaagtccctaagtcagctcttgagagctcactgaactgaagctgtactgttggtccattacgaacgtgctgcagactctaaggggtatctaacaggacaacgtttccaagagaaaatgattagcatttcaacttagaatgccataaacacaacctcctcttgtggaaaatccaacacgtccagagttctaggtcattttggtataccttttttggttttgggcaaaagaagaaaaaacaagggagaggagtggcctgaggtgatgggggcactgaggagaggtggatgcagggatggtcgtcttggctagacctgcagtatacttcttgtttccctagatcgaagtacttgagagcatatcttatctatctctgtatcataagcgtctcgcacaaagcctgcatcactgaatgtgcccaagaaatatgaaaaatattaaccaagctgccattttctgagccctgactcagggtcagggagtcctctattatgacatctcttttaaagtttaaaattttcccataaggaattgacatttgagagattaaattaactgacttgaagaccctagaagagcagaatccagagccttgctcattgggaaactgttatgcttgagtgatctaaaacttggcacccttttgtttcctaaccactgcctctcccaagcgctgtgcgttaggggttctcttctctgggaaacagattacattgcaattgtacagtttcacacatgtccttatcgcctactcatttgaggtttatgagaggtttttactaagaaggaatgtaggaaaatggtataaaatacatcttctccacttggagtttgccaaatctaaagtatgaaaaacttttcaacacagactgatatggaaaaagaaacacttaagtatactcacaattctgccagggttttaagtaaagtcttgttctgactatctttcttcaaatgatcccgaactgcttgaactatgactgaattattatacagatctccaggccattctcggatcaatgtggcaaaaccctaaccaaaggtgaaaaacagaaaaagaacactcattcaacagaataatagttgtgatattgtgaaatatacatttggtcctccttctgtttcctggcatataactctcaaaatccttagaatctctaaaatgatgtgtcttcttgtatgctaatgagctgactggtggctagcagcccctaggtaacttaaggatggggttgggcacaggatagactgagacaggattaaagggttggaacttttcagccctacccccacccctgccccacaacctccaaggaggggagaggggctgaaggttacaccgatcaccaatggcccagtgtttaaatcaatcatgtctaagtaatgaagctttcattaaaacccaaaaggagtggctttggagggctccccaagagctgaacacctggaggttcctggagggtggtgcacccaaagaggacctggaagctccatgcctcttcccacataccttgccctctgcatctaatccatttggctgttcatctgtatcctttgcaatattctttataataaaccagtaaatgtaagtaaagtgttcccctgagttctatgagctgctctagcaaatgagtcaaatctaaggaggtggtagtgggaattccagtttatagttgaccagtcggaagtacaggtgacagcctataacttgtgattggtatgtctgaagtgggggcagtcttgtgggcctgagccctcagcctgcaggaactgatgctatcttcatgtagacagtgtcagaatgaactgaattagaggacatccagctggtgtccactgcagaactaattgctttcttggtgtgtagcggaaaaacccagatatttggtcacagaagtgttgtgttgtgagagtatagcatgagaaactgagtttggtttctcctaaattctcaaaacaaaccaaacaatttaaaccatccctaaaagtattcacttttagtcacataacagaccaaacaattatatgattaaaagtttgttcaataaatatttcatcaattttcagactatgggtctgggtgtggtgaagagttgcagggaatattattgtacaataaatctccatttagcattcctgggaggcaggtcgtgccatctacttctgtccttagttttacgaaatgtacaactaagaaagctatcttgttccttctataaagtgcatggacaagagtttaggttggacttgccccatccccattctggactaactgtaacatttggatgacagctttaacagcttacagatattacccaagtcagctactttccccaccaccaagagtcctctaatgcacttaggcctgggctgctgggtgcaactggttatgcagttgtgcactgtatagccagcacaactgaccgtggcagtctgcttgggacagggctgctcccacagtgaaactgtccagcattctatatctttaacaagtcaccatcttggtcctccttccactttggcttctaatgccagttttatgttggaatttgagactttggctcaagtcttatcccctggctcttatcctggctatctctagatctcaaattttgtggttccccgatttgatcctgtttccgtcccacagctgattctgggccagtatcttgctcagtctctactccctgattcccgactttagacttcatgttttataactcaaagtatgacagagcagtttacttactgatccttgacaatgtttagaacaaaaacatgttcataagacagtaaagagaattaaaaacatccacgttattaaatgtgaaaggaaaataaattctcaggacctccaattcactaagccaaagggaaagttaagggaactgagtcatgcaaaaattgccttccttttgttcccaaacagagagctgtcatttcacatgcttcctttagctcatgtcaaagctagatctactgagcaagagatgaatgcataattgactttttccccacttctctctttttacatgtaaaacgtagatttcctgagctaatcagagcatcactggaatgtgaccaagtgcctcattgcttactctccccctacttatttatttatttatttttaaaatttgctcctttgcctcctgcttgctctttcccctttaaattttgaagtcctcaacaatctctttggaaaaagcacaggacacagaccctgtttcttttccccaagtatgtccctaaccttggcaaaataaaccttaaagtcgattgagatctgtctcagtcactttttggtttatataaaaaatagtacattattactattaaataactccattaatactttaatgaactactgtgaatttgtttaaataatacttagaaatgaaaacaatgtgatagaagctgcttctgtaatgcaccaggatttggtaagaaaagtgcaaaagaatcagtaatatagttttcattaaagttccacccgatttctaccaaagtagcccctggaaggatggcaagagaccagaacaaaagaccacatattttccatttagattacaaacttcttatatattaatatgattgaaattttacttcagaaatttgggaatggattcaatcagaacattaaaatgtttgtagaaccaaaataatatttcagatcaagtttctttcttttcttccttctctgtttccctttccttgtctttccttccttgtccttcctttcttccctccctcccttccttttctttctctctctctccctctttctttgtttttctctctctctcttcctctcttttttttttttttttttttttttttttttcaggtggtgtttcgctctgtcgcccaggctggagttcagtggcgctatcttggctcactgcaacctccgcctcctaggctcaagcaagtctctcgcttcagcctcccaaatagctgggactacaggtgcatgccaccatgcctggttaatttttgtattttttttttttttagtagagacggggtttaaccatgttggccaggatggtctccatctcctgaccttgtgatccgcccgcctcagcctcccacagcctcccaaagtgctgggattacaggggtgagccaccacacacagcctctttctttctttttgtgagaaagggtcccactccgtcacctaagctggagtgcagtagcatgatcacagctcactgcagcctcagcctctagggtcaagtgatcctcccacctcagcctcctgaatagctgagagtacaggcatatgtcacagcactcagctaatttttagttttttatagacaggtctcactatgttacccaggctggttttgaactcctgggctcaagcaatcctcccaccttggcctctcaaagtgctgggattacagatgtgagccaccgtgacagccctgttttcttaagactatataagataaaatagtctgtaaagatttctaccccaataccagcagctcacagtagcccctagaccattaataataatgctcagggaaagaagaaagtttggcctcattttttcttttccctatcatgcaacagcctcatggtactgccaacttcgaacacaaaataaagacaaaataaccagtcatcttgtatgataaaagcatgatgaccccaccataaactgaaataaacatctatcatatttcatgttaggcttctctctgttcaactggctttgtgtacccttgaataaatgtgctacccaagaaatatttataaaatctatctgtggccattattactaattagaggacacaggaacaagggacctgttatgattgaatgagcaaagttatagaaaacctcagtacctatcataataagtaaaagtctagaaagtactcatgaaatgaaatgccacagaaatcatccaatttttaacatgcttatatgtttgtcgttaatattaaacaaagcttaactgtttaactctgctgggtcgtaaattaataggcaaagctacaggcatatgactagaaaccccatacaaagaagtcatgaagcatctttacctccaatattacttcatgtctttttagggagaaaaaaattgacaagtcaatattccagagaagtacagtttgttttttgtaatctgaccttcagtgctctgtttagcaacacaaaatgtctctccacataatatgtgatcaaaagtgttgttagggaacacagctatttgactgataatgtgacaatttaattcaaaattaaataattaagctgagaataagggaaggtaaaacatgaactatttataagagcttatgaaaataaaaacaaattatttacaacctccttaacagtactgaccagacatacatcctaaaacattcaggagaaaacatctacaatctctaaggttaagtcatgcttctttccatctcaataaaaagtgttccagatatgaaatcaacagggtaactttgacgataaaggatttttaaaagtttcatgaaaaaataagagttcaatcatgtgcaataactgtaacagaatcataaaaacaataaatttttttaaatgcttaaattacattactttaaaaataggaaaattataacatacttcagcatttgtaaaggaagtttgtactcttctccatcattttcacagaacactcataattctctttcttctgggatgatatcaaagatggaatagcagctgctattgtatttatgaaatctacaaaatagcacttagctctttttctttagttctagaaagaaggtaactttaaggaattccttaaaatgcacacggactaagtgttttcactgtctacataaacatgagttatactggagtttctctagctcagtttcacctgccacatgcaaactacaaatctgtttcctttacaggcattgctccattgtattcctttctagatttcctaacacctcccatcgagaacaagtaaatatgaccacatcagaacaccatacctcataatcactctccaaaaattcatgtaagatcatttcatagatgagtggtttcagaactggatcacctcttggcaaataaggactaatagcctaggtaaggaaaagggaaaaaaaagtccattaaaatatgaaaaaacaaaactgcattccaattatgcagaaaacataaagtatatttttactttaaaaatgtgagggaatacagtactctgaaaaaaatgttttgaacaggatttaaatgaaaactactttctaacaataaattataatatattttcaaaagtatatacatgtatgaatgaatttaaaaattgcctaggttaatctttatctctctgttcttcctgatgagttaatagaaatctaaataataggagggagaaagtcacagagatgaaaaaagtcgacttcttaagtaatcgaggagtacaggtaatctattcatctttccttccttcaactggagtttaccaaccttcaccaactcataatcatcttttgaaattaggaaaaatacatcttgtgttcttcagatattttcagtactgtgttaaaagtcaaatttacaaatactgttcaatgaccctataatgccctacaatccaatcaccacactttttactggggacagacagagaaggtcaccatccccaaggagctcacaagtcctagaagaaagatatgcagacaattaaacagacaataactgtattgtgtggtaagtgttataacagaggggtcagcacagtgctgcagcagcagaggagaaccatgcccactaaagccctgggtttctcaggaaaaaataagagaggggcaggacatctggcagggggaatagcatgagcaaaggcgtggagccatgaacatgcatctgtgtgcagggaggtcagaggagcccagagatgcgagatggcgtcactgaagggaggtgaggctggagaggaaggggaggtggggtcttgagaggaattctgattttattctataggcaggagggaagcaacaggtattagggaagtgagagtccagacttattttttatgcagataactctgggctagggctgcccacagatctatcagaaggcatttgctatggctcaggcaaaagttaaggcaatggtaccacaggggaagagaagagccccgattggtattgacatgaaaaaaatgacaagaagtggagattaaacagaatgaggaggggtgtaacatgttctaatcaagaacagtggctttgagctaatacactctggggaatgggtatattgtgtatcacaaacacagactcaatggaaaaggactgaatttgggaaggaatggatttatattaacttgaattatcatcatcagcagtatatacaaggagaaacggccatcacatgatattcaaaaaaaaggtccaagttacacagccattaaagtaaacagggaggcacgactggataaaatcctccagaaaccatccaataaacccaatgagaagtgtaacatttacagggcagacaggaggagtcacacggttgacaagatgagtaactgggaatttttaaagcatatttataacttgaagagagcattcaaaaggtccacaaatactgaaaaatttttaaatgtttaaaacaaatataggaatactttattgattgattaggatgttgtgcactaagttgaaagatttaaaaaaagaaacatcaaaattattcattagagctaggtggtcaattttttccatctgtctttcagcaggtaaaatattacttgaaaaatacaatattattcagtaaatctaaaaaaagtcttatgctttataacctactggatgagattacacctattttcaaaagtcattaaaaagagcatgaaaacttcatctaaacacagagagaattggaaagagataagtgaacacattgtatatgtaataaatatataatcttatatatttttttttacacgaggcttatattttgaaactgtctctaaaagtttgatttttctttccatctgagataataatcacgtcctaaaaaagagctgagtactattatctttgtttccactgcaatattaatatactacttgcagaaactgagagttaaaaataaggctttgcttaccttaagctgtccaatttctttaaatttataaacttcatattcccagagtgctgcatttttcccaagaattttctggcatttgctggcagtaaaaacatcccaggcagaaagaaagtatatattaaaaaaacaaaaaacaaacagagacagaataagtagacattttccccagaggtttagagaaatctctcttctcagagttttgatgaatttctatctcaagtaccaacgaacataaagatattactgttactcatttggttgcatacataaattaacacaacttataaaagttaatataaaatgcttataaataaagatgaatcacttcagaagactataactaggggctttcccaactatctgcctgttctaagtttcccatttacccagaggagcactgctggtttcgggagacctttcttgccttgaagaaaacttgtcataccccaaagtgccagaacctttctaaatggctttaaattatgcactacaaaatcagacttcagaaaactagaatcctatcctactatataacctggaggactgcttatgtatgaatgaaaccttactttacacatcaaagaaacacattttcttaaataacctcaggagacgagaagcaggcttgagggcactcttccaggactgccatgcagtcatgcagcgggcactgccagttccagtgggaacccctcacacagacttgcacaccactacataacatttatgtgttctgcccaccacagacctctgcaacccaggatcctggggtctagtcacttctatttaactgccatccttaggttgggaaaattctctttgaatcataagcagaggcactttcttctggactatcttccaaggatgcttataaagcaaacagctctagaaatgagacgacacaaatagtgtctccctcctgaggaaagggaaggtttcttactgcccagtacaataaaggtaaaatgacgcctttaggacaaaaggcagacaaggtgatagggtttggccgtgtccccacccaaatctcatcttgaattgtagttaacattaatccccacatcatgggagtgaccagatggagatacctgaatcatggggatggtttccctcaacctgttttcatgatagtgagttagttctcacgagctctgatggtattatgaggagcttcccccttcattgggctcttgttcttctccttcctgcctgccttgtgaagaacgacacgtttgcttccccttctgccatgactgtaagttttctgaggcctcctcagccatgctgaactgtgagtcaactaaacctctttcctttataaattatccagtatcgagtatatctttattagcagtgtgagaatggactaatacatggggttcttggtcactagaaaagattcagataccctaagctcaggggtcctcttccgtatcacaacccactgcatgggcaggatctccatgcccaccctctgttgcattgtgggaattggggtttggggatcggggcaaatgttgacactctatttgactactattgttgtagcagtaccttggctggtactattgctcacagagtcctttagctctgacctgggagtctcttgtcttctgccagcaaccagggaaatgacaggctaacttgttagactgtaaataggtaaagtctgagatccttcatggttcttgatacctttctcattaataatgagaaaaaaaattctccttcggtaaaaatgaaatagttgggaaaataataaacattaaactgattctgtgcttggaatcattaatattcaaaaattataatttaaaaataatattcaaaaattaccctcgttagaaagatgtacaaaaataaaatgtcaactgcaaagaatggcttatttttactgttagcaatgctcaattctatttatattaacaaataattgtgaaaatgtcatcattaccgtgctgctatgtcatagtctcctctctccaccaggtgatttatatatgccaagccaatatcctagagaaagccaaatgaagaaatgtcaaaatttaactgaaacaactgaaaagttgagtctcggtttctgcacagggcataacattagggtcctattagctctactgactataacctgtttatactcttagcttgctttatgtaattacacttgcttcttaagcatattcatatttaaatgtatttatattttcatacattttagaattcacaggtcaggtcattaaaaaaagtaaataatgttagtattttaaaggctcctaatctgccccctttaagacattttttcataaaggaggtattcgatattagaaacatgatcgaacaattccacactgttaatgtatataaaattgtttcctgtgccttcatctgtagaatgcaagctacctacttcttctaccccaagtctgaagagaagttataagaaaaatgaaataatgactatcatactaaaggaaatagggaatattaaagttgatatgagctcagaaaaacctgtgattcaaacccatcagtttacagaagaaattgggctgaaagcagggaagtgactggcttcagagtattcatgtttattcgcttattctacctgggttctgaaaggatttggggtggccaacatcaccagaggcatgggaggacagctcttgcttgatctccccatgactcatcttctcatatactatttgcacctaaaagtattttcaccagaagcttaagcttgatatatataagaaacgttgggtgttgatttctactttatgtacaaaaaggtgcataagaaataccttcttggatggcaaaaaaaaaaatggcaggagcccatttcttctctgcatgtttggtatgaaattacatcatgctaagagaaaaataatctattcataactaatgtataggactaatgtacaggacatgcccatttcaagagtgaagcaaaatacccatcatttttagtatattaaatttttactttaataactactatgtgagaaatcatatttcaagtctataggaacagaagtgaagaaagagtgtctaacttccttatttttctggaaacagatcacacgtaacaattctacacaggttctttccatcaaggttcagagaaagaatgtctccttttcagagtcaatccttccaacctttctcctcacgtccatgcttctccactgtggagcttatcctgcactcctcctcttccttttatatcaaccttttatgtcaactctattttacctcttttccctcagcataagcatgtttaagtgcctctcttacacaaaatacccaaaaactaccatcatcccaggatgccatagccccagctacagcctcagctacagccttcactctcttccccttcacagctaacctgataatctatactcagaaccgtactttataatctcctattcacttttcactccctacaacatgttcagaataaataatacacatacagaaaattcactactttcatatcaccaaatccagtgtacaactgaccagctgacctcgtcttacccttctgacctgcttacctccactactcaagcatttaattctctttaccctggaattctctcctctctcagctcccatgaaatgaccttgctctggctgttccaaatctactatgtatgcatcatcccttgaatgacagcattcctgatggttccattcatggtcctctgttcatgacactcactctaaaatgtatgaaaatataaatacatttaaatatgaatatgcttaagaagcaagcataattacataaagcaagctaagagtataaacaggttacagtcagtagtgctaataggaccctaatgtgtcctgtgcagaaactgagactcaacttttcagcccaaatttctttcctgggctccactacgatgtcccacagattcctaaaactaatgtgtttaaaataggattcatcatttctcccaatcctgcttctccttccacagggtatctctatcaatcagtaaatggcagcaccaaaccagaggcccaagcccaaagcctgggagtcagcctagatttttactcttattctttcatccacacagagtcagttaccacatcccaaagattaaaagtttactgtatcttccatctatcttcacctctccaatcctattgattctgtgtaagtctcatgaccttccacctggattaggaagcctcctgattgatctccatctcagctggccctcctctggccccatctccatcagagaatctttctaacagggaaatctgatgtctgaaagcttaaattgacttctagatgttccaagagagaagcaagctcttaattacgaacggcacttcaggatctgacctttgctacctatgtagtaaacccctcaactgctgtgtgcagtggctcatgtctataatagcagcactttgggaggccgaggcaagccgatcacctgaggtcgggagttcaagaccagcctgaccaacatggagaagtcccgtctctactaaaaatacaaaattagccaggtgtggtggcgcatgcctgtagtcccagctactcgggaggctgaggcaggagaatcgcttgaacccaggaggcagaggttgcggtgaaccaagattgtgccattgcactccagcctgggcaacgagagcgaaactccgtctcaaaaaaaaaaaaaaaagccttcaactgcccacataaccaagcaggccaagctgtggcacctctctgcctcttcacatatgttaactactctaagggccggaatgcattctcttccatttctagagaatccttgcttattctccacaattttggctggattttttttttttttaagatgctctggttttctattctcctgttattcctaaattattttgcttctgcactctttgacaattcaggctttcatgtggagttttacagagaagtttacggtagggaaaatgtaggcagaaagaatttgtactgaaacccaaataggcataaaagactgagcttccagttttcacctgtaaaaaagggaactcggctagatggtctccaaggacccttcacatgtgcaggatgtgagttcctctgctctccatctgcacattcactgtcacagttaacaaggaaaggggctttcagtcattctatttttcctgagtccaaaatgtaataaaaatgtatttgatgctctagattagtttccataacaaaatcaattgagtctgttattatggaaacaccaaagcaatgcagttttaggaaacctctctttttttgataaattttgtgataatgtgatttttacctacgatttagggaaactttcatacacataactagaaagctctgtatttaaagtgttttccacagatacagtttccaaattacctaaaactgcctcctagcaggtgttcaagtctcttgtttacaagcagaaactgatttgataaaatattttgatctcataggttagggaattagtttaaaataaattctcaaaagataggaaaaacctgttcttttcaaattattttcagtctcactataacttattgaaagataaaattatgtttcaaataacaaattgcacacttaccagaatcttatgtcttttaatatttttttggctaatttcagctgccatcaatgcttcctttattccaaacataaggatgatttaaaaaaaaaaaaaagcagaaaaggagggagggaaaatgggagaaggtgggagagaaagatattgaggttataaacactatagttattatggtttagcattctgcactacacgaataaagctccattttcccatggcttttgcttgaagcattggaattgttaatgctatggttgaatgaacctcactgaattcaaactcaaaggcagtcaaccaaaatgaagacttctcccacttccatttgaattcatttcctcattaggacaatggaatcacatttcagacacaaatcaaaatacaacaaagtctcctagtctccatacaaaaaaaggcagctgtcttctagatctttatgacatattgataaaggagcattttcccttatgtttcaataaaaaagtgaactatacgcatgtttatgtatatctaaaattaagtctttgaaaaatctctgattttgtttttattttggaaagtttacaaatactactttaacataaatatttaaaacatacaattatttctttgagaaactactggatttaaagtaacatggtaattactgggttatgaactaggtatcgatacctggactttaaatagtttataaatgaaaaaaaaaatttttttccaaatcctttcagatggtgacaaacttagtacaacaaatacgtagactatttgttgtggatgttgttttaaattagtatataagcccatctaagaacgtaactttgtagctattaaagttgaaaaatggtttttttctttttttttaagcgatattgggcattatctattcaaattaatctaagccaaacctcaatgaagtggacaacatcattctatccaaactgatagttcaaaccatcctaagtgagtaaaaatgtgataagtataaaataaacgatttcattaaatctaaatagacacttctgaaatactatctctaatttctttgaacaaaatcaaaaaatgaaacttccaacagtctagatctaactcacctcctccctccactcccaactcctcccccacttaacaggaaagccagtcaatccattgcaatcttttggttccctaatttctgaagggggtactagaaagttattaacttcctacatatttttggcttgggaaactctactttgactacataaaagatttattacaaaaacattttatcttctctctctatgctgtagatgagtcaatactttcaaagaagtaaaatcaagggtacttcatatttcttcttttcaaggagccagtcaatgtgatcatcttggtctcgttccttggccactacaacatctctcggactcacgatgtaaaaaagtgattccccttcagagtattctgtaggtgagaaaagagaggaacgacttggtgactgaacagcagaaaacttggcaatggtttcagaggacctggttaggttacccaacccaagagcgaacagaaaatgtgtctatctttgttgtgtgtttggctctgctggaaggtaagtgtgggagacagggtaaagaatgacagaagcgtatttcagtgcttttaaaaatatttaagtgtaaaaatacttgaccaaaaagcaagagagggaaggagaaggacagaaagggagggaatgacatactaaaaaacttgaaaaaaaaataaggtgagtttaaaattctacgtttaatacatcaacactctgacttcagctgaaaaagtgttaaaaattctctatgtctactgcatattagaattcatctactgtatataaattttatttgtggccatttacagcattgttctacttttacagaacaattacaccccatggtcagcgataaatgtttcctcctcatcaaggtcaaggccacctaaggcataaatgacagatgcccaagccctagggacataatctatcatttcagcatgttgtgcacaatgccaatctgagggtttcctgcagaattcaattataaaacctgttctgaagggtttctaagtgtgcaggagagtttgctctgagccaaatacctagattggacacttttcagttgtgaatcacagttgctttttgccaagtctagaatatactcttatgtttttcaatggattagggtcttcatataagaaagtttaaacatatatagaatatttcttcatttcctttggccacaatgagaactgaaaatattctcaacaaatgtcaattgtgtttaaagtagtacagcattcctacaaagctgaactgttctattttcattaatatattttacaagggtatgataacagccaaacacagatgtctctggtatgactaaatattaatggttctccctgtatttatgagcagtgactaagtgtatttctccgtccactcaacaaatattcactgaacacctaaaatgtgccagaagtctttcaggctctgagcactcagttacaaacaagaaagacaacttctctgccaccccagagcgaactttcctgacacataaaatgggagtgatatgacaaccatggagccatgcagcttgacattaaattatgtgtcacattaaatagttaggacaatagaaaaaatacaagaacaaaaaacaaggggcccaatcctcccccgggtcctggtctgaactctagccttcccttttactataggagcttatgcaagttttgcaacatctctgcatccaaatgtccttgttttcagcacacacagtctacgcaggtattctcttaagattctttcagcaccttaatttaaattccatttattgcaagtaggaagggggagaaaaaaacattaaaaaagcatatcagccagatctttcatatctcctacctaaatgataatctctacattcattctcctgaaagcctctgactgtcaaagcatcagaagagatctcttcacaagtctcagaaagtggctggatgatgtccagtctaggcctggcacagtattctctttcctagtgggggaaaagagagaaacattaatttaaattacatttctatatatcatacaaattaattctagttagccatacatattagtttcttctcacactcctatgaagaaatacccaagactgggtaatttataaaggaaagaggtttaactgactcacagttctgcatggtgggaaaggcctcaggaaacttacaatcagaaaacattccaaaaataaaatagcaactataaaagatcaactagtgaagaaaaatctatcagatctgtggagaaattacaaattgctaaactttgaaacaactgaaaaaaaatggagaaaactgaaatatatttaaaaattgaccactgtaacaataaaaatatcaaaatcagaatagcaaaataaaaaaatattttgaacaaaataaaaagaaaatcacttcactagaccatagaaaaggctcttttatatgtataagaaaagcatcagcaatgtgaatctcattttatactttcgttccctggccaaacagcccttgcctgtgaactccctaagagcagaaatctggttttgttgatcttggatctccagtgcccagcacaatttctaacacacatgtgctttatcaatgaatgaaagaaaagtaaaatactaggagaacaccttaataaattaaagtgtaccaagcagatggaatagtacacaaccactaaacacaatgatggtggcaagtacacagacatacgcagggaaaatggaataatgcccatgaaaacagggcaatgcagagtagcatgtgactatccctgcaactatgtgaaaacatgcatgtacgtgaaaggtatcacgtggatatctgggggctatttgggggataatactgaatgatataaaacaaattgtattcaatgtcgctaaaccaccttttcagtatgaaaaaataaagggggaagggagcttacctctttgttccttttgccttaattttatgagtttattctgtgtttaaggatttaaggtgtactttaatgttctataaaatgagtatctacatacactggcataaacatgttccagtcatctccaaaaccctcgcttcttcttctggaaaaagtccattttctacgtgctctatgaggttggcctatctttggcatttattcccttcaaatactcttttattaacaaaggtttcctttctttctttgctcagttgtttattaggcttctcctttttcgttttactgcttctttatttcttccaatcacattctcaatctttcctgcattcctcctcaaaaagcattctatttactcccccaggagccactgcttttattttcaaaaaataaataaaataatagcaaactgatgtcctgcaatagggctagaagccaaccctattgattttagtaggtctgagtgttcacttaagtctatagcatttcattgcctagcaacatgggcacccagagcttcaggttactatagtgatggcttcctaatgcaagtgcttgctcagagaaacgctcaagagcagctaccacttcaaaaccagggctcccagggtttttctcccccattttatttcttgccatttaaaaaaaaaaaaaggatacaaacaaggatagtccacttgcctacttactgtaaaggactagagaatcaattacaatttcttctatatacagcatccaaaagaaaatcctttacagtatgctttccttctttatgccttgaagccacccctattcttgtgctggcaggacccctggactctcataataaagacaagctgggaatggggccgtcctcagcttcaaagggagactgggtgtggatacccatccactgggcaatatataagcttcttccaaagacacgcacaacaaaatttagatcatctgctgctttttattagccacagattttgatgtaccattatttgcactgataactgagatttcacaacaatccatttcaaagccataatcaagctacttagaatcaccagcccactaggaagtaaacaaatatgtctggaccaaagaaaataatgaaatgccctttctgtaattccctctgaccacagggacccctgttgttgctgctgatcaagttcattgctgtcatttctgctaatgcacagtgtcagcttagtttcttcccctttcagcaagaggaatccttcattccttttgactaatataccaagagaggtcgaaaaaaaagactcttttttggctcagcaataggaacaaaggcaggcaatgagtagagtttccggaaagtaaatatgtcaggtctaaagggtaatctctgccaaccttattttataggtcagaaagttctgctcagattatagcgtatgctactgatgaacaacctgatctgggtgtaatgctaaaagtgaacccccacatgcctttgtatctggggagaaaataattaccgttttttctgaaatctcctttacatacgaaagtacaacaagctgatcacagagaggtgcaagtccactgatgtagaattcagtttcaaactgagacactgcaaacaaaagggatacaggagtcatcatcaacaggggcaaacagcagcacacatctggaggaacacaatgactgtgaatgctagtggacccctttttaaaagctaacgtaaaggggacaccgttgaacatactttcataactcagcactgcaagtgcttcacaacgatcaatcctggaaacgaatatgtgggaaagtagacttgcaaattcccatcacaaacaaaaatgaatccaacaataatagcagcatgaatggtcaagggtgacactgtgcttaggtagtttaaaatgacatagactacatgaagatgctttgaaacccataaaaagaaatataaaccattattagtaacagtaataattttttaaaattcctgagttcgtttttctcaattggggcattatagtagtacaaaggtcacaaagaatgttatctgtaattatgaaacactattttggagaagagggatattatttaaagaacttgaagttaaaaaaagatgcataaatacagattactttatgatgaaacatcagtatttcttaagtgaaataaaggctagagaaaaataataaatttctctttcctttaaaaaaaaatccatttaaaatcaagaagacatattgcatcacttaagaagtatgtgactttaattgcactggaccccaaagatctgacagaaagctcagaagtacacatattattattatatgattctaattattagctgctataaaatataaaagatcattgttttaagagactgagattgggagtggcttgtttcagagcagaagctaactgatacagtagtggtattacagagatccttccagaaatcatactctacacttcacagattcatttgggagtaaactcttgttctgacccaccacattttctaagtttcttcattcagatcatctccacggttctgtggtattagctgcagatttagttaacttccacactcttttcccaatgaggggacctcaatgtatcatactggaaccaatactgaatgctgagtaaggaaatttgggttataacttccactaaattgaacttgaacaagtcattttaacatttcccaactataagagaaaggaatgacagtagaaataaaattcataatacagatgaaatactgaattttcctttgtccccctctttctttcccttgcagattacttagtgttccttgtctctgctgacctttaatgatcctccttacgcagctgttatcacaatttaattttcgcaccaaaataaaattgtggatgaccaaaaagatgtaatagttagcaacataaacttataaaaagataatatttcatctgctttgtcctcaattaaagtaccatacaatggaagtccaagggcaagtgctctggtcccagttctgccaggaacacattttttccttaatctctgtgggcttgaaccaaatgtgtttatccagatacttaagaatagttttggtaaagtggtaattgtgataaatgttcacaaaagagcttatatggagaaccacctcaacctccaccacatgtgcagagacagtgtttctagcgtaaccaggctgcggaaggttctagagaagctcacagtgctgtgcatgcacgtgggcggtgaagcagggagcaggggagagccggaatgtacagatgatattaaacagtatggggccacaaaggacccagtgatgaaagagatggcagtttcacattttagaagacatattaacaagaggttttggttgtcatcactcctgaggttactaatctctgactggtagaaatggacttgcattctgttttactaaatcacattccatttttgaaatgctacacatacagttcccttaccagcaacttgggtgaagagcagagaatcagagattctcacagaaatcacaggctttgctgtgcttgtctgccacagacacctaagggaaaacgtctcctaatcacaaaagaaggggtgggagaaggaggtattctccccacttgggatgccaaataggctgcctagtctcactgacagacactgtcagtgtttctcctaaaggtaaccaaatatacatcaaaggccttggttcttgagaatgagctccaagatacagaacagagaaactacgaaataatcctacccaaatctttcctcctctacatgccaactccccagtccacaatagcttgtatgagtaagacagaaaatttcctgttctctaattaagaacatgatagaaactccaatgtgttctaaaacaaaacaaagaaaaattgcaggtgcacatatctatttcacttctcaattccagatgttgtaataaacgcttacttgttaagtactaaaccttgccaaattttgctaattgagaattaataatttggacacggactatatgcagtggctaaatcacaagctgacaaaaatgttattcataaagaaaagatgtggtacatgaaaataatattgtcaagacttccagacgcacaggtaagcaagtaatcaacatttggataaaactgaaactaaattatgtctttctttttgttaaagtaattcccttataccaacaaaaatctcttatagaaaacaaaattgcaattatagtaatactcagcatgattctcaaattaagaattccaaaataatggccatttatctggtttcgagtactctcccactcagcaattcatctccattaatacccactggtaatgatatcatgcaaaaaagaactcacttctaatgtgagttgctgatttagggaaatgtctgcagccattctgccacaaagtaagacattttagaataaatggtggtgtcttgtttttccattagtctttactaatgcagcgaaacataattgcttttagatttaacaagattctgtttatcttttatagcgatgctgagtcccagaagggctggctgcagacagtggtgtcaaaatgaacatgaaggtataaggaatattcttcatatagatttagagaaagaaatgttgaatgacaatatatattcttgtaaaaaatgcacataaaatatataaaagcttatggactgactttgtaaaatatattcaagtaattacagactttatatttcaaattttcagtggacgaatggaagtttcagtttatttactttcactaaaattctattctattccacgtaaaaatgactctattaatttaaataaaatattttgttctcctaaaggagactcagtttgaatacaggtggctgtcagttctaatactacagaagctcattttcaacctgattatctggaaaagataaatcacaaagaaaataaacataaattctgctagagaggaaatacatgaaaacagggagcaaaagctggacagggtgtttttttttttggtttttgtttttttttttttggagtgaaaaatgcaggcagagttcctaaaggtagccacaaaagacagtggctttacttcagatcaaggtcatctagaaagccagctgaggctcagctcgcgggccctgcagggagtgcgctatgttcacctagatgatggccttatactatggtgggcattacagctgaggcacagccttcctcctcctgatggaggtggaaggacttctgcattctgctttattcaggaggataaaagcattcctagacatgctagaaataactcaagaaaaaagacagagattctagcagagtaagaaagagaggttcaaaaggactatattcacaggaaaattctattcagcaaggtcttctagatccagaatgaggatgagatgaatacgattctgtacacggtcctcatccaaaagggaggctagaggccccttgattagctgccccatggaaatataatgtgggccaaaacacaaatgacatatgtaatttaaaatttcccagtagccacgtgctatagcttggatgtgtggccctgcccaaatctcatgttgaactgtaatccccagtgttggacgaggggcctggtgggaaatgattagatcatgggaacggatttctcatgaatggtcatttctcatgactgttttagcacaatcctcttggtactgtcctcacgacagtgagttctcacaagatctggtggtttagaagtgtgtggcatctacccctgcctcttgctcctgccctggccatgtgaggtgccttctcccacttcgtcttccaccatgatttaagtttcctgaggcctccccagaagccaaccagatgccagcatcatgcttactgtatagcctgcaggactgtgagaattaaacctcttttctttataaattatccagtctcaggaatttctttataggaatgcaagaatggactacaccacgataaagagttcaaaaaaagaggtgaaattttaataatacataacatacctaaaatattatttcaacatgtaataatataaaaagtgattaatgagatattttaccttttatttctagactgtctttggaattctgtatgtagcacaaatcaatccacactagccataccacaaagacttaacagctacagtggctaatggttatcacatttgacagtgcaggtctagatgcccaagtttttcgctttaaagtccaataatttcattagaacatatcttggtgttgctcattatgggtcactattttcggatacacagtgtgctattttaatttataatttcaacttctgtttctctgcattttcatgaaatttttcttgacattgtctatagtatttgtcccattctctagttttattttttcctcagggactctttattggtagactgaattatctttgcctgtcttcagtatttatcacttaaccttaatctttttgttcttattgctttgtgatttttacaattttcctcctgctccccttctattcctcttaccaacattatctttgcatctatttgttcttgtcttccttcaggttcagtcttcaattctgaaatgagcttttatttattaattcttcctgaagcctgtcacctaatttgagattttcaaattctgatttcttacatcactttttaaagatgtcttatagctcctctgaaactggaaattacagttgtaatctattgcgtaggtgtgtctttctggtatgtctgcttcttactcactttttcttaaaacttattatggatttaacgttgcttgctttttaggtgaaatgaccattattgaactcttagagctccctcttctgctgtttccatttgatatgaaaaatatggcagattgctttctgagatttcctggctcagctcctccctggtgttatctggacctgtttcttttgtttctattgtccctgtctcattcaggctttattctgctcccagcagtgtctcctcagtggagagaggaggcctggctgctccacagtgtgagttgccaggggtagctgggctgcccagcctctcacacctaactgcaggtcctgggcccagttctcagagcagcctcttggcctttccagtgaatgccaactggctatcttggagttcccctggcctcaagtctgctagatgaccacttgctcccctctgctttctctcacacagatgctgatatcaccctgcagcgatcagtgttttattttcccattaatttgtgtcttggggctctcaggactacctttgtcactaagttttgttgtaaatgttgtctgtgggtttttggttttgtgacctagttgttctgcttttatgggaggactaggtagtttgaaaaattatgctgccactgccactacattcccagaatcttctaaccacaaaattttcacatattgctgttatacatgttttaatacatcaaccttacattgcccagggcaatggggtcagggttagagtcacaaatagatcaacagtgtctggccctcgatagcatacacaccatcagttgcataatgaatgccatatgattggtataaaaattaacaagaaagaactttctcattccttgggtctcataatctctgagggttacaacttaagtcaatgaagagtgactgaggctgggtgcggtggctcacgcctttaatcacagcaatttgggaggccgaggtggacggatcacttgaggtcaggagttcgagaccagcctggccaccatggtaaaaccccgcctctattaaacatataaaaattagctggcagtggtgacaacgtgcctgtagccccagctacttgggaggctgaggcaggagaatcgcttgaacccgcgagcacccaggaggcagaggctgtagtaagctgagatcctgccactgcacaccagcctgggtgatagagcgagactctgcctcaaaaaaaaagaaaaaagagtaactgagtatcaattacacgagacagtcttctagatgcatcaagatgactaagacctgaccctaacttaaaggagattgtgagtctgaatatttaaagaaataattaggccaggtgtggtggctcacgcttgtaatcccagcactttgggaggccaaggcaggtggatcacaaggtcaggagctcaagaccagcctggccaagaaggtgaaaccccatctctactaaaaatacaaaaattagccaagcgtggtggcaggcgcctgtaatcccagctacttgggaggctgaggcagagaattgcttgaacctgggaggcagcgattacagtgagccgagattgtgccactgtactccagcctaggcaacagagcgaaactctgtctcaaaaaaaaaaagagataattaaaataccacatgctatgtgcaaaaacaggaacaggtgtaaaacaaaaaatagcacagcgcaagaaaatttagcttctgaggaggtacagatgagggtggaaacagcagcaataatcatgaccataagccccttaagccagaaatggtgtggataacatgagagaaaacaacctcttcgtttcatttaaaaaaaaaactgtttaaaaccctaatggatattagattacaaaggataaaaatcaaaatttgtttaaagtaaaaaaccatcctccaataattcccaactaggttatctcacttcttatctgtgtattcaaacctatgagacaacattaaatcaatatttttattacttgtacctctgtcatatatgtttatagatacattttattgagaaatgcaattataaaacattatcaatctcctcggaatcattcagtaaacccttatttacatcttccccaaattgtctttaaattacaaattttataaaacacaattttcagatcttctgattttaaaagaaaccactatttttctctctcactgtaactaaatataatactaatattaataatagctcccatttaatgaacattactatgctgtgaggcagtatgctaaatatttacatacaatattgcttttcaccacaaccaccctatggttattttagagagggaaggaggctcagaggggttaagtaacttgactaaagtcacttaagtggaagataagagaagtaggaatctgaagtcctatttttcccaaccataagtcactctagaaaatgtaagtcagggccgggtatggtggctcacgcctgtaatcccagcatgttgggaggccaaggtgggaggatttcttgagcccagtttgataccagcatgggcaacaaaaggagaccacatctttacaaaaaattaaaaaattagccaggcatggtggtgcacgcctgtagtcccagctacttagaaggctgaggtgggaggatcgctttggcccaggaggctgaggttgcagtaaggcgtgattatgccactgcactaaagcctgggcaaagagcaagaccctatatcgaaagaaggagggggggagttagggggaaggaggaggggaaggggaagaatataagaatacagagatgcttagattcaaagcacactgcagttggcaagaacagaagtgagggctctctggtgattctgctgcatgcagtcagggtgccccagcccctctcttgaatttgcagtgctgctgcaagggctaaagcgctgcagtacacagaacttgcactgcctcttttcccccatttcttattcccttattggtccccaaatgtccattagctaaatgctacccagatttctttattgaagttaaataaggtgacatcccatagatcttagcttctatgattcttaaagaaacaaacaaaaatgtgtgtcaagcaatttacaaataagaacaattacccttcattgtcttatattcatttatgaaaatgcattgagggccctttatgatagatagtgtcttattcccaagagattctggccccttagtcaccagatattagtattttataatcaactggatgtaatacccacagacttttcaataagtttagacattctgtcagcatgaccacttatcactgaaaatacatttggaaataacggcacttcaacagcttcaggctgtgctaagaagcagacacattaaagtaaaactgacttcacaatgctttacatcagcaaattatggagaagatctgctacatgaagtgaaattgaaaagaatggctaatggacaaaataacaaaaacattcaaatcagacaggagccgaacagtacacacagataaaaaactgctgaaaacaaatttagtttgcaatttaattccgtattttataatcaatattcagcaaactattgtcaattaaatgacaacactaagctgataggattatctcatctaccaaattttagtctcctgaaacagcactgatgaggaatatttagtgagtatgttacagcacattgcttagacaaaagaaaaggaaaggcattgccaatgacctgctaatcacaaggttcaaaccaaatgttacactttattttataaatataaaactaccttgttgcatcaactaaacttaagctaaacactaaaaaatagcaaacaagggcttttcttctttttaaaagggctgaaagaagcataatctaagtttggttccctttccttagaaacaattccaaaggtcacccaaggcaatcaggttctataaattatctaaaaatgtggaggagaagcaatgaagaaaagctctcaatctcaggataaagcaagtgaaaatataatttctaagtctccaaatgagatatttctctgaaccaaaataaaaaaacaaatctactgcatttccatttcatctggcagttcctagaaaaggtgagcagctatcatcactgatatagaaaaagggtcttcagattctagagcatttctgcagtggtctgtatctgaatgtctggaacaagactctgtaaacaaaggccaggggctgggtagaggaaacatgggaagcactgtgtgacaccatgattacaagcaacaactttacggctaggcacacctaagtgcaaaaactgccttgtttatgaataatcttgagcaggttacctaacccttctgaacatcagcttcttcacttacaccatggggatagtagccgctacccactcgcatactgggaagattagatgaccttctgtttgcaatgtattcagcactgtgcttggtggtggttgttatataaggaacaatatatatttgttacttcaggtgcttcagatttcttaccattacttattatggagaaacttcattaattccactcctaacaacaaaaacctgagtctacactactgagcggggaaagagttgttacatccctcccaaaaggaggaatgaatagatgaacagatacgtaataaagcaaatatagtaaaatcttaactgcagaatcctggaggttctattcactacaaagttcttttctttaatgaaaatttcataacaaaatgttagaaaaaaaattcaatgcagaacagattattacagaaatttatactgaactatctataacagaacagaaaaccatacatacctagatcctcaagtaaaaacaccttgaagaatgccagctgtcatcatttctattgagactcagactaagagatgaaaccacatcactcctgggcacacacacacaaagatcccactactgtaacccatatagctgaatcaaaatggtaacaggtggataaagagagatacttagatctaggaaagaattatctcacaactctcctccactatgaaaacagatcaccaattttcaggtcactgttttttcagtcaattaaaagactgaaaaaagaatgatgtgctaaattctaagaccacagtatatgatcaatgaagatacagacaatactgaaagtaaaaaagatttcccttcttttctcttccctttcttcctgacttgtcattctatatagattctcatatagttgtttaatctcaattaaacaaaattccacatgaaattaagaccaagaagtcaatcattaattccttgcatgtaagtcaactacccctggcagaaaactcccagaaaatgacacacaaacattggtttcatttcccaacatcatgatgtcagctctccaactaccataccacagagatcatggaagactttggtgaaaagtaccagaggctcagggagtcctgtgagaatacaagagatgcaagtgaagttaaaacatggatgctaggcacaaaccataatctatttttaacaatgcaatttgaaagaaaatatgatgtcccaaaagccctatgtatagagaatctcttcatgtgttggtgattggccaagaagcttaatcttcattatattattattatttttcatttaacagaataaatcaacagcctatgtgataggaataactttcgtgctatttttgagagtctgagttgtaacagaaagagttataaacaattggcttctaagaaatgtacagccatacgtatttctttaatcttaatgccattttcacctcatttaccaaagaacagtggctcacactattcagggctaaaggaaattgtaatccagacctcctaatatttccctttctgttatcctacttaaggactcttatccaaactattttgcctcctgctgtggaaatggcttatattcttaaaggtttactcttaagaggggaaaaaatggtacttaaccattaaccatagtagtaaaatgtcagtaatgtgatactgttagtatccacatatggtctatttcacgtaaattacagtacagatgaaccacactgcaataatgtgatcccagggttctaggctaatagggccaccactgagccagctatcagcagtcacagagttgggatgaaagtctgcatagtgataataaccatcatggtttagtgagcatctactgtgtgccaagtaccatgttaggcacatttcttatgccatgtctaattcccacacccatcctaaaagatagatattatcacctccatttaacaggtgagaaaaggatggtcaagaaggttaagtaacctcatcaagatcacacacttcagcaaacttccttgcctccctggaagctttctggtggttctgtagagttagattctatccatttttaacgctatagtagtaagatcctggacaagtcatttacctcctaagcctcaatttcttcatctatagaataaaaagcaaactacctgcacttaaagagttcctgtgaggataaagtgagttactgcagtttatgtaagcagcacaatgccctccacctagtacatgatcaataagtatcagctaaggaaagaagatgacaattgctacatttttatacctctctggcaattaaaaatatccaaatactaatctctcaggacattgcattgagatgttgagaggcttttgtttttctttttattttctagtaggcaaggaaagaagaaaaagatattgaaacaattatctatatagtctagtcataaatcttgtctcttatcttggtcctcagtttttctcagcactgctacattcttcatatacctactgtccatacactaagcaatctgaactatgtagttatactcctaaagttaaaaaaaaagattaaaactctaccaccaacttctgacttcaagtacaaaatagcccagatttaaatgttataaccacattagtcatgtgggtaatgtatgtctttctatttacagaaatacaatcatgtgcaaataatttatttcaacttcaccttggcagaataacccatcaaattgatattacccatccaccaagcaaatgggcaaatgaacttttcagctgactcataatatggcaattttttttctcagattaattttttcaaactaaattataaaagtcatggtacatcatccagggcatacttctcctgaacagctgtttcccagagtcactgattcattcaactcaatattaagcaccttctatgtgcaagtattgtgccaggtcctcaagatacaaatggtgagcaaaaacagaccctgtgtgtgctcaaaaggaggtgacagtcaggtagaaaagacagaaatgtatcaaataatcacaggatcactggaacccgtgacaagtgctagaaaggggaggaggcctgcagtgctgtagtgcctaaaatgggaagacctgactcagtcagggaggtccagtggctttcccagtgctttccctggaaagcaacactctagccaaatactgtgctagacaaggggaaagagaggcatggacaggtaaaaggtcagtgtggctgcagcacagagaccaaggagaagcttggcataagctacagctggagaggtgggtaggggccaacacagatccccgtgatccactgaggagttccatctgcactctgagaacgatgtggaggaactgaaggatgatgacaagatctgatctgtattttgacagcagtggggacagcagatgacagtaattcacagtggaagaagataaaccagttaggaggctgctgcagggatccaggcaaaagactatggcagtctgggtgagattaatgaagacgaaaattttgaatgaagttttacatccacagaaggcaagtgttggagccatacctatttcaacatatcgacttggcaaatccctcatttcactggcatgccgttccttcactgagcacacctggaaaataagttcgcaggttattttattcatttgatggaaaattcttcataacattttattcagtatatggtatctttgttaaattaaccttgtagcactgcagatggagtacaatctaccctatgacttaaatgacagaaattaatgtaaatgacatatagcaatcactatttatattcaccaactttattcctcaataaagcctgattcacataagttcagctttcctggtgagactgaacctgaagtcaagtactaatccaagtacaacttctgtcagtgatcagggatttttcctttttcttttacatagtgttcttttatagctgctaccattaactgtaactatggtatggaaaattctaaaatatagaaaaactcaaaggggaaaacaagcattagtcattgttccagcacaaagagaacaccattaataatcttttttatgaaagctacttttattaacctaacaatttaatacaagtaattcaatatgttatttaaagattcttctacaacataattctgtaaagttgttataatacagtgagccctccatatccatgggttttgcatccatgaattctacattcatggatttaaccaaacaaggatcagaaatattcaggaaaaaaaaaaattctacaaaattccaaaaagcaaaacttgaccttgctgtacaccaactacttcattaagtctatgcaaatgcagtgatgtgtaggcattgtatcaggtgttataagtaatctacagatgatttaaagtatacaggaggatgtgcataggttatatgcaaataccgcatcattttatatatgcaaatgttacatcatttatataagcatcagaggagcccaggatccacaggggtcctggaaccaattccccacaggcactgagggatgattgccttttattacatgaatgtactatacttaatcaaccccctttgggggcatatttttttgtttttatatctattgtaagcaatagtgcaatcaacatacttatatataaaactttaggacttttgtttacttaggataaattcctagaagtagaattgataccaatgggtacataaacttttgtaaggttttgttttttaatatacgtagtatactgagttgctgcccagcaacactgcagcgactcagtgaatgcagagtgcccactttccctcaggcggggcttgaacccatggctgcagaggtagaagcctccacatagaagtgaccggctgtcttcttccttgattgctttttgccatttgtctcttgtccgtttcatataactgcctgtccacttctccaattttcttcccttctggtagacttttgagcttataagttatccactcttcttcccacacttactagggaaactactaaatcatctaatggcacattccacaatgccaaatggacaactgttttaatgtgctgatataagtacatgaggaacagtctttcaaatggtttgaagtataataaaaaagcaaatgtatcggcaatattagtgaacacttttttgggcagttactggcagtgctcctgagttaaggcctttgtgaaatagatatcattattttcttaagattatggtgcagtgggggagacacaaaaataaggcactttactgaagtgtgacagggaagtacagagcaggggcatctcctgctagggcaggaagacttcctggaagaagtgacatgtaagttgaagcaggagagacaacacaggagaacacggtgatatgacagcatagggccttcaactggaagctcaatcggacagaaatgaagggcatgggggaagaaggggacagagttgaggctggagagtaacggagaggcagatcacaaagaaccttggaagtcatgtttatgatcagttatcctatgggcaaggaggggactgacctcatctgacctgcacttagattattctagctatactgtttaggataggtttagggggggtaaaaccagcaccaaaaagacttgacaggaagatgaagtgcagagatttgagagacattgacagaacttgagggctgacagtcttccaacactcagacacccctgaaagacaatgttattatgtttaatccagagatgaggacactgaggctctgtgagtgatgccagactgcctggccagagctggaattcacaccaaggcctgactggtatctcgctggtcatgccacagcttgagaacaaggatgcattgcactactggtagctgggcatggctctactgcactcctcagctctgtggtctgggctcacccagcacctgtctcataggtaggaagtggcaggtaaaggtgggtgaataggtaagtgctaccttaagctcatgtcttgcataagcacaaatcaatgactgtaagagccctttaccactgataggtgggttcttgcccatgaactctaatctgcttcctccacttctccacatgggtggataacaggcatctctcaagtagacacacctaaaaccaactcttgcctttttcactctaaacatgctttatcaacagtctttcccatttcagcaaaaggtagtttcaccttccagtatgttaggtgactgtgatcttacaccccacatccaactgtcaacaaatactgcagagtctaccatcaaaatatatccaggatctggtcatttctcaccagctgcattacactgacctgagacaacattattttttatggagatgactgcggtagcctaattggtctcccctcttgactgcccctttgccgtttagctccacacagcaaccagagatccttccaaaatacaagttagatcacttaactgactccacaacagctcaaagccctgtgctggcttcctacctcagtcaaattaaaagccaaagacttctcaagggcccctgggctccaacatcacctgctcctccaccacaccctccccgacccccacttacatccctctcctccacatctgctccactcactctgacacaaacagcttccttgctgttcctcaaaagcacaccaatcacactcctgcttcaagaatttttgcactcctgctccttctgctaacacctcctaccccaggcccccatagagctgtataacttttctctccagatctctgaccaaacaacatattagttattggacaggccatccctggaccaccctatattaaatggtacctaccccaatcccttttcctattatcctgttaaaatgttctcctttttatttgccaccttcaacatgctatacttacttgtttttgtccaccttcctcactagaacataaatttcccaagggaaggaactcattcatttgtatatttgtgttctgcaacactagaacactgcctggcacactgcaggcacctggtaaacgtttgttgggcaaatgaatgaatgaagtaaatggtaaggtccaattgcacactttattttactgtttctggttgcttctccccaacaagattgctgtccctctgaagaaagaccacgtccttatctcctcttccttcaacagaactcactaagagtctacactgagaagtgctcaacatatagaactgagtttgaagaaaaggaacctccaataaaatgaaatatttgacataaaaattgtatagaagctggatcttaacttgggcataaagaaagggtatatgtttcccatggctgctataacagactgccacacttggtggtttaaaacaacagagatgttgttttaaacatctgttacagttccgcaggctacaagtctgaaattgggttcactgggctaaaatcaaggtgttggcaaggctgtacttcctctggaggctctaggggacaatctgctgtctcctccagctttctggtggctgccaccattcactgaccacctcactccaatttctgcctccacagtggtactgccttctcctcctctcttccatgttagcatctccctctgcctccctctcataaagataaacgtgattgcatttagggcccacccagataatgtaggttaattccccatctcaagatccttaacttaatcatatcttttgctaaataaagtaatatttacctttttgtcatataaagaaacatttataggttctaggaattagggcttgctatccttggggccattattcagcataccagagaaagaatttctgggagtaatgagtaaacttgttacatatttctacaggctaattttccttgtctttcaccataagaaaagaaaatcagaactttaaaactaacaagcaacctggtccatttaagggatttttaaaatactaagaatataaatttattggatgagtaaccacacacgtgggacagggagcccagggaatccctttttccatcctacgatataggcacagtttccttcctgttaccctaaatataaatcaggttgtgttcatgtaacacatgaagaaaaaagaacctgaatgataacaacatgagggctgggagggcctgaagtgtaacaatgtttgttttgctaataacaatcattacattaataattttccactttccctttccagagaagagtacattttaaatagccacgtccccttcatgacattgctagaactttatataataatgacagctaacatttattaagcaattacatcagattctatgcaaaactctttacatgcattggctcatttatttctccccaaaacttgtgatgtgagaacaattagcactaccactttgcagatgaggacagtaaggctcacagaggatcccaaaggaaaatggagaagctggacttgatcccaggtctgtctggcctcaaagcctgagctcttccatgagactactgctgggatactctctcatgccatttttatacttccactaatttttagtttattttgttcgaattaagctgtctattttttaaagggaaacaacttttggctctgaagtatctaatataacagaagcactagtaggcataaaataaatgtgaatgagctttgggccccctttcacagaacagctaaatttcatttacccaggcgcataagggtcagataattaaacttcagaaaatatgcccaaatcttattattgatgataagtctgggtctctactctatcaaattattaccaagcagcaggatgatttaattttaaccttctctctccactatcaataactctaatgaagaagtgaagggtcaaagctaagggaaaatgaaaagaataataaagagaagaaaacctgactaaacaacaaaactaaccccatgttctgtaaatagctaaggccagctgggatgtgagaaattaaaagaagattgaaaaagacagcaccattctcaacacgaaaaagttcacaaatagttttacatgccatggaaaagaaagaatacatcttaaaacttatgcacaggaaataatttgagcattaaatggtaatcacgtcacaataacatccaagtgaaaagatttgggtcctagaagccaatcaagactcacagtcctttggaccaccctcagtggatctataacaacacggacttattataaagacaagcaaaaccaccttgacagaagtcccccagccaataatcagtgtcacattgtccttccagcagaggctgcagggatacatgtctgggcgaagacttatatcatcccggggcacattggtgattctttgctttgagatgatgtcaaaaatcttcacaccctggaaaataatacagcagtaagcatcctctactcaggaggaaagtaacagaaaacttattaacagcccctgctacatactaccaataaccagcacggagaaatattagcagtgtttactgagcatgcaaggaaaatgctcctgctccacacaaaccctgtgggaactaaaaccacaaggaaacctccacccttctttctggacaaaggagattttcttagatggcatgggtgactcaaacccaacagaaacatgaaatgtacaaacatcaatagctgcatttccaaactgacagacaagtaacatttctaattttatcgttccaccatgaaaaatgaagtttgttttttagaaaggctttgagtctgaaaagccacctatataaagaaaactacatctgacattttaaagttctcaaatgaaaacatcaggcaagcagctaactaaaaatgaaccaagagaccacagctttgttttaccttcatcgtgacccaggagaagtaagaaaagtccagaataaaaaggtagagtctaggcagatttctaccatttaaaactgaatagaaccgatttactaaattataccttgatgtttcaaaagatatgccagatgtcaaaaagaccatttttaaaacttcctactagccccaattcatagcaagtaaactttaagttaaaatgcagcactgaaaattacgatccactttcttacagacaggtctatacttctgtctatgattatactgggagtaaaagagaaatcagcaatattctgcacttgtttcatatcaactcttacttgcctttggccaacaggcaaatgatattttcaagacccattcccaatgcagtccttcaattattaagatagcttttcattttcttggctactctccatgcctcaggtttcttactctaaaatagattccagaatatgttgggaattactatattatgaaagccaaaagcaatctaatttctttaacctcctaggtatgataccaatcgtccttacaccctttagaaatcaccaccacagcaagtggcatcttttcccttcattacagccctatcaagttggccattcttctgccactgaacaagcattaggaagacagaggcatattttttaccatattattggcccaagcaatcagatggcctctccacttcacactccttatgttcccttccccttcatgcagaacagcagacttccatctgttcatccaagaccgttcaaacagtagcagctagggacaaaaagcataaacaaagaatcttagaaactgaaaataatgtatcaggttctttacttactagttttacctatcctcgtgaccaaataacaaacaagtcactctcgacgtctttaatgtagacttacagtagtatgttatttgtaccttggaaagaattcctagcacatcatattctccccaggaagttgtttaaaatggatgagtgttgaagttactacaaggccaagccacaaggtggcaccaaaacaccaagattcatggaaaataatgcacattagttaatcaaaagatttgtatcgcaaaagttcttcaaatgattgtccgggaactaatttattttgtaaattgggaaatcaaaacctcttttaagtttttcactgaaaataagatattagtcacagattaaactgtaatagaaacagtctatgtttttcatttgactcaaataattgaacaatgacttttgaacagtaattcatgtcacaaaataaaaaaacaattggaattaagcttctttagaaatttcatagtatctagggtctttattttaacgggaagattctatcattcaaaaaacctgctggataaattttaatataaaatataactggtcaaaaacctctacgattaataaagatgtaattctaggaagtcatacattattaagaacacaataaatatttttcttgacatattccatttaaatcctttaagaaaagacatttatacagtatgtaacttaaggcatgcaatcctgaaacacatgtttatcctttcaaagcaaatgctgacaacagattccataacagaattactaaaattcctaccactacaagcaatttcagtctaccttagtatattttatgtcctctacccaccccaaaagaggcaggggaaacaggttaacaggggaaagagagtaaattcacattttatttgtatttcctgtatatctttctcaatagactaatacaggcagaggaagcacaaaataaaatccctaaaattaaatatgatgtccatcatcacaagtaagcaaagtacagttactttaaaatgctacgacagtttgaagttgtgtgacttcacaacttccacagggagactggaggcagggattcttctgaccatacttagccccatcttcccatcagatatattctcagagaccttctaacccaccctgtcctctcctatcccaggttccaattcagaagtcactactaccatgccttcctacccccacagttagaggccttcgggagtgtccccagactgtgattcagcctcttcctcccatttgcagaaaacagagaacagaccccagaaatgtaggaaagggggagaaaggctgagcatacagttcctgctacagagaagattatgccccactaaagacaggcagctaaaaacaattatttttatttatttatttttgagatggagtctcactctgttacccaggctggagtgcagtggcaccatctcagctcactgcaacctccacctcctgggttctagtgattctcctgcttcagcctcccaagtagctgggattacaggcatgcaccaccatgtctggctaatttttgtacttttagtagagacggggtttcaccatgttggccagactggtctcgaactcctgacctcaggtgatccaccggtcttggcctcccgaagtgctgggattacaggtgtgagcaaccacgcctggccacaacaattaaacatgatgaattgataagatcaaaatgtctatcttctatctgtggcctggatctgatggaggtgatcgtccgaaatgggtgaagcacagtgagtgctcaataatcacctgctggaatgaagggttggcaggatggccgggagaacagcagggtgggacacagcatcgaattcctttccctcaccaattcccacctagaaatgaccaatgtagtactaagaggagaacagtctgcacctgtgttgaaaaagttaaatatgctccaaattttaagctaaaaattatgtaaaatatgctaataataagactccagtgaaggccatgatttaactcattcccccagaaaaagcctgcctgggaagtcaggcaggtactagaatgccacaacaccccctacactcagtgtaatggggcaggaacgaaggggagtggccagtcttactctgaaacacaaagggttgggtccccaagcatgtagccagcactgtagctgtcccaggtaggaaggaaagcaggcactctgacaaaaggcaggcacctatggaaaaatcctgcatttaaaagaatacaaattatccagggagtaatccccaacttgtgactccatatgaataacaagacattcaaaaaaaacaaaagaacttaaaagtaaaatctaattcttatcatcataattctcatgtaacaacaaaattaagaaattaataacgaagaatgagagaaagaacaatacaaaacaaaaatggtacaaaaaacattctcaatctttgggtaaaagaggaattcatatggtaaccagagtactttgaaaatgagaaatactataaacctaaactttatgggatacaatcaaagttgtaaaaaaaaggaaaatctagatttaaaagttaataatgaacatgacatgtcgctacacaacaaaacaaaaacatttcattgagggatacgaaaggagaactcaataaacagaaaggcacattattcatggatagtaagactccaattctcactaaagagcttaagtctcattaaattaacctataattttaatgcaagtccaaaaaaatccaaagggattatttctagaaattcaaaaaatgctaaaaattcattttaaaaaatgagagaataacaggaatttttaaaaaattaagtaatttagggggaggaatggattcatccagacagatagtaaaacattttataaaatcaacactcaaaacaatacagcaatgtttctagaattgatagatgaaggaaaaagaatgaactgataaagacgaatcaaaatgatatgatcaggcatgggtatgtggggtggggggtacagtggagtatgtgcagagaaagaggtatcttcaaactactgaactgcggtcttggacaccgtctttctggaggatcatttggcatcatggactcaaagcttttaaaaaaaatgacaccaggaagttgctacctagaaacttacgctaagaaatgatcagacaagttagtaaagatgcatgtagagctatttataacagccagaaatggactaacaactgaggaatgacggagcataatacgatggagcacacacaatgagtatgtatccattattattttatgcatgtatcttcattaacagaaaaagctatgagggcatattaaataaaaaagcagatgacaaaatagtattcaatacaatgtccttaaaataaaatgtgaatgtgtattcacatatattataaaatctaaaagatacatgacaaagtaatcctaattcgataaatgcgtgctgaaattttatattatttttattttataattattctgcactaaatatatgaattttttatgttaatacattaatgggaatgaaaatccattctcttatttttacaatcaggaaaacttaggggaatagttaaaatgaaacaacaaagtaatatcaaaaattcactggagattgggtgcagcggctcatgcctgtaatcccagcattttgggaggccgaggtgggtggatcacctgaggtcgggagtttgagaccagcctggccaacacggtgaaaccccgtctctactaaaaatacaaaaaaattagccaagcatggtggccggcacctgtaatcccagctactccagggggtgaggcaggagaatcgcttgaacctaggaggaggaggttgcagtgagccaagattgtgccattgcactccagcctgggcaacaagagcaaaactctgtctcaaaataaataaataaataaataaaaattcactggaacttaaagaagtaatgtttgaggcatattgaacatgtattagaatgaatttacataaactgtatatacttttcaaataaaacattaacttcttcagaaaactgttaattaaatcttgttgcagttcctaccaaaatgcaagctcactccaatggaccctttctgttatacttggtgtgctccgagctatgggaggaagcagaggtggcagaactctggcctccttttgcctcctactctacctcccaaaacaagaaactaaaaacttccagcagaggggaggaggcaaaggaaggacagacgaattctgaatccaggccatctcaggattgagtcccaaaaaccttgtggaccctgctctgacatgcaattaaaagagcaaagaagcttctcccaatgacatttctacaatgcagacaggcacatgccattctatgcaactgatgtgtgctcaaaaatggaggggggctaaaaattaacctctgtaaatgaaacaaattttaactaattaatattacaagttttgacaggattcacgttattttcttatgtttttcaaatagcctaagtccctatcactttatattttgtggatgaaaaataagaaaatatctgtaaataaagtaggtcatcataaacatactaaggaaatactaaataaagtaggtcatcataaacatactaaggaaagtcatcatttaagagaattcttttgtaagtcaaataattttcccccaatttattggttctgtatatgttttatggtcacactggttttctcactgcacaactaactattaaatcttgttcactgagattggtgtgtttaccttgcatttccccaaccagtgcattggggaaaaggatcatatcttatactttgctagacccataggcataataaatattaaatactaagtaggctatccgagtctactagtcttaattctttccttctctgaccatacacacaatgcgtttgctacaggaggagctacacgatttcccaaaacgtttcagttactcagcctatctttacagttagtaatactcctaaaatattttgaacacaatggaatctactccaatctcaaaaatttaaagaacccaatgactaattcacacaatcaacacagccttgcttttagaaagggctcacttctatggatcccatatccaggcatgtaatgtcagtctatttccctttgctgaaggccagcagatagaatttgtgcacaacttgccaaaaatttgaaagctgcttttaaggttagccttcctctattaggtttaagtaattgcagctcttttatttcagagacacgaactggccacacgtttggcctgaacggtaatttctgaaatgtgtctgcaggcctgcagaaggctctctggattgccacagcgcctacttctccaggctctctcgcatgtggcctgcttctctccttgatgttacctgcctggccccgtcgaacatttatttctgcctttcctctccaccctactttattcttcactcatgagtccacttttcctatcctacatagtataaaaccttaaatgcctgctagtaattatggagtcatttctatatctctgaaactctcatgcaggatttgctttgatttgacatagagtttcatacagaagggagaatggccaaatgatccactctccattggcttttttatcctaatctctgtgaatttcaagcagaaacatattttctgacaagaatgccaaggaaagctttgctttggtgatttaagaaaacatgaactccttttcttacaaacattctatactaatttaactacctcaaaactacctgcctgtacttcactgacatttaataatatccattttttccttccagtcataaaactgcccacagacctactgagcacgaatgttctacaaagcattttatggggtaagccattgaaaaaaactacgcttaaaagcagctggttaatttatttggttcatcttccataccctgtaatattgaattgtcattatcacaatactaagagcaatttaagctcaatgggagctaagtacatagagaggaaaagctgtttccaagaggtctatttttttgttggaaaaagtattttagggctttatttcccataaatccacattctggcagtcagcactctcaatacttatatttcaatatgagccctcacatcctcagcaatatactttattctcctctgttttgtgctgataaatctatctagtgctttcctactctacagagtggtataaggacatggagcccagaatctcccacatgtgtggcaagattcttatcaggctgtaatgaagtccccgattctggtcacctaacgcccatcattacttgtcactcactcttccctgatggagttgaaaagagtatcattggccctgttttaatcaccttgtgatctttcaagttgataaatcacttggctccttcaggcttcctaaatactgaccacactgctagctttgaggcagacaagaaagtgggcaagattcagcaggggcttcagccgagggtcaaggcttagataccatgtgtgttcccacggggagaaccaaggggcttgaagaaaacaaatatttcacaaaggaggacctgtgctacgtcaggaaggtgcagaagatccaggtaataaaatagagaaatagagaatagtaaaacccagcaaataaaactgtctcaataaaaataaacaaaggggataacaatgggaaagtcttgttacaaaaggatttaaatattcaagattagaaaagatcatgagcaaaattttaaaagtcaagaaggcaagtgagaaaaatatgagtgagtgtggagaagacctaggatggtggctggctactgatggcaaatggggtcttgaaccctgaaggaggcaggaatgaatgaccaggaacccatatggagcaggtaagtgtctttgttttgcttcgtgcttaggcttagtgccaaagtttcaaacacgcagcttctctaaacaccaccaacagctctactgtgtccatcaagatagaatataaacatgtgggaagaaaaagagaacttcccaaatatattatttccttaaattcagtggttattttctgaacaagttataatgcttcaatctcctttatctgaatttaacatgtttaaaaccagttcagtatagacaaaatgttggtacgacggaaaacctctgtgcacaagggttcctagagcccactcaaatgccacttgcttacaaacaatattttagtaaacaccattcctatgcaacacagacttttttttttaacttgtattttaatttcaggggtttatgtgcaggtttgttatgtaggtaaactcgtgccacaggggtttgttgtacagattattttgtcacccaggtattaagcctactatccattagttattttttctgatcctctcccttctcccatcctccatcctccaataggccccagtgtgtgttgttcccctctatgtatccatgtgttctcatcatttagctcccacttacaaatgagaacatgtggtatttggttttccgttcctgcattagcaacacagactttggacatgcccttgcagttaattctgcgaaacctatatagacagaccaatgctctgaaatttaaaaaacactgtatcaacataaggtaacgatcaattcagcaaccaagaaatccaagcaaagcttccatgaaaacaaaataagttaaacaacggacgtgccatttaggagcagctttctttgcattaaaaaactagagatgacagctagataaagatctacctacccacctatgcagtatctacctacacacctatgtgggcttggcaatcaagccagcatgtgaggtagtcccctatttagactactaatctgcaattgctgcaaatgcaagcacataattacaagtgcgatttcagaaatgactaggacactttctaagtaattttaccacttaaaaaaaatcttccatatggatcccacagatttaatagagctggctgttcataccaaacacgttgagtctgtttttcagtttgcagctatctgaggatacattttccgggctgggcccaaggtcaaacaccctcagcatcagggtagagataacagaaaagtcatccactgggtgattaaacttgaattaatgttctctgcaatgaacaaatatctctaactttaactacatataatctcaatcactgatgactggtgaaaatccttgcacagtgagtatatcaaaaagagatgcaaaattgctaagtcttgaataatgcagacagttacctgaaaacacgggtttatgtatttgaacaagcccttcacacaattcaaagtaaaacaggccaggcgcagtggctcacgcctgtaatcccagcacttcaggaggctgaggtgggcggatcacaaggtcaagaaatggagatcatcctggccaacatggtgaagctccgtctctactaaaaatacaaaaattagctgggcgtggtggtgcacgcctgtagtcccagctactcgggaggctgaggcagaagaatcacttgaacctgggaagcagagattgcagtgagccgagatcgcgccactgcactccagcctggcaacagagtgagagtctgtctcaaaaaaacaaaaacaaaaacaaagtaaagcccaaaagttgaaaaaaaaaaaaatcaggagactatctgcagaagaaaatgagtcaaatgaacccaatttcaagcattataatccactttcttaccatctctatgaaaaactggcattaactggacacactggtcagcattgatagctttcatggaagtggcagaactgatggttttggggcagactcacatctacatggtaacatatgttcatcctctctacacacttcagggtctactctaaagcctcatttagactcctatataatgcctccctgggaacaacaataattattccagatttggccaaaattggagaaaaggctgcaggctgttcagtaagcagcaataatttgtgctcaaactgacagtaaatatcaagtggacagccttcattgtcctggcttctatggtaatattaaaagctgccctgagcaaggaatacaatcagacaaatcacaaaggaagctacagaactagctaataaataaaaatgttcaaaatcactaaaaattcaaatatactataaaatagaaaaatggagtatctttatatatcagattggcaatgagcatgtggtaaaataggtactcacacatagctgatgtaaactggtgtaagttttctggaatacaattttacttggcaacacatattaaatgcctaaaaaattatcataacctttgattcagtaattccaatcctaagaatcaatggtaggaaaacattcagaggaacagatgaaaggccaaagatttcaaggttcaccacatcatgatttatgacagccaaacactggatataacctaaaggtccaaagacagaagaatggttaagaaaatcaaatagatccataagatagaatattatgcaactattcaataacactgagctaagaatagacatcaataatgtagggaatttcatatgatgtacagtgataagttaaaacaagatctaaaataattgagattactctaaacattcctttactttttattattataaaaataatgcatgcttactacaaaaaagtaaataaaagccaatgaaggtcagaaagaacattcataatcctgcccagacacaaatattgttaataatttggtgtacagccttccatgaatacatctacatacataattttatttctacagaaaaggataatcagaccatacatatattttagaaaagtacctcaacagaagcaatctaacaaatgttgagaattttatttattccaactgagaaagagaaaagctgacaaccagaagctagcctggcacccacagcagggctctgatgttctcttgatgaatataaacaatttcacacaaaaccaacatcagccgaggccactccatgaccatgaaggaccaggacagaagcaagaccactccataatcatgtctgaatgcaaacaagacatgaacattttccaagtcgtggcaatgaccaaacacctcccactttggctaaaatgacagactgctgcttctttaccagttatgactttggctttggcttaggcttttctccttctagataagatttatcaaaatgcccagctgtagaattactcatgcttcatgacagcatccaatctagagcaaagccctgatgccttaaacctccccaaaatcacctcacaccagcctaaatcctacaattcttctaacatcttcctaaaaccatatggggtactcctggtgatctttggccgcagggcactgacacagctaattcactattgttagacagcttgtaccaattttcactgttacaaatatcaagaaaattggctgaaactgagttagaaaattaaaaggaaaacaaacaaaccatacaggtcgagggggatccaaaaggcttaaagacaaataaaggactgtaaatttaccccatagtgttgtatgtgaatatacaaatacactcattttcctgtcaagtcactattctgactaatggtcttattaactatattctacctacaccatcctatctatatgcttttggaagcctaccaccatttctgaaatcaagatcctgtgtacacacagcacctaacatgaagcatgacacaaggttgtattcaggaagcagattcaaaccaaatactcctgtgaaatgactgtgatttagtttgtaccacgacaccaactaacaatgactgcaattgtgaccccttgctttatacagccttctcttaaagcaaaagagagaaagagaacctctgtgttaatgaatcagctgatgttaaatcccacaagaatatctaatgaacacctctgaactggcaatgacacttgcagtccttgctcaaaatacttaagaataagcacaggactctccatatgcaaaagaagatattatcagcaaggagcaaaagatggttataaggaagagagatggtagttttaacatcagagttcaggggaaagctacaatcagtatggaaatatatgaaaaagttagctgaactcattaaagaaaaaagtatattttttaacaggcatttgatggatatgagacaatgggaatcataaaggaaaatgaagttgctatggacccaactctcccaccctgaccgctgtagataccattcaaatactctgggagtcctacatattgacatcaaaaaagcaatcagcaatgaagaacacctgtttttccgactgaaaatgatttttatttaagcattatatttctatttttagcctcagatagcttagtatacataggaaaactcaccgaaaaatactttaaacagtagagctattttattgcttggtttttcatatctaaaaaaatgcttgtgaaggttacatttgtgttttacttcctgctaatcaatggtttttaatcaattttggtacattgatgacagcatgaaatacatttctaggaatgagaccacaatttacaacacagtacctagaataaataaaggtatgtatttacaatgcctcaacgtgcaaccgttagattggtggctgcctgtggtgtaactgtgaattaactagggagccttaattttaattcttaaaaatgttcagacgattcacttgaaaactacaatggtaagtaatgtgggaagaagtttcaggtagaaggctacaatcaagcatctgaaaacttgcggaaatactatcctagagatccaaacactggacaggagacagagaggaactgctaatgtcaaaacccttctagccaccaaaaccccagctccaatctgacccaaagatgaacaaacacacgaggaagcactcctacacttcatgtttagggatggcagtggtaagaaaaggctcaccggattatctagattctaaaaagatttgtagccaggggactgggagctattggcagatgctggccaaaagggcacagactttcagttctaagatgaataaattcggggatctaatgtacgctatggttactatatttaataatgccatattaaatacttaaaatttaccaatggattttaagtattctcatccccaaagaaatggtaactatgtgaggcaactgataatgttaattagcttgaacgtggcaatcacttcacaataaatactaaatacatttggtatatatcaaatcatcattgtataacttaaatatgtataatttggctgggcatggtggctgacgcctgtaatcctagcactttgggaggccgaggcaggcggatcacgaggtcaggagtttgagaccagcctggccaacatagtgaaaccccgtctctactaaaaatacaaaaatatatatatatgtatattttatatatatatataatataaaattttaatttgtcaattatacctcaataaagctagaaaaaaataaaaatgttgataacatgggcaaaagaaataaaatttaaaaacaatcttaataataattttttaaatatttacagttttataaaaagcttcccatattgaatcctccctcaaaaaggattcaaaatccaatttattatttgcagaccactgctggaagcttatagaagctggctgacactaccatctctgtccttcaggtaaaatttgccatttcaaattttcctcatttcattcactccagtcctttccttgtttgctgactgacattttccagcttacaaagcaacttgcccctgcggccaggtcccctcattctatcccaccgtaacgccaaacagctgactatctgatttctaaaaatgaactccactgcaaacagcatcgcgacaatttaatgatttgtcaaagtagtagaaccagttattataaagtgtatttcagtgttcaaaagtaaaggtcctatgaagctaaagcttacctgctgacagggaaagctggacaattaaaaaaaaaaatccagacaacattcacttgacagatttatttctaaaatagaaacttcatttgccatgctcctgtattaaaattcttgctacaaaagaaggttacacttacaaaaaaaattcattggttcacgtgtttgaaagctctctccaatggcacttttaagagatgtgctttctcttttttttttttcaagatggaaacaaaacagaatatggaataagctttttatgctcatgtgtcaagcactggagtccataaatccagctatggcattcaactactaagaagataccttgaaaacctaaaataaaagtttatgccagacagaactatagcctcctagtcctagtccctggtggataaagagctatctctgaacacctaagaagccagaactttgaaaaggaaatagctgtcaaactacagtttcagggtttcttctgttacattgctatgttctgcaatgtatgttgcatactttgaaaagtatgttctaattactttaataatttttataggaatcaaaaattgtaataagattaaagaactattaaatattaatagacatctctctcaaattttcttatgacttcacgaatatctcatagtggtcctctatttttctacttagttcctctagtctctgtgccactttaacccattgtttgtagaaggtggcatataattccaacgatttatttggctgtcagtctagagatcactgttcttaagggttaagaatgtctttattccacattacaccttcatttggctagtctttgctccaattttttgaagattaaattatttcttaaaggcagaaagtcataacctctcagttatctgacatatgtctttattctcttttccccctatgtgatctgccacctgttctcaacagaggagggatcttgatatctataacatgattattgcaaggttataaccatttgctaaatgttgggcttttcaaaattgttctgcctagtttctgctgctagtttaaaattgcagctgaaaggattgaagtagctactgagccaatgtagttatctcatttttcaaagatataaacctctataactcagttacaaaaagagcagctcctcctaaaaatttgcgaacactttcaaaatgaaagtgatcatttcacaagtcctcctttcttaatgtaaccttctaaatgcctttagtttttaacatcagatatatttcttaatgaaattagaaaaatacatcctaaaatacctcaactaaataaatctatttcaaaacaaacaaaacacgctaatgtcaaaaacatgaagcataaataatctttacaagtacataccacacaacatgtagaaaaaggaaattctctggagatttctgcaaaccacaccaagctgatacacattttgaaaatctccatttaaccatatgcaaacagatcattatagtttatcaagaaaatggtactttttagtacttagtaaatacatatttacatgataaaatttaatggatccaaataaatcaaagtttgtatgttacaagtcattaaattgcggacacagttacatgtttctaaagcctttaacataagtaaaataaattataatggcttttttaaataaattattctaaatcacaaactattatcacacttttaaaagacttgttttgtcatacacacacacacacacacacacacccctccatatatacagatagatagatatatctcattcatatatatatatatcttctgtagtaagtggaaataatttgcttgtattaccctagggtgctttgattgtactgggaataaaaacaggttttccttaaagaatgatgatatataatggctttttaaagggaaagaaccccaaaccaaagttttaagagtagacagtctttgacttatgattatttgacttaatgatttttcaactttatgatggtacctatacaatgattaaatttttcactttcagtcttcaataaattacattatatattcaatgctttattataaaataggctttgtgttaaatgattttgcctaactgtagtgttctgactacaattaaggtaggctaggctaagatgtgatgttcagtaggttaagtatatcaaatgcatttttgacttaacaatatttttaacttacaataggcttatcaggacaacctcaactgtaaattgaggagcatttgtagttcatctgccatcccataactaattacagaaaaattagtggctttgaaacctaaaaggggtactggcataaagatagctatatagattggtagaattcagaatccagaaataaaccctaacatttatggttaaccaattttccacaaagggcccacacaatgggaaaagaatagtctttgcaacagtgatgctgggccaactggatattcacatgcaaaagaataaatttggactcctgtcttacatcatacataatgaactcaaaatatattgtacacctaatttaagagtaaaaaatacaaaagtcttaaaagaaacaagcattaatcttcatgaccttggaagaggcaacaggcagtgatctcttagatacaacaccaatagcacaagtatcaaaaaaattaagataaatgtgactttattaaagttacaaacttctgtgcctcaaaggataccatcaataaagtgaaaagacaactcataggctgggaaaaaatatttgcgaatcatgtatctgataaggaatatctacccagaatttatttttgaagtttataactctataattaaaaaaacccaattaaaaaataggcgaagaatctgaataaacatttctccaaagaagatatgcaaatggccaataagcacaggaaaacatggtcaacatcatcagtcattagaagaaagtcaaaaccacaatgagatatcacttaacacataccagagtgattataatcaaaaagagaaaataaaatgaatattggtgagaatgtagacaattaaaaccctcatatatttctgatgagaatgtaaaatggaacaatcactttgggaaacggtttggcaattcttcaaaatgtccaacatagagttactatatgattcaacaattccatactcaagagaaatgaaaacacacagccacaaaaagctgtacaaaaatgttcatagcagcattattcataatagccaaaaagtagaaacaatccaaatgtcaatcaagcgacaaacggatgaataaaacatgatagatctatacaatgaaatatcatctggacataaaaaggaatgaaatacggatacatgccacaacattgatgtacctagaaaaataaggaaagaagttagacacaaaggccatatattacatgattccatttatatgaaatatccagaataggaaaacttatagagaaagaaaatagattagtggttgcctagggatgagaggaggggaggaaggaagatggggagtgactgctaataggtgcaaggtttctttttggggtgacggaagtgttctaaaattagcttacgttgatggttacacagcactgtaaatatattaaaaacgactaaacagcacactatcatctggtgaacctcatggtatgcaaattatgtatcaataaaactattttaaaacagctaaaaaaataatgacttaataccaattacttacactgacatgggtaatcacgggattcctcactttaaaatatcatacatgtgcttttctcatgccccatatactaagccttacatacaatacactaagctcttcagtgtatgttttcttttaaattattttagtcccaaatgtctaagttaataataaaatcatttttaattcaatttttcaccagatgaccttaactgtttttattttactctcatgttatatacatataaactttttttctgtatgcttggaacgagatgtcaacagatgcatttttggagaactgaataggaaaaaaaaattactctctcatagaaaactgaacatagaacagcttgtcaagtagtcagtgacaaccaaagagacaaaccaaacccctgatgttctgcctgttcagcattttttgaattctacttatcttattgcttatcacaatgtccaactttctataaattccaagctcttcccatgttatcttaccaacaattagatgctagattactctgttgttcctgcactgctcatggatctactcaatggactctgacccagactgctgcatgcacactgtcctttctacggatgtctgcaaatgatatcaaatgctaagtaaaaggatgaagaatatgttactgacagttaacccagacatcctacagggagacaagacactcatgcagcagaattaatgtggcaaacttgataagactacaggtatcccttgcagcagaaaagcaattattaaacttcacgaatacactgattattaaagaacacaggccgggcgtggtggctcacgcctgtaagcccagcactttggaaggccgagcggatggatcacaaggtcaggagatcaagaccatcctggctaacacagtgaaaccccgtctctactaaaaatacaaaatattagccaggcatggtggcaggcgcctgtagtcccagctactcgggaggctgagggaggagaatggcgtgaacccggcaggcagagcttgcagcgagccgagatcgcgccactgcactctagcctgggcgacagagcaaaactctgtctcaaaaaaaacaaaaacaaaaacaaaaaaacataaaccaacacagcaaaatctctcctccaaatcttcagtcctaccacatggacatcaacactcatattatctctggtatgttcttttattctaataccttcaagaaataggggacaactgtaaaatctctaactcttgaaattggaaattgaaaatcaaaactgcatcaaaacatgctagggaaatatttaaaccaaagtgatttatcaatattttaagtgtatagcagattattaagaaggcagcagacatcttagaacctgaccttccagccccggtcaagcagctccaaccaatatcccaattgaaccctcatgagcaaccttcagccagggcctaacagctaagccactcttgaattttctaagtatgagataataaatgtttgttgttttaagtcatttaaaacaaaaagcagtgaccattcccagtgagaattaaataaaatgtaattctttattcagccaggcatggtggctcatgcctgtaataccaacgctttgggaggccgaggtgggctgatcacctgaagtcaggagtttgagaccagcctggccaacatggtaaaaccccatctctactaacaatacaaaaatcagctgggtagggtggtgggcatctgtagtcccagctactcaggaggctgaggcaggagaattccttcaactcgggaggtggaggttgcagtgagccgagatcatgccactgcaccccaacttgggcaacagagcaagactccgtctcaaaaaagaaaaaaaagaaaaattatttattcttactgagtttttaataagaacacctgggtttaaatttcagctatgtgaacttatgctattatcactgtgatggttaataacaagtgtcaacttgattggattgaaggatgcaaagtattgctcctgggtgtgtctgagggtgctgcccaaaggagattaacatttgagttggtggactgggagaggcagacccaccctcaatctgcatgggcacaatctaatctaatcagctaatctggccaggatggccagaataaaagcaggcagaagaacgtgaaaagactagactggcttagcctcccagcctacatctttctctcttgctggatgtttcctgcccttgaacatcagactccaagttcttcagcttaggactcagactggcttccttgctcctccgcttgcagagatggcctattgcgggacctcattttgtgatcttgtgagttaatactccccaataaactactatatatatatatatatacacatatatacacacacacacatctatcctattaattctctccctctagagaaccctaatacaatcatacacaaaatttcttaacccaaaaagtgtttagtgaagaaatacgagaggaatgttaatgctactctttcctgaggctgacaaagacaaagacaagtaaggtagttattttttcaggagtggatcagctgcagacctaagctagagaatgtgagattaggtctgtaattcccactaattagtcccctggacattttaacataaggtgaatgcaactacagcctaagaataacaatgggctgtgagatgggggaaggaggggctctctaacagaaatcagaactggcgtgatcttggctttatgttgtggaatggaatcaggatctaccaacctgccactcattacaacgagtcatgtaatgaccagaaggttttcccgccctatcattctattaactattgaaccaagggaaaatgacagataagtatcataaaacatttaaaagcattcagtagctgggcctcaaagcagccattccatagctctatactactacagaaatagctatagactacttccttttcactggctccaaaccgaatagtaaataatattcggagttccagtatggtgatagcatttagtataaaaacagtctttaaaatatctctaagtaataaaaacagaaaaaaaactaatttgacttattctataagcagacagattctttaatttgagaatttactacatctataaacagaaaaatgttaatatatgaaagtttttctctcttatttctctttacattttttaagagacagggtcttgctctttcacccaggctggagtgcaatggcacaattatagctcactgcaacctcaaactcctaggttcaagtgatcctcccacctcagcctcttcaatagctaggactagaggcataccaccacacgcagctaatttcttcatttttttgtagagtcggtctcactcgttgcccaggctggtttcaaactcccagcctcaagtgatcctcccaccttggcctcccaaaatgttggaatcataggagtgagccaccattatgcccagtccaatctcttattttttaaatagcactgagataataaaatgtgccatgaacatgtcagcgaagagtagccataactgctctaaaagtttatcaaggcccgcaagagattttctacaaggaaaaaaaaaatcggaaaaaaaaaatcagtagtttaagtgtgcttttgttatttttaaatgctgcctcttttttgtgggaggggcaatgtttcaaagctctagatgtaacagctctcttattttcttgtcctatatctacttcaaagaaatgtagcaagaggctgggcgcagtggctcacgcctgtcatcccagggctttgggaggccgaggagagcagatcacctgaggtcaagagttcaagaccagccaggccatgtctttagtagagacatggcaaaaccccaactctactaaaaatacaaaaattagccaggcacgatagtgggcatccgtaatcccagctactcgtgaggctgatgcaggagaaccacttgaacccaggaggcggaggctgcagtgagccaagatcacgccactgcactccatcctgggcgacagagcaagactccgtctcaacaaaaaaagcaatgtagtgagaaacactgaagccacaactcccccaagagatgatgatcatcagatttcattacatttgtctttctcgaatttctcctaatgaatagccagacataaaaacattaaggataaattacagagtaagcacacaacacccctcaaggctacatatcaaggtagagacacacagcacttaccttcttccctccggtcacaaactgcttgcaactggatctcacgaaatgtgggtgcacagcaataatctacaagagaaacagaacccaactctggtttaggagtcatggccaatgcacagaatgaaaacccctgacacagttcaagcagcatgatctaaaaattatcctgaaaccttggtaggaagtaatatattcaaatcatattttacaacaactgatgacatctgagttttcttcttacgtgaaaagatttcttctctgaagccaggtcaaagctcaaagagtaggataagtcagttctagtttctggctgaggacccctataagtggatgtcacctgtatagaggcagcaagggaggtcaagggaggttggtcaaggtagcaagatgtcacaactgtttctaactggatacaatttacagaaaacaaaacaaaaaaaaaaaaacagaaagaagccaactaactccttgtccaagatgactctcaatgatagacggcaccaagtggcaacgcagcctcccagacgtttagcccacttacaccaagaccccatcaatggagagagaacagagctacaggcccaaagagctaaccgttcaggacttagctttttagatacaacctgttcccctgattctcatctgcttcccactcatccaatctttctccagccccttgctacccaggtttctcttaaggttgctccaccacccttgttactgtttccttcatttgcaagggctttatgattacataacatcattaacatcttggggaggggatgaaaacaaaagccctcgtggctccactcagtgcacctccatctttggagctcatctgttgtggctgtaagcttgcatagactccacctccttctctctttatccccaaaccacccatgaaatcaccaacttaactaattttgtgtttttctaatttaacatagagaattttttttaggtaaacacacacacaaaatctcacacaattttacttctatataccttcaattaaacatattttatacttgtattaattgacacatttccctcctacaatggaatagattcctcttcctacaatgtcatttttaaggattagcatatgatccttcattgctctaaacactcctacctcccaggttagcccttcttcccttcaacactttcctaatccatcctcaataccagtagtgaaggattcacacattctattgtttcacattcttaaactctccccctagctctctcgtaatgcataactgtagatcagggactgattccaaacatctcctctgctcctcaaacacattatgttacccttttcttcccttcagatgtaagaaaataaagccatcagggtcattgcccacaagtgctcctccttcactgtctaacttgcaatagctaggctcagtccacttccttcatgcctgtttcacaggcagagggtctaggactcttccaagattatcttccctacctaagctgttgatctcattgcttagtgctgctccaagaagcattctctttatttttaatcttttcctcttcactggtttttgccatgaaccaaaacatggtcggcaaaaaccttcccaggacacggcccctctctctaccagatgatctctcttctttattactaaatttctttaaagaagagtctctgctgattgtttctacttcctcatctccaatttattccttcatgtatagtgaccctcctgctctgaaaagagtcctcagcaaggtcaccagtaacttcaaaatcaccacatagaatgcccttgtttcagtccttccccctatttaatctccacactgcattcgacactgctgaccacttcctccttgtagaaaccctctctcccctggcttctctgacaccactcttcgggattccttacagtccctccaactgcttcttcttagactcctttgctgttttttcttccacagcctgagtattcaagttagagtgttccagaatttcaccatcagtcttctcttctcactctacagctctaaattggataatatctttaaaaatagcttcaccttattcaactatggttatcacgtttgtgtttaagggccaatctccatcctgaggcccatattcatgtttctaaaacctccgtaacgtccccacctgatgtactacacttatctaaactcaggaccaaactagcctagccatgtccttactcaaacataccctactgcaactgatggcatcccacaccccatccccaaagcgagaacctgaactgaccctgagctcttccgtctttcatcaccctcatccaagccatcactaaggctcgctaagtctatttagcacaggctgtccaaataaatttcatcctttccatcttgaacactcactatcattcttttcattgagatcctgtaatgccctgcctagagtattatattaggcttctaaattgtcttttgtccccaatcactctcctgtttaaatcaccctccactctggcaaattcaactttttaaaacatacatcagaccctatctctcctttacctgctggtcaataaatgtttgaataaacaggtgaaaaaaataaatgacctcttccttcaacaactataatagacacctcaactaccataatttttatctaaaactagtcctcttgactcttatctgtccttcaatcaatactgtatacagtcaccatattaattttcttaaagcttagttcagtttatttactttgttcttaaatatttagtaatttctagttatctaccaaatggagtccaaattcttcagcctgaatgtaaagccagcccaatcttccttcacattctcttgtgaaatcagtcttttatgtaccaaataaattggacaatttgccatttcctgaacacaaggtgaactttctagcctctccatttctattatgttgttcttccacatggaaagccagcttctctcatcagtccttctccatttattaaagccaagttaaacatcactccaccaatgaagccatcactgacaagaacagctaaaagtgattcctttcagctttggaacgcttaatattattcctacctctttgagtcttttaccacagatcgtgtgtgtgtgtgcgtgcgtgtgtgtgtgtatgtgtgtgtgagtgatctcactcactataataaaatacccctgaagacagactgagatcacagtcacaaaatacacattctgtcttctttcacagcatctaaatagtatccagtacatctgaagtgttgaacagacacttactgacaaaattaatacagaagtggtaatgttcaaattactgtaatccatattgccttacttgagaaaacccttagaaaaagtaaaacttgctgaatacttactttaatgggacagtcaaaagtctcgtgaaattcttctccagaatacagtccaaatacctgcacctacaaagaaaatggattgtatcagctcaccatgacagcaatagagaaggctactgagtcagtatgaacacatactatcaataagaaaagtagaatatttaataattttaaggccccgtgacctctattaaatatctaatgaaaacaatcccatcagccacgtacggtggctcacgcctgtaatcccagcactttgagaggcagaggccgaggtgggtggatcacctaaggtcaggagttgaagaccaccctgaccaatatggtgaaaccccatctctactaaaaatatgaaaattagccaggcatggtggcgtgcatctgtagtcccagctactcaggaggatgataggagaattgcttgaacctgggaggcagaggttgcagagagccgagattgcgccactgcactccagcatgggtgacagagtgagactccgtctcaaaaaaaaaaaaaaagaaaaagaaaaagaaaaaagaaaaaagaaaatcccatcaggttgagggtactttgctgcaattaagctttcataagcattccatggatagagttcccttcaatcaccacaaattgtattaaatgcatgccattaaaacaatgaaacagatttgaacaagttattactattcttttataaacttccataagctgtccctaaaggaactattttttcatcccttaaaggaaaggggagatttttttttagtgtctctcatatatataaaataaaccaaccatgtagatcagtgtggtaagagattaggtgaaccacacttcactcacaacttatgctaaatctactgagaatacagaaatgaaagatttaagttcctgcttatcagtgtctcccttaaagttgttccaggctactttattcatacttagtatattttctgagtgctttacttaacaacaacaaaacaaaaacaaaactgaaatataaaacacatgctataaaaaatacaaatcataaatttatagtttgatgaatttttatgacacgaacatatccgtgtaaccatcactctgatcaagaaatagaagccaataagctcctttgtttccctttccagtaaataacaccctccaactaatcactaccctcaaagctactggcatggataagttgtgctggtgttagaattttgtaagtaaggaatcatattctatttcactgatttatttcattcattatttaacattttctttgtgagatttagccacactgttggatatagtagaggttgcttctttgccactgctgggtattatttcatgtatgaatatatcacaattcacatatccatcttccattgatgaccacttaggttgtttccagattggggctatcatgaatactgctgctaagaacatgctttgcaaatcttttggtggacttatatacatattcatgaagggtgtataccttggaatggaattgctgagtcataggttatgtgcatgttcacatttaataggcaaaccatttcacaaagtggtttcaaattaattatgctctcaccatgagaaagtttgaatgtttgtgttcccccaaattcattacgttgaaacctaacctccaaagtgatggttatttatactctcagcataagaattccatgagatctcaaatgcttggagctaacaaatagtactagagccaatgagaactatttcccaacattggaatgtgttcactgtctttctagtctctagtatagtggtattattcttctttaacttttgtaggaattcactggtgaagccatctaggtctcatggctttgctatggtctgaatgtatgtgttctccccaaattcactgtgttgaaacctaacctccaaggtgatggtattaagaagtagggcctttagtgagtgattaaattatgaaggtggagccctcataggtgagattggtgcccttataagaaagcttggggtaactagctatagcttgaggtgactagctagtccttttgctcttctgccttctgccacacagggacacataattcatcccttctgccatgtgaagttacaataacaaggcgccatcttggaagcaaggagagcagccctcaccagatgccaaatgctggcaccttgaaatcagacttcccagccttcagaactgtgagaaataaatttctgttatttataaactacccagtctaaggtattttgttatggcaacacaaatggactaagatagtttctttgtgaaaaggtttccaattataaattctatttgaaaaataaatataggactacttaaactttcaatttcttcttattttaatcttggtaagttctgagtggttcattctttcaagccccaagcaggaaattcacttatgttataattttgggaaatagattcatgcattaaaagttaaagttttggggaccatccactcattttgtaactactgtttttatatacttgtgccaagtttgttatttgggttctacaaacaggagataatataatgtaaaacagaaggaatttcatttttcctgaggctggccttgaaatgtattcttcacatggcaaatacacatatgtcccccccatcacctgctgctcattgttcagagggtataaagtcattacttttatggaaatatataggcataggataatataacaaacatcttataaaataatggctaaaaagcacaaaaggaaagcactgcattcagggtttcactttacctggggaagtttaacttgatggaccccaacaaatctaagaaaatcaggtgaaaagaaggaggttcctgaatcatgggaatcttaatggagtgaatcaacaaatggccaccttgatgaagctacctcagtatgaatacctgctcaactagcaagctgaacttctcctaacttaatctatttcttttcagtacaataaggtcatgtactgcatggtcttgtgctaaatctcatactactgctactaacttacatccctaaatgtgtcaacatgctttaccttagtggttctcaaacacacctgtacagttaaaattcctggaaactaatggccaaatcccaccctgaacaaacaaactcaaactttctggtgaggcgaaatgatatttttgaagtctgcacaattggcaatgttttgctgttcctcatttggtcctcatagcaaaactgctaggtctaagagcaaataccattatgcctgttgaactgatgattctatagaaaaatgacttgcctaaggtcataaaaatcataagcagaagagttagaaccagaacccggattttctaaatcctattcttctacatgctatctttatataggataaactgaaatttgcaaaaaagaaagatatctttttacctaaagtgtaagaagagtagaatagaacaacaacaaaaaaacattcaaaagccttaaatatgtgccaaactgaaaagaacatgaatatcagactttgaattaaggacactctatgacagaaattgaaattaaatgaagctgattattcattcaaatggataaacttccttctgccttatagatggaataaagaaattttagaaaaaaagtgatttctattatgcagaaaagtatatgagatgtaaacaaatgatgcataagcctgtagaaaaagactgacagatcagtaaatgtgtggataaatactgggactgtggatgtaatgctgaaaattaaattaggaattgctgaggataaatgtcccttcaaaaattaaaaatgcatattgaaggcataagagtatagtgataaagaggaataaacaaaaaagagaacaaaatcaaacaagttcatagtaaacaggcaccgatacacatcactatccttaagaattcgccagaagcaaaaatgtcactgtcatacccacagtaggggctggaggagtaactgctgaaggtggcaaatcaagaatagaactctctggtcagtttctattactatgtttaactgagcaacattttcctcaagtgttcttatattctatttcaatataaaaaacatataacttcacgagacaaatctcataagctttgtcagtatcagcacaagggtgatttgtaaaatcttcaatgttttggttcatttcactactatgacatgccaaactagctgctcacacgttatactactaaagataataaaatccaaaacaattctcatttatttcccctctctctccctctttatttattttgccattttgtctgtgaaaatcacacttatctgtaaagggaatccctccgcttttgggaagagctcatctgagataagaatcacataattaaaggttacgagagaggacccttttgaaaacggtatctcctgtagtagccctaacaactaccctgaacctgctaaaaaaaaatacctaatgaagaaaaagagaaaattcctaacaatgagccatagaaccaagctcctgcaaagtcctgggagaattctcattagctacaaaccagagagccatgtgagtaccttagaagtatgtggtacatgttttgttacccgaaatagaggaaacctaccctcatgaaacagtaagggatgtaatcattctccactttagcatgaaactctatgtatttgccaaccagaacactgggcaacagccctgatgcagagaaatgaggacggaggtggccagagtactatatgaccttcccagttagacttcccttgtaacagcctctctcaaacttctgcttccaaacaacacattaaaaatcagaatagggtggacatgtgaactgtcattatacctccagtggtagctaaagggactctggcagtcaagattgctggttttcatactctccacccaggctgactaacagagaccagagagtgatgacagaagcctctagttccccccagggagctgccttcatttagttacgggaaactgagctcattttagggtccctgttgctgaactaaggggattctaaaatacccaaaacagtaacaagggcaagttagacattgaatctgtttgctaacccaggttgaggaagagatctgcctgttctggaatggataaacaaatcaaacaaaaacatagccaaggtctattaaaaaagtcctgcagaacattccaaagattcaaagggagaaaaaccatgctttaagaaatatcttaatattaaccagaaaccaaagaaaaaactagaaaactgtttggcaaccacaacaagaagatcagacctctaagaacctggagcagaaaaacaggaagatgacgacaatgattataataatagctcacaattactaagtgatttttctgttctaggttctattccaagtaatttacatatattaactcatttaatcctcctaataattaagtaggtactgttattatccccattttacaggggaggaaatgggctgaggtagagagaggtataaataacttagcagacatcacacagctaagaagtgacaggataattccactgctaaccactagacaacacccatctgacactctatggcatataaaaagtagtaatttttgtttatttatttatttatatttttattttctttttttgagatggagtctcactctgtcacccaggctggagtgcagtggcgtgatctcagctcactgcaagctctgcctcccggattcacaccattctcctgcctcagcctcccgagtagctgggactacaggtgcccgccgccacacccggctaattttttgtatttttagtagagatggggtttcaccgtgttagtcaggatggtctcgatttcctgaccccgtgatctgcccgcttcggcctcccaaagtgctgggattacaggcgtgagccactgcactggccaaaaagttctaattttaaaaaaattaaatatatatcaggctgatatgaaaacagaattgggaaagatttcagacaaattaaaaatgcaaaatgcaataaaaatctactccaggaagcagtaagacacaaaactgactttggaagaaaagtgaatcagagaagggaataaacaagtagaggaactctccctgactacacagaaataaaaggctaaaaatgagaaagcaaagtatatgtgtgagacgtcacacaatatgaatgaacaattttctatacaacctatgtattgccaaaaggaggagaagggtaaatagtgcttaatcattcaccctcttgccttgaaaagttcaggtacaataatgggagacaggaagaggccagactgcaatggattaaaaatgaatggttagcaataaaaacaattaatacataactgacagcttaccatatcccctgcacctcacaacactcctcaggggcctcccactgccaagatggggagagggaggcactgccaggccagcaacatgcccaacttcacacaccaagtgggaatgccagcccaggcagctggaatacagagctatgctcctagcctctaagcgatattgccttcagctttatattactgaatttctttgaagaaatgaaaacaaatgcaactgaggcaatcatcaaaattataaccgaactaaacttttctgaaatgaaaacaatacttcagtgtatggatcaaaaggactgacggtactccagaaaaaattaatgaaaagagaccagaactagacataacttagcaaactgaattacacagaccatttattactgttgttgttcttgttgtaattattattattagtccaagttccaaggcaggaccaaaaaaaaaattgtaaaggttttagaaaagaacaaaagtaggctggtttcagacatgtctacacaaataaatgtcagaaaaaagggagcaacatctccaaaattttgagaaaaaatattccaacccagaattttatactatagtttacatatgaaagcaacatatgcaagaaatcccaaaataaaccttgtatgtacttatcctaaaagttttctagaaacatatgccagtaaactgaaactgaacacacacacacacacacgcacacatacgatatgtgtgtctcaaaatgtagaactgcagaaaagtcatgacaaaaaaaagattgaaaatgagcaccagctgaataaacggtgtaaattttaaacaactgctggaattatgacttgaaaactgaatgcaaatatcaaaggttatccttgaaataaccctaataaataattatttatctaggaaccttaacacactgaagaaaggaaaaaatacccacaaaacctatttaaagatgcattagatttagatatctggaatgtgtttgtgtaatgtctttatatttttatcatcaccaaccactttaccagatcattctatactagcttctcaattttcacaatactgactaacccatggtaagggggtagcttacatgtaattatgtgtactaaaagatttactttcaattctaccaatgttaataaaaatacgggaagattatttccaaaaatatatcatggttccacactaaaataggcagctataaattttaccaaaataggaaaccaaaggtgtttgacaagaagggtaccatgagataatctgaggttcatcttatccaccagatggagtagctaacatattccactttggtgcattaaataacaattcttcaacatttaaagctctgaaaattcctagatgaagtatttagtaaaaattcgtttccaatttttaataaaaatgagtactatctttcaacaaattagttcggttaaactgattacagcccaaaaggaatttctcacctttaagaaaacaaaatgaagattatctttctttacaaatacatgaacacaaaaaatgtttcagcggtgtggataattcttctccatttctgcacaaaccaactcctccttcatctctctctgataatcatgacaatctcagaatttctgaaagtactgtaaaatttgacagtgctttttgaaaagcactagtgttccaattactgtttcaaaagactctttgggcaacattaggcttagatatataaaatgcattcttgtatgtcaagagacttcatgttgctttttgttaacagattaaatgggtatatctcttttacaccgggtatactgtttttaatttacccatcttaatggcccactgactttagggcacataataaatacaaaattagattaggaaatctgctttactcagtaaggaatatgtaaagatctataatgattcttaatgcactctctcaaactgttattttagaaaagtagcttaaatacactgtgcattaggattttatcattgcaaaccaacattagaaaagatttccatcgacttaaaaacaaaaaagacattcttataagtggaaaatcaatcaccacaaccattaaatgtcacagctcaacatcagcaagaagcactgataattgttagttatacactgcacaaatgatgtatgtccttggtcgaggaagtaggcgccaggtttttagaaaactgtacatatattgattttacatttatttaatgtggccattgtaagacactttattcttctgataaactatgattgcttatcaaaagattctataattcaagagaaacattcataacttgtgtgtgaaaatgaaaaccactggcccacagaaatcatgcccacaaaatccaattttgtggatttatggcagaaagacattaaactactgtcttgcaggaactgcagactagtcactgaagcagaagtggcacggtagtaatgattaaggtgacacgtcaccctgccacagctgttaatcagcttaatactagttacattattgacattcttgtaattacttttcctaaggcacatttgtgcaaaatatattttacttcaattatgaccaatcagaagcaagttcaatactcagaaagaataatcaagattgtcttaatgcagttatatagtaagcaaggtgctgttccgatcacctggggctggcgccacagaactctctgcatgaccacatctttgccataccttgccatcctctgaacacacacccatgtgctctccactttcatccaagctaatctgatttatcttcacaggactctaaaaagaaaaagacaaaaagatgtgtaaaacttcaggaaaatatatatcaacaatcaatgtctttgctctttgtaaaatagtaagctctttgttttcttcttaaataatgacagtttccaactatcttacacaaagcacagtagaaactatgagaagaaaagtaagcctacggcagctacaacatgagcttgcagagtagtttttaaaaaatatttagccttaaaatggtttggcttgatgataaaataaatggaaatatgcaaagttgaatgtgggatcttcaactgaaaaatatctcagatcaagtaggcaaaggtcagggcagaccaaggctcccagacctcaaaaaggccacccactgattgatgctatggaaagacattttgacatggaggatgagactcctggctacaaaatcctttctcatcttgatccctaaatcaccacatgagcgacacccctgaaatgcagtccatgaaaaatcagctagctccttaaagttcctagaatgtcagaagagtaaaggttccttgaagatagatatttgatccattttgtagaagaataaactgaagctcatagcagggaatcaaaacagagaaaagagaggagccagggctacaacctgggaggagtgaagaatactgcactggcagcaaggaatctacaaagaaagcaaaagctgatctgggaaagcacctaggccagcatgtctggacttccggctgagaagtctaaatgttcaacttctatagtctttgaataaattccttcctcaaattgaatatcttctgttaatagtttacttattcagatcttgagttcatcaaactacatttttttaaatatcgattttagtcttggcaaatataaactgcacctacctctgattgtaatttctttggcatctggttgtaagctgcctcaaattataatttagtaagtgtgtgcagcctaggtttcctgtccaatatggtactgtccacatgcagcctttaaaactgaaagttaaattaaaattcgataaatcagatcctctgctgcactaacacatgccaagtgttcaacgactacatgtgactagtactggaaagcatacagatcacagaacatcatcactgcagtaagttctactggagagcgttgttctgtgctcagaaaactgagatccaataatgaaagtaactaagacatcaagccttctttacaaagctcttctttactgcaagttacacttagtagattttccttctatatacacgtttatgtaatttgttcttggactctggtattgaaaagctcatggcctatcctaatattctgtaaatcacattatatcatttgcaaagacctggcatacacaagatctgttattcaaccccagaggaaagcagtcagctaaggctggttatctccatctcacaatgaggaaaatgaggcttcaagaatttatgtgagtggtctaaagccacagtgctactaagggctatgtatgtcacacaatagcattccaagtgcaaataaacgaagtttccattacaacatgtttctcactgaatggaaaccatttgtgccatcacattagcaacattatgggggaaaaaaatcatacctctaaggtaagataatcctttttcccacgtacctctattagcaatagaagggttttttttcacttttttttctgccaacaatcaatattcattgattcatttccctgactactaataaacttaaccatttttcttaagtctattgaccaattaatttgatcttctgtaaactgcttgttcacttctcttactcatttttttctattaacatgtttgttgttttgtcaatctataagagctcttttctatttttagggtatgaggtatatttatccagatattgtatatacagtctcctatttttttgcatgatggttattactttatttcttatatttaagtcttttacatttcagaattcattttctttctttctttttttttttttttttttgagacagattctagctctgtcaccaggctacagtgcagcggcacaatctcagctcactgcaacctcgcctcccgggttcaagtgattttcctgcctcagcctcccgagtagctgggattacaggcacgtgccaccacgtccagctaattttcacataacattctgagttttcagttgtggtctctttgtccatttctgtatcaattcagcattgatttaattatagagggtgtacatagtatgttctgatatctagtaagtctcagtcacaacttttcacattttctttggcttttctcaagtacttattcttgtaaattttgagatcaaatgaccccaatgttgctaaacataatggtccttgttcaatcctaacttacttcacctaattggagcacgtagcaccactggtaattcctgacttccatatctcatggttcagtccttgcacctcttcttttttacatctatactcaaaacatagtattttctccaggccatggaatgactcctacatttttatctccaggcagggcctctccctattgcagaccagtatctaagatggtttcttttatatctgtacttggatgcctaatatgcacctcatctaaaacatatccaaaaccaagatcccaatattccctctggaaagggctcttcctgatggtttccccacctcagttaatgccttctgcttacctttttctagttgatctgggtaaaaactttcaagctacttttgattcctgtctttatgtccactctatatctaatctttcacaactcctatcacctcttctgatgaaatttattcagactcggaccacatttcaccacccctacagctgctattctggtccatcattctcatatggattaccctaatggtctcctaactaggtgactttctcctgccctaactctactagaaatctattctcagcaagcctgcacagtgacactatgttaacaggttgataagagacattcctttgcttaaaaccctccaatggcctcctatctcaagaaataagccaagatttttactacgacctgacagtcctaaattatctggcctttgccctccctccaacttctgacctcatcccctcttcccctggttctctctactccagtcctgatgaccttttgctgcttttccagccttaaggcctttccatttgtccaccctctgcctggaatgcctttctgcctactctgtgctggtaatcatcttctcagtgagatctggccaaccaatctaaaaagtcaacattttacccaaacatttcataactcctcattgcttttgttttgtctccttagcacttgccactatcttagtgtatcttttacttatttgttttcaaactcactcactagaatattaacttcatgagagaatgttcaaagaataaaaaattccaattcaacataaattcttgcagagaaaaaaaataaaaaggaaatgctcctcaacccattttaccagaccaggataaccttataataataaaactcaataagaatattaggagaaagaaaaagtacaagtaaatcttacccacaaacataaatgaaaaaatcctaaagaaacaattaacaaagccagcctatagagaaaatccaagtttattccaaaaatacaaagctgatttaacctataaacgctaattttctatattgataaaagagaaaaatcatagaattatctcaagggctacaaaaagtttttgatgaaactcaatatccattcatggtatttaaaaaaaaaaaaaacttttttagcacacaaggagaaaaattcctcagtctcttaaagaatatcttctgaatggttaggaaaatattgcacttaatggtaagatgttgagagctctccctttgttatctttgtaatattgaatcttttaatccgcaaacatggaacatttctccatttatttaggtcttcttcagtatctctaaataaagttttatatgtttcccctgagaggtcttaatattcctttgacagttttattcaaggagcagcaatcacagaaagcatcctttcctcattcctgacaagtattgtgtgattccatttacataacacacaaaaataggcaaaaccagagtgtgtagggggagcacacacaggttgtaaaataaaacggagaagtcagagagttattactataaaggtcagtatagtggttacctctgaggggaagagagaacactgtgattaggaagagtcacatggtttactctcaacagagtggtagttttgtgactgttagcatggtgatgatctgttttactacacgttttatgtaaagttacatttcacaaataaacattaaaaatttaagaagatcaaaaagaactggcccaggaaaatgtctgagatcgacatctttaatgggttatttcttaaattttgagatttttttttcattttttttccactttaattgtcaagctactcaaatgttctcattctaatctggtcattcatattttccaagaaaaaaaaatagcacattttaaattcatcagtgatgaaaatatcttttattttactttttgttcgttcactgttttaataatactgatgatattaatactactaagaataaatagtaaaactattactactaagttaatatttactatacggtcattatacaccaggctctattctatgagttttatacatacatcatttaatacatcaattctataaggtaggtactactacttttcctatttcatatttgcaaatatacagatatcttacaggtataagtacttgtgtttcctttttttctttgattatcattatcaggtgtttatcagctgtactagcctctttgcagaaactcaacaattcactttattttaaaatttttctattttattaatttcttactattattccttaattttttccctttttactttagaacaattttgttcaccatcttgtaatttccagacattaatatactgcctaataattataatgactcatttgtcagtcatataataaaatgcttttgatttatcattggtcaaaaaccaaaggacaaaagttaatgtgtaattacagtaattatttcctttttgagaaaagtaacattttgtttcatttccaaggatggtgatgttgtatttgcccattaatctagttattaataaagtctagtgtggatgcattgtggtctgagaatgtggtttgtataatatctatttttagaaatttaataatttgtctttgtaaacctaagacataatttcaaaataattcatattctctattttaggctcaaaatatgtattttaaaatcatgctatttatattatttaatttctctatatatttactgttttctctttcatctatcaaagactgattaaaaacaagtttcaaaaacttcatactccaattgtagttttgttcatttatccttgaatttcaaatgaattttggtccagatactagatgccctataatttggcatatcaaagggtacaatgattatactcaatcttccttttaacttgtaaatgtaatcaatatactatgccttctgctggttaatgctcttttgccctaaattctagtttttatcacatttctactaccaacacgcttgatttctgtttggctttttactgtgtattttgctcacatttttatttttcactttctcattttgtaaaatatgtgtccttcaaagctaaggttatttttctttaatcaatataacaatatctgatccatttagcattggcttagttacattattttatagtttttatgtttccccatttcattttttattatttgctatattactcaaattctttttcttttctatccaacaattagatgctgttgatctacttttatcttattcgcaattacctttaaattattataaattatacttgatttatgcctccccaaaatcaatgcaatcacattatttagtacttaattatttactacagtcttcccttctctgtttcaaagtgaaagtataaatatttcccatttcttgggtcactttaaagagaattggagagaaaagctagttaatacatcagtaaaaactgcagtcttaagctatattagttctaagaatgaatccaggagcagaaactattttacttttgagatgtccataatttttaaactgatttataagaagtaattataggtaaaggatatttaccccatgtcatgcagactgcaaacatctttgtaccttattacacattttaaatttttatttggagtgatttttgaagaaatttgaattttttagtcaccaaaatcaaaccaagtaaacagtcaatgtgcataaattgtaggtaaacaagaacaagagttaatttaacaaaaaaaaatgaaaaccaaaaaataacatattttacctttggaaacagcaaactttttaaaatagtagttttggcaaagaagcacaaaaaaggatactctactcatcttacactgctgataattcaaatttggaaaatgtttctgaagggtatttgaaaatgtgtatcaaaattacttaaaatatacattatctattatgaccaaagagaagcaaaaagattactatttcacaaaggtcttttcacaacaagtttcttttgtaagatactaagaaatagaaattatctaaatttctaaaagcaaagcatctaaatgataattcttaaaaattaacttaacaaaaaggtattatgtagtaaggtatttggctttgtccagtgagaagtccagcccttgcccttggcttctgtgtaatagacaggaacatcttaggttaaaggcagggggctggccagaccagacattagggtaggcctgccatacccaatcgtattagcatgggagctggacaaagcaaaaagaccaatcatttagtgggtgggggctttgggtcagagtggtattagtcaacctggcagctgagattaaccacatgaataaccctcagtcgatcatgcctgtgtaatagagtctacataaaaatcctgaacactgaggctcaggtgagcttctctggttagcacacatctataccaggagggtagcacatcctgaggacaatgaaagctttacatttgaaaccatcccatgctgtagcctgtatgttctctcttcctttggctgatttttgacctgtatcctttccctgtaataaagcaccatgaatataacagctttcagtgagttctgtgagtctcctacccatcaaacatgagggtggttttgggaatccccacaacttgcagtgtatgtcagaagtcttgggtagatttggctgtcaggagaactgtgctctcaaatcttgaagtttggttaactccaggttagccgaatattactatacttacagtatttgtatatcacctatgtgactggaagcagatactcccaaatattagcattggttatatctgagtgctaagttattaatgtttgggttactcctttctatgctttactagatttctacaaaaaaaatatttattttgtttctaatcagaagatagttttaatatatggcaaggtaggaaattcattaatctaaaaacaaaaagaaaccagatatcaaatataatatttaaaaccatgattgcaggaacttacatgcatatttttgagtgataactgagtatcatcactatgcacattccatttccataacagttccataacatttaataaagaacaaataaacaagaggatttcaatattacaactgtcaatgttgcatgcaactagcctggcatccataatcctataaaagaaacaaatgccttacgtacatctaccatttctatacactgaaaacaaagaaacaaacagcaacaacaggaaaaaaaacaaacaaaaaaaaaatggaaagagagaaagggtacaggatattcccaaacatagagggaaaccttctagtacaggattctgcatagctaaaatgactgattttcctaaaccttttaccataacagcaatgagcagaaaccatcacatctaaacataaaatttggggtgtgtgtttgcaaagatgtaatactggcataaatgtgggaaagtgaaagagatgagagaaaagaagaccagagaaaaatggcctcagctgtattttccattagctacaattttattactaatggagacatgtttggaattctggacaatataagtgagtttgttcaaaaatcaataatgtcaagctgacactatagaacatacaaaaatgtttccttaatggaataaaaaaagaagtccgagtaagcaggagggggcaaggaccagcacataccttctaaatctaagtccactacaggtggtctcaagttcttaaatttaaagaaaaggtaaaattaccaacatgtacacctcatgtgataatcaattacctaatgtaagatgcttgaaataaatacacttagtatggattatgtcagctcttcaattaggaataaattcacggtcatttcgaaagctgcttttaatggtgttctttgtggcaacttcttttcccctgatactcctcatcatcccaccttaagctatcagtcccccaacagtgaacccaagaaatcaatctcctaatgtataatttgtaaggctcctctgactaacaaatggataattgattccttcaaaaatgctgcatccccacggacccagagaggaatgaataagaaatagaagccaggatttcatttttgttctctcagagacccactagttagcaatctcaacatccacatggttgcctatgcaacttcatgctctttagtcacagttagcaagcacgccacacttacactccatgtgtgaaaagcaaacgtctgttctttcatacttgggaaaagctcattttactgcttattttactctccactgatgatacacccaggagggaagcaagacctccatctggacttaagaagcctatgaaaaacacacctaatcgcaggttttctatacatctacaaaacaaaacaaaacaaaaacaagtacaaatacttattttctcactgacttattttaaaaccagaacagtatattctttttttctttgaaacagagtctcgctctgtcgcacaggctggagtgcagtggtgtgatctcggctcactgcaacctctgcctgctaaccagcagaagaagggattcttctgcctcagcctcctgagtagctgggactacaggcatgcaccaccacgtccagctaatttttttgtatttttagtagagatggggtttcaccatgttagccaggctggtctcgaactcctgacctcatgtgatcctcccgcctcggcctcccaaagtgctgggattacaggtgtgagccactgtacaggtgtgagccaccgttctgcccggccagaacagtatattctttaactataaactctccaatcttttcagttgctctaagatttcctctccagcactaaacccttctttgattcaagatggagaatatattaatcaaacaagcaatcctgaagttggagaactttcatgaagctctcttgaaagtctcacaatacaggttcagtaaatgcaaaagggaagatggaagggctccagccagttccccaggacagccatccactcagtgctccggggcctcccatcactgtcactcctgagtagcatggcagctggctgctgtccacccttccatcgctaactgctctccctaaggttgccaagaacttcagaggctgaagcaaacggggaattctttcagcattcccatccttgactgctttgtgacaactgacgctgctgaccactgcttccttccaactttcttttccctcagcattgacaacaacgagctatataaacactgttgagtaaaaaaaagtaaactgttgttatgtttttattttttgttatatttttgttatttatgggcccaacgacaaaagcgaaatccatcattcttacctagcacatcagtactccttcccaccaaaaaataggctataaaaacatgaacccattgcacactgtttatggggaaattatttaatgacagttactacaatatgcttccccttaggaaaatgggggagaagactttagctctcaagtgaacaatcatcgcaaatattaggaaagagactgaacaaaaatcctacaagaaaaaataatgaatacacgcctagtctgacttcacagcaatattaaattctggatatgttataaatgttaagtaaatgaagatttttaaatgttcaacataaaaaacagaaacaatgattactaaacatataatgaaaaactagttcagaattaaaacaaagtaatgcaaaataaacattaaatgtaaaataaaagagacaaaaattaagacgctgaaaatttcagtccccattagcaaatggaaatatcatattaattaccagacaggctgctggcttttgcttaaaagtgagaagagaggacttccttcattgaaacagtaaaaccatttaatgttttcataccgggaacagatagtgaaaaggaccagacccacccactctctagtccagttcaccactcctgtacttgaagtacacaagtttctcaggtgacctagctctcctgccccagaacagctgagagttgccactgtgttggcagcaactcatcttccttcccccttttgttctcatttaaaaccaagttaaaatatttacagtttgagggttgtagattttttaataactacacatagaattgaataagtacctaggaagaatccagaaccagactacaaaataaaaaagaaagaatttttgggttacaaataccatttaaactgcatcacagtcattcaaccaacaaagaagcctggctggccagcctcagatgtacttcattcctcacgagtgtggatgtggaaaatatatatacacatgactcactattctcttgctcaagttaccatttttgccaattgatgagaaaagatacttccaaggaaccaatcatccaaggtatacaaaggaatggctgcctatttcctttcattccctatgtccatttactagtagacaagaaatgggtcttctacctgaatgacaccaccaaaatggctgggggaagggtcaccaaagctttcttagcttcaaagtcagtggatgcccttcagtccccatggctttctggcacctgaaactctactccactggcttccattacacccacttctcttcatttccttcctgcctttctactcacaacttttgttgttgttgttgttgttttgctcttgttgcccaggctggagtgcaatggcgcaatcttggcctactgcaacctccatctcctgggttcaagcaattctcctgcctcagcctcccaagtagctgggattagaggcatgcgccaccacacccagctaattgttgtatttttagtagagatagggtttcaccatgttggtcaggctggtctcaaactcctaacctcaggtgatccacccaccttggcctcccaaagtgctgggattacaggcgtgagccactgcacccagcctctactcactcacaacttctcagtcaccctttcaggttgtagatcctcagcctgcctcttaaacagcggtattttcaatccagctcaggcctctctttagagctgcatattcacattcaacaactactctacagctctgtgtcaaattgtcaattccagaaccagtgccttcttctgtattctcaatttcacctaatgactctcagtccacttagctatctaagccagagtactaagagtcatcccagagaaatttttctccctcataccccacacaagcaatcaaaagtcactaagtcctatccttctatctctcttaatacctctcaaatccatccttttcccactgctgtagcaaatgatctcttaattgacaccacttccccaaacaagccccacaagcacatcccccgacacacgctcgtcttctccaacaccccattttccacactgctaatcccaaagtcagtcttctaaaagcaaattacacatgttgctaccctgtttaaagtaaattccttaatatggcttttaaacagaacaaccatacatcccagtttgcccttgtgtctatcactgctgtccaggtataattattaagagctgccctttcatcctcattcgaatagtaaaatatatagtcgtcctactgataaagccatttttcactgcgtggctccacctatctcttcaggctcatttccagccagacccaaaagattcacaagattctaaacatcctggttttttgaaatgttttctttaactctatatatttggcttagtataggccatgcatagcctctgtcgcccaccacttggcaaattccagctctttctaaaagattcaatgcaagcatcacctcctatgggaaggcccctaacttcctttctgcaggatggcatacccctcttgtgtgttcccacatcagtctctatccaagcattcctgtttcagaacaataactcactttgctgcttgtctctggcacttaattgtgagcccatgagagcagaaatctactttaaactcagcatctggcatagaaaagctcgatgaagctcccaagggaacaagaaccacaatcattcagagtctgaggcacatctcatgcaatgagaaaacaggtaaatacataaataaacaaaagctctataaaaagacaactaaagagcagaataaaaacagaggcagagttttgttaaaatgttattttcttaaaaataagaaaaaatttaaaggatgataaagcctcaattaagttcaatggaaagagttaacttctgacatgcccctgttcttttgggacccaaggttttcaatactcaactgaaaagatttgatcagattcaagtagctgatgaagagctgacagtccagatgcggcaatcatgtccccgtgacactaattatatttcagaattaacatgagtatgcaaaaaatgtcttcttatgacgttttaaagatgactctatgcctttaaaactgaatgactggccgggcgcggtggctcatgcctgtaatcccagcactttgggaggccgaggcaggtggataacgaggtcagaagatcgagaccatcttggctaacatggtgaaaccctgtttctactaaaaatacaaaaaattagccgggcgcggtgctgggcgcctgtaatcccggctactcaggaggctgaggcaggagaatggcacgaacccgggaggcggagcttttagtgagccgagatagcaccactgcagtccggcctgggtgaaagagtgagactccgtctcaaaaaaaaaaacaaaaaaaaaaactgaatgactatattaaattgaagctctttcaagacaatccagatctttacagaagctgctgtttctacagataagaaaataactgccttatcagtaacaattcgttccaacttgagaaataattaggaaattcaaaaggcagcgatttataagcagaaggggtaagtgataaaaagtggcatggccgggttatgttacatttaatatactgcatgaaaatgtggttgaaatatccttttattccaaaaacaactactgattatctactatatatttatacttttaaaagttcacctctatttatatgtataagcaatgctgctttctaagcgaaaggtatttatttaagttacatagtagctaaaaattagtcataccaatattgctattttaataatatgaaacaattacatgtctactatttgagatgatgactgttatactcctaatacaagagtgcacaaatgctccccaaatatcacagtctattgaactgcagacgattccttcccagtgatttcaaactagctgcagtgcttcaagtagctttatggttcatcagggctgtgccctgatgctacaaaattaaagtgaataatataaaatcattactttaagatatacagactgcatcatttatatatatctccgtagagccctaatattctctaacttctaacatagactgaaaaaactaaatttgttaggaaacttgttaggaaactttagccacttaaacttccattctaatgacctaaaaacaaattactctattagaatataaacgtccttgattaaactttaacatcttggaaataatctaaaaaaaataaaaatcatctgagaatgtgaagaacggaaagaaattttgaggaagagtcatcttgtttggaaagaaaataattttgcccatccatgtcatccctgtttaacaatggagcttaaattttctgtatttatgagaatgcttataaatcagtctctgcttattcattaaaatatcccttcttttttccttaacttttcctctaatcaagagtttttaaccatctcccccataagagcatttatatgctgtaaacttatgagaccatagaaaatgaccatttgcaacttcatttgacccctaaaaccctaggctgctgtgcctactctgtgcctgagaccaacagccccgtgtgcatggctgacaggtaaaaggctcagatattcaccccgctgttgcacccaccaggacggtagaacctcaacagaggcaggggcacggaacggcctttccacctacagaagacttattagatagacattggttttctaaatcctaacaacctttaaaagcacagggaggatttgaagggtttgcctcctaagaggctggcatactgctgattccttgagctgttttccttttgttaaacttcatcttctgcctgtgcctgccacaagcccacggacaatggtagaagcctggctcgcacacagcaccagacagtgactatgtactcaagacagttattcacaatctgggaaatgttcaaaacattacttcaataaaaggaaaaaaacaggcttttggtacaaatcatctcttttattctcatgccagagaccgtgctggatagcagatacacagtggtacacaaaacaaatgtgaaccttgcacttattgagcttacaaatcactgaaataccgttcaagtttaagatagtcaccttccgggatgctacaaatcctgcagttgtcccgtagggtgaggtggatgaacagcaaatctagagttggagctcattttccccagagcttgcaatgcccacatcctactgctactaagagaaagttaaatttctcttaacagttcagatcaacaccttggacaagttgcactgtggtctccccaagatgtcttgaatggttgtttacaatactaaatttggcaggtaagacagaaaactaatgggaccttttatataaatcaaaaccagtctgagcaatggcataaggagccaacaaagtttctctttctagtattcacactatcaatgaagaattgccaagcacctgctatacaccaaacactgcatttggttctgatacccctgtgaaacaatccactttactggaataccattgttaaagagaataaacttttctttccgtatataagtaatctgaaatgaaagacaactaaattttcaaaatggtgacacataatgtgtgaaatatgatttaaaaattatttgttcttaaaccaagtaaatattttccttgcttatacatatatccaacaaagatacaaaagaaagagtgatagagaaagaaaagcagaatgaccaagtcactggattattgcaagggaataatgcagaacaattcaataactgcacttaacaaaaaagcaactaatagtaccaaacacccaacatgatataaagagaatttaaaaaaaatggcctgaatacaaggtgtttgtgtagagtctgtgaccccagtactttgaacacaactctattttatacttcaacacattacattgcaaaccattgtttatatggcaagttccacaagtgacttgacttaagagcagggtctgtgtttcattaatgtaatatccctagcacatcctttgagactgtttgctgaaggagtaagaagcaattactaaatgaataccaaacacatactcttctgcatgagtcatcaagggccatgtcacagagaagatgacaccgataatttgcgtacgcaaagacaagaaagtgcattccaacgagagccaaagaatgaagtctggatacagtgtaggcgcaatgcaggggaccactgttacgacagaaagcagaagtcctgagtgctgcctagaagagctgttttattccacaggcatcaaggagtcagtcgagtgttttcagggaggggaataacaaaatcctagcactgctttgggaagattacttgggcagctgtgtgaaaaagggattaggggagacacaaggcagggagatcagttgggttttactgcaataacccaggtgagattcaataaagacatgaacaaggatgatggcaatataaagaaccagcaaaggaaagaatgagctaaaagaagcatcaagaggatatacggggaataatggaggcagatgatggaggataaaacgtcacagagatggaagaaaacactgagggtagaagagaacaggccttctgaagagataatattcatcaggagtctggaaacacagtctttgcaactaggcaaagtatgactttttcttgggcccaatatttagattaaaaaagagtaggagacttcaccgtgtctggcccagtagaccacaccaaaaaagaaacaaggacttaaaaagataagctgtcaaataatcaaaagggctgtcccactggcaggacttggctgggaacagttcagtgctgtctgtggagccagaactctgtggagaagggacaatcccttccattcacaaaacagacattttcaaacatcatacaaccaaaatgatctgaactattttaaatgataatttagcctagaaataaacactgatgttttagtatccaaatgggtttggtaaaaaaaaaatacagcatcctctagtagttggccatacccttaagattcctagtccacagggcatctatcactacagttccagaaaacaaaattcttccttttttcccagagaacattccctagagagtgtaatgaattttttttctctaacagtaaggcaacagaaatggggttgtcatcgctgagactatataactaaaaaggaaattataagtatgttaatattctgtaaaattaagtcttagatccttaggctcagatccttaggctaccctaatcctaaggatctgctatgccacacctttgagaacaaactccactaataaaagcagctaaagaaagccaaacatatagcagacccatgaaggctgcagagctttctgaacatctcagcagggcccataaatatccctgtttaagttctcaatatacaagtaaatgataccatcaatgataaaggaaaaatctgttaggagtaaaggtgtgttcttatttttctcacttttatttttgatttaatgatagctgcagcaatgctaatgcattctatttatctaaaatctaaacatttgagagagtaaagcccttgttttccacattagtaaagtcacttacctaaaaagggtgggtagtacaaataatttaaataactgagaccaagttattaaccaaagagaaaatgcctaatttatttttccaacatatgacgaagaaagactacttaacacttcacaaatttgactctacttccaccacagaaattattgttataatgctctccagtgtaaaaacactgctttatcaatccccattaaatcattttccaagcagtctctcaaaacttttcaaaagaagcatcttacaagccatgttgcaatgttgctacatcgaaaagacatttctgaagtcaactcactagacctgcactgggatcgacttcacacacctaattactcaagcttaataatgttcttaaaatactatttgtgtaatgtgataaaagatacccactcctcccaaataaacacaggagctgagggatagggaggcagcaaaatgggtgtaagaatgggtgtgtcgcagaagcttctctttttttccccttcgtttttctttctttcttccctacctccctttcagtttgcctaccccatatacaattgaacattattaaagccaaacatatgaataaattcaaaaataatagttcttcaggaagtgtagtaaacatgttcagttggactcttagcttgatccaccttctgataacgactaatgtttactaagccttatgttacatattttacatgtattcgttcatataattctcaaaaccatcattgaaatcaggtgtgattatgatccacactttacagatgaagaaagtgtggtaacacaccaaactaatgaacgtgtggcagggctggctggctggcgtctgaccccaagcctggcctgcgtgcagtgctgccacctccagaacccgtcaaccatccttctgctggacattaccgccccgccagagtttcttctctaatcattatatcaccactgctctttctacatccaatctgggatagtagattccactaatgcaatggggtcaagggctggacaggagctaaggaaagaaaatgggaaatcagtaggttcaagggactcattttcgtgtaattttttttctggcaaggtaagaacttcagtatctgtcacaatatcaaggaataaattcttctcacagtccagtgagaatttttttttcttgaggaaaagtgaagacaatgtaaaaagcaaaactttaaaactttagaaggacatacaaagaatattgaaacaggaaaagttccctcatctccttcacagggcatgtgatgggagtgtggctcacttcttcggtgccctgctgctcaaacccctaggaggaacatgcagatgggtgggctgtggtgctcctgaccccacggcagcatctaggggtgaatgtttaagcttctgaagccccagtgggggtgtgttacaggatgctcttttagtttagccttctgtaggtggcttgtgttagtcagctcaatcagaccccctgctttatagcaaggacaaagggctttctgtatcctagggtttcttgccttgaatcagatcacacctgggcttggagaattactgcaaggttttattgagtggtagctctcagcagatgggggagcccgaaaggagacagttttctcctgaagtctggccgctcagtagcccggcctctcctccaacctcccaggccaaactctgtgttgttctaccagttgatggcctaccagcgtgccggtgtctgccggtgcctgctggcatgctcttcaaccaatgtgctcctctcaacatcccgcttgtgtgttcttctgctgatgtgctcctctggacgtccagctgcttgtgtctctgcccactagggcctcaggggttttataggcacaggatggggtgtggcaggacagggtggtcttgggaaatgcaacatttgggcaggaaaacaggaattcctgtcctcacctgggtccttaggtataggcccaggggtggagccctagccagagacacacccttcccttcccagcacttccttgccccccttccatatctttacaactttgtagaagcaaaatacaattttcccttagaagacacaaaacacacaaactgtaaatgagaagactgatacatatttactgcattaaaataaaaaatttctgaacctaaaacaccataaatgggaaactgaaagataagcccacagactagcagacatttgtcactcttcaaataagaagttgtgtccaaactttctatgccttccaccctggaggacagctccctattccctgtcccagcaccaggatctggtattgatcagacttttaaatgctttgccaagttgatggttataaaatggtaccatattgtcttacttcacatttcccttattattctgtgttactaaagaaatcaagggtcttttcacatggctactgggcatttgatgttcttctgagaagcacctgttcatgtcatttgcccaatttcattctgagttgtttgggttttccttatggatctgtaagagttccttatgtaggtaacattttaacaaaaatatatatactcttaaaacttggtacaaacaccttctaattaagcttttaaataacttaaagatcaaaacgagtgtacaagcaaatgaaaaaaatttcagatttaaaatattgagtgtgaaagtcaatgtctccctaaaagcaaatcgtagtatttcatttaataataggaagactggtaagtattaaatttgacttggtagcgacttaattcttctgattttgagccatcacatgagccacccctgatcaatgttatttctgcttgtaaacaatgaattttttaattacaaatcaatttagaactttacacatatactggcaaagtatataaactaacacttctcaagagtaaacagcctcattagtaaccagaaaaatacaaactaaattgataaattcccattttctagaaatctaagtggcaatgaattttcaaataacaacagccaacactggtgatgcgatataatgataaactctcagactgctggcaggaacatattttggtataacctaactgcagggaaatgtagcaatctgcaatagaaccctaaaaatgtttacagcatctgtccaggtgatttcacctcatagaacttattcaaaggacagagtcagtaacaagatccccaccccacccaaagatttcacatcactcactatgtgtacaggacactgaaaagttggttcctgggcaacttaaagcagtaacaaacctgctattttctgtaagaaactccttctatataattagggtagaactcacacacatgtctgccactgagcaatgaaaagtgccctgagtaatatattaatttttttccacatcagtaaagtgaaatcagatttttagattaccccatagggcatttaattcttttcctctgagatgaaactccaggcaaccactgatctgctttctttgactacagatttgtttgcattttctagaatgttatataaatgcaaatgttataatatgtagccttttgaatctgccttcttttacttaacacaatagagctgagattcatccatgcttagcacggatcaatagttcattcctttttattttgagttgaatgaccattgtttagatataccacattttgtctctccattcacctgcaaatggacgtatagattgtttccagtttgggactattacaaataaaactgatatgcatattcatgtagaaatctttgtaggagtatattttttcattctctaagtttagaaagggtggaatgtatgataggtgtatgtttcatgttttaaaattttgccaaactgttttccaaagttgttacactatcgtacatccaccagcagtgtatgagagttctagttcctccacatcctaaccaatacttggtatgattagtctttgtaattttagccattctaaaggtatatttagtggtatgcattattccattttaattagttttaatatgattttttccttgctataaattaaacttaaaaaaagctaaagtgttaacatttaatagctgcccatggaaataatgaaattcatcttaatagaagtataaaataaagactgggcaaccaaatgacaagaatgttgtggaagtatagccgcaccagaacaacatggttcaacttctgggtgacaaagttgtgcgttttcagttgccatggaccctcagctcatgtaacctgagcatgcccagatgaaccaagcatgcaaccacagggggaatctaagagcaggatgaattaagaagcgaacaccacctaacaggatccaggatccaatcagatggagctctagcatcaccccaagtcaggatccagtaagatcagacctcccggcatcacctcattgcaagatccagtcagatcacacctcattatcatatgcttataaaacctgacccagtccccagctccgggagacactgctttgagaactatccctggtgttctccctacttgttacaagcaataaaatccctttactaaatactaaatcttactaaatctccttggttgtggtcattgggttgatacctagcccaacaatcaaaccaacctcttgtgtgggtaacaagaacttcatgtcttgagtggctagatgaaaaatatccattaagtattcaactatcctaatatatcatgatcctattaaatgaaaaacattagaaattatagccaaataaataagttctagagcaggtgaataaaacaaagctacacaaacagaaaaacagagcttgtttaagaaagaagtatacactaccattttgaagtataccctgtcatggttcccagagactaagaagtctattattaacaaaacaaactcaagcttaaaattatttattgttaaaccatatgcacagacactcatactttatccacatatctggtccatgacatccgatttaccatcatccttctggttcatttagttccctaaatactctgaactccaaagtcagtcaccacaaagacactcccttgaaaacactccattctttttcctttggtcctttggctaaacctgccaaataatttgctcctattgcatctcaccatccattctttcctctccactcccctactcccaagatactactagataattaacacaatatacatgaagacaagaagtccatggtaaatgttcctcaccctttggtgattccctgtttcataagaagaatgtggccgggtgcggtggctcacgcctgtaatcccagcactttgggaagccgaggtgggcggatcacaagatcaggagatcaagaccatcctggctaacacagtgaaaccccatctctactaaaaatacaaaaaattagctgggcatggtggctggcacctgtagtcccagctacttgggaggctgaggcaggagaacggcatcaacctgggaggcggagcttgcagtgagctgagattgcgccactgcactccagcctgggcgacagagcgagactccttctcaaaaaaaaaaaaaaaaaaaaaaagtatcactgtcttaactccactctaacaacctggaaaatacacattcacctttccagattcacctcaaatttcactttctacaggttccctgtctcccaactgcaaaggtggagattcctcccctaggtctacaccttattcataatccttttaaagctcttactttgcaataatggccttgaaccccaaagaaagaaccaccagaactgagagtaccctgtactgaagaatgaaatccaaaggcttcagacaactaagccccagtctactacccaattcagagtcatgttccacaaagttaaaattacttcaaccctgactttgaaatatgtgaaataccagggtaatttcattcagtgaaggaatattttcagttttagctatttaagggatatttgcctaaatgtagttaccactgaagggtcagatgttaaaacattcagtaagtatgacactttactctaaaagagagaagcatccttaattctgaccatgttttcttagccactttggtgcgtagaagccatcaaaattatcaagttatctataaatacttaacccacaaacttgagattattttttaatgcagacaactggaaatatgacttgccttggcatcatttatcagaagttagaatgatttccatttaagtaattttcaattcctttgacacatctcttatcactcaaaatacggggttcaaatatagaaaacaagttctttaaacacacaagaatctgagacctgtcaatcagtcttaaacaagtattacaggcactggcacacttgagccaacaatgaaccactttgatcatatcaaaaagatacatgccctgcttgccaattaatgatgccacatctagaacagcatactacagatggtatttgcttcaggtcgataagtgagtaccattagaccaagagtagagcagggttctttgttcaaggatacatagcttaagtttatagatctgctccaaagattctttcaatgaacagtcacccaacatcacactggccacattatgaataagcccaaaagagttaggctgtttaggtgaataatgaatgtatggcatctgtattaactgtcaaagagatggtcatggccatacaatttcctataatgtacacacaataatcctgatatgggagaggaaggtatgaaaaaaaccttgattatctggaaaatagtctaaatatgtgaaactgcagatttggaactatggattagttcagcgaacttctatcaatttcttatttctatcagttcaccagcttttatgttgagcactgatgatgcagagataaattacacaaactgtcctcaggaaattagcattctatgtggaaaatgacattgaggcatataattgtgacaaaagtaccgtacgttcaagaagtggagaaaaaaaaaaaaagcaaagtggaggtaacacaaagaaggagatggttaagccatgtaaaggataaaaaaaaaaagtgggccaggcgtggtggctcacacctgtaatcccagcactttggcaggccgaggtgggcggatcatgaggtcaagagatcgagaccatcctagccaacatgatgaaaccctgtctctactaaaaatatgaaaactagctgggcatagtggcacatgcctgtagtcccagctacttgggaaggctgaaacaggagaatcacttgaacctgggcggcggaggttgcagtgagctgagattgcgccactgcactccagcctgctgacagagtgagactccctctcaaaaaaaaaaaaaaaaaaaaaaggtgtttgtgaatactaaaaatgaaatttaagcagcttaaaggaacactgaatcttcacgatgatactgtcaaagagagaggagagaaggaaaatgatcatttcttttgctgaaacatgaaaaaagagatgggtgatcctccagacactcatacatcaatccaaagcaaagagaaaagaggagctgatttatattagaaataaattcttcgcagccaaagaaagcaacaaaaggtcagcaatacagtccaaaagatggtcgagtcccaaagtccagggagaaaaatgaaaccatcatcactcacagatgaggaaccagtcacaaaaacatgttttgaaactcaggttagggaagtgccctaataagaatgtttcgctacataagggaggtcttgaatgtacaaggagataagggtggaagagtagtgggcatggaatacataaccagaacagctcaagcccaatttacacacttccttccctgataccgtttgcatctggaatgatcttttaaagtctctttagcttctaaactttgatgactttatacattacccatagcaactagaaaatgtatgagtatatattaaaaacttaaatactgctgaacataagggttactttccaaaagtaagatttaagactctgatcttatattagtcagcttgaactgccataacaaaatatcatagagtggcttaaacaacagaaattctcctagttttggagactggaggtcctcaatctgccagtatggtcacattctggtgagggttctcttcctggtttgcagacagccttcccgctgtgtccttatatggccggcaggaagggggaggaagggaaggtctctcctgtctcttcttatgttggcactaatctcatcttgaggactccaccctcatgacctcatctaaattgtttttaacttgtttttgtttttaagagacacagtcttgctctgtcaaccaggctagagagtgcagtggtgcaattataactcactgcagcctagaactcctgggctcaagtgaccctcctgtcgtagcctcctgagtttacaccatgcctggccctcatctaaatttaattaccccccaagtccccaattctaaataccatcacattgagggttaggacctcaacatatgaattaggaggtggggaagaattcagtctacagtagctctcagtataaaatttctaattatacatccaatggacaagtgaaggtagaataatacacaggagaacagagaaccagctcccagaggcctcctgaaaggtagtaacagaaaatcaccagttccatggttatgtttcaaaacaatattatcagccaatatatacttactggataccaaacggcagcagagaaaagagaaagggtggggaagaggagagaagtataccaggagacatggcaactatcctccaagacgttaaataggaatgtgaggctggtactgacactatgaggggccacactacaagtgaaatagtagtaatataggagtttacaggaaggaaacacctcagggctacaatccaggggaagtaccttgcagaaagaatggagattcacagaagtgtattctagagagaaaagaagtcatcaaaagcttagaaacaggcaagcccatggcaatatttagaaggtagtgagcagataaaaattactagagagggaagaaattaaaactaagattagaaaggtgggtttcaccaaatgatcagggtctggaatgcttagctagatagttaggacttgatgtgggaagtaacaaagaactgtgaaatgttctcagagacacaatggttagatggacagaggtctgggtttttatcagcacatgaacacgaaaggtatcagcaactaaggaatacagtccattagtttaatctcaaatcaaaaacaggaatagaaataccaatagattctgctacctgacaaggagaatcatcaacccacctctgcctcaagagtttaatttcaaaaatttgatatttatcttaacacaaaatggccactaagctcctgttttgttttaatctcctttttttgtaatcatccattttataaatatttatataatgtctcttactatagtgccttacagcaaaacctcatcattttctatttctagcaaagaaagaaaaacacataaaggtgaacagtagaaatttatgtttgatcagcaagttgtttgctctctcactagcacacttaaaggaataaatatttaaaacacatggcataatgctcctaaatatttaacagagacatggcacaataatttgatcactgcttcaacataagtacccttaattaacaagttttaaattaaaatgcttaaataaattggaggctattaaagaaaaagtaactacagtcatgcactacataacaacattttggtcaacaagagaccacatatacccactgttgactaaaaagccaaattgtaaaatactcgaagagatttattctgagccaaatgtaaggaccatgacccatgacaaagcctcaaggggtcctcagaacatgtgcccaaggtggttgggttacagcttgattttatgttttagggtgacataagacatcaatcaatacatgtgaggtatatattggtttggtccagaaaggtgggacaactcaaagaggagatgagaggaaagagggatggtttacaggtcataggtagattcaaagatgttctgactggcaactggttgaaagagttaagttatcagcagaaagaatcagcagaaaggagtacctgggttacgataaggagttgtgaagaccaaggttcttactatgtagaagaagtcttataggtggcacccttagaggtaatatacggcaaacgtttcctattcagacctttaagctactctcttcaggatcagaaaaagacctggaaagggaaggggattctctacagaatgtaaattttccccaaaagagacagctttgcacagctatttcaaaatatgccaaagaaatatatattagggcaaaatactttgacttctttcagggcttgctatctgtcatgtgatgctatattagagtcagtttggaatctggtatcttatttcctttcacactacaaagagtctgttttgtcagtcttaagatctgtatcttaatgttaatgccggtcagttgtgcctgaattccaaaaagaagagaatataatgaggcatgtctgactcccccttcccgtcatggcctgaactagtttttcacgaatcctaagaggagtccattcagtagactgaggagcttagaactttatttttggtttacaccatagactacagtggtcctataagactgtaatgctttacaagctatcttttcctaaacatttaaataaaaaaagattataatggagctggaaaattcctaacactctgtgtcactgcagcctagtaacagcacagcacaacatgttactcacgtgtctgtgatgatgctagtgtaaacaaacctagtcagctgccactcatataaagtctagcacacacaattatgtactacataatacgtgataatgacaataaatgactatgttgctggcttatgtatttactatactatatttcttattggtatttagaatatattcctcctacttataaaaaaagaagttacccataaaacagcctcaggcaggtccttctggaggtatcaagaagaaggcattgttatcacaggagatgacagctccatgtgcgttactacccctgaaggccttccagcaggacaaaatgtggaggtggaagacagtgatattgatgatcctggccctgggtaggcctaggctaatgtgtgtgtttgtatcttcatttttaacaaaaagttttagaagtaaaaaagaaaaaaaaaactaaacagaaaagagcttatagaataaatacataaagaaatattttgtacatctgtacaatgtgcttgctttaaggtgtgctattataaagtcaaaagttttaaaattaaaaagtttataaagtaaaaaagttacagtaagctaaggctaatgtattagtggagaaagaaaatgtttaaataaattgagtttagcctaagtgtacagggtttataatgtctacagtagtgtacactactgtcctaagccttcacattcactcactgctcattcactgacccacccagaacaacttccagtcctgtaagttccattcatgataagtctcctgtacagatgtatcatttgtcatcttttataccatatttttatggtatcatttctatatttaggtatgtttaaatgcacaaatacttgccattgtgttccaattgcctatggtattcaggacaataatatgctgtacaggtttgtagtctagaagcaacaggctataccatacagcctaagtgtacagtaggctgtaccacctaggtctgtgtaagtagaggctatgatgtctgcacaatgacaaaattgcctaacgccacatttctcagaatgcatcccactgttaaacgacgcatgattatactatgattaatgtggttatatgggcataaatatcgtgggaatttaaaaggaatctaagattttataagaattctgaagtcacgttattttactctgagttaagtaaaattgctttagcaattaagttttgagttaacataaagctatatctagaaataatctcaaaaaaccatttatggccaaagtatttgaattaacatatgctgaatattctttcaaatattctgaaatctgagtattaatatacataataaagtatcactctagcagttgtcattcttcagcaacaaaagatggccgtataaaacagaatcctgtcaaccttcttatgtaactgtagaatatacagccatgggaataacctcagtgtcacgattcatttacaaaatgatctctgaacaggatgtcaacctaggcaattaggtattattcaatattgagtagcagaaaggggttgcttcaacaaacaaggaaaatttgagcactgctcaagctcaaccaaagacatgtacacatgtataggtgcttgtgcaagtatgtgtgtgttactgaggtacaacttatatagaataaagtacaaagatctcaaatgatagcttagtgatttttacatatgtagatcatgagaaaaccaccaagacagtattttcagcactccagaagactcttctgtgctccctcccaggtcaaaccattatttgaactctattgctatagtttagttttgctttttcttgaccaccatatagaagttatcaaacaacatgaacacatttgggtctggcttctttggctcaacattaagtctataaaattaatctatcaataggctgttctttttaatttgctaagaatgcaccacaattatccattctactattgacggacatttgagttagaggctattaggaattaagctattattaacaatctgtttgtgtgtgtgtgtgtgtgtgtgtgtgtgtgtgtgtgtgtgtgtgtggacatacgcatcgcaagcatttttgttgaatatgtacttaggagtgcaaactgccaggtcgttaggcagacatacgcttggcttcagtagattctgccaatgatcacgaaaaagccatggcctaaagagaactttcaaaaacagactatcaccttcttgagtaaggtaaacaaacacacaaaaatagcaccaaactatcttcctcccttgccaaaaaaaggtgcaaagctatagagagcttaattttcaaagatgtcatatagtcaggactgaaaaaagaactgaagaaagatttagacaaatttatggatgatactataaattacctgaaagaggatggatgtaggatatactcgacataaaacagacatgaaagaagatataactgaaggtttatactgaatagatacaaggactgacttttggcaatggaaccaatggtatatgtccatgaaccttagcaagcaaacactgcaatttctattcaatatcaaaaagacagaaacagagtgtcagggactcatttaatgggagtaggaaatgtaagaaaccacacagtcaatcttttttaaaggtgagggggcacgcacaacaccacaaaaacgacacctggcccagtaccaggtacacattttaatggatggcaactgaaataccaaatgttttggtcatcaagatgcatgtccagtgtccagtgggtagaagagggaaggtcaaaagtatattcctcttgcctcaaagggatttgcctgatgcatgagtatgattagagcacataattccctgtctgtgttgctccaaagattgtcctcgttccagggttccatttcttttcagcaaaacaaggcatccctttttctttcccatacaacgtgtcagctttagaaactgtaatctcctttctaaactatatcaatagatggatattttgacaagtgctgatgctttcttcaaaaaagtagtatttgtcccctgaaatgatcacctttttcataccaagtggttgtgtcatatttacacaaccatggaagttcttgacacctttaaggtacaccttcacaccaaaatcaagcttcaaattcaatagtaccttcatcctcaatgattccaaatcacaattaaaaaagaaagcctggttctttgctttcaatcaatataatcccctaacagtccaagcagcaaaacagtcacataaaatattttagctttgtatatttagaagagagaaaccgatccagcaaggtgatcaatcaattttcaattacatttggcatctcaacaagaagacagggcatgtacttacaactgaaattagtcactaaatgagggagttcatactttaaggattccacaaacttccagagtatgtaaatttgcactattattcactaagaaagcagcatttttttcttttaacaacaattcacctagacattctacattgtcacaattttaaaagaatacaggagtattctaaatgcccgaaattaaagccaaatagatgactataattaagtaaagaatttgcaattaaatagatgtatagatttttacatggagtttgcatataaaagatacccagtcaaaatatataatgcatgtatctagacccctttctttataagttcacctttaagttttcagaatatattataaagttcaaatttatactcttagcactctgattgaattaataaagatcctctttatgctattaaaacaaactggtaaaccaatattctaaaacacaaatacttaacatgaagtttagctcatacattattttatacagaatacttactacatcaaacttctgagtgatgttcccctggacatcaagtaaataaaccttgccataatgtgtgcccaatgccaaaaactgtaagaagaacaaagaggccagttaattaattaataatactattaatacacaagtagtaacaaaaccatttttaaagacaagatgcttaatgcataaatgatctgcaatgtctcaaaagatatgcatgccttggagaaggcttgtttccagcttctgggaaataacagaacagggcctattttattgtgatagtgcaagccagctgtcagaatgactcatgaggaccctcatctactgacaactaatggtgtgtatgcagtctatacacaatgcctgatggactgaggcagtaaattaaatgcagcggtgaaaacacgaccaacctacagttgaactcaaagtgagaaaagaatgattcagaaactccccctaatttatggcaaatgtgtaaatcagtgctatcgcttaagctgcacacatacacaaacaacaaattattttttcgaatggaaaatccatgccatattgagagaccgaaaatctcaggtgtacttataccatcagttagctttaggatgcttctataaaagttaatatataatgttgagtgttaatgtttatattatcatgcaaaataaaaacccttttgtgttataaaataactgtcaaaaaatactcattttatgtcgtaagtcctactgtttctttaattctctgaactaaccttaagtaaaccagaagaaactttaggactacctgaaatatgacatgagagttttcttcctttttatttatttcagcattactcaaatagtccaaaattctctgtatttcattgcatgtgagcatgcttcattgcaacccataatgaaacgctcaaatttacaggcactactaagtgtttcagtcaagcagcacaatctttaaaaaataaccttacagaaagtcaagatttaaaaggatttatcaaaatggaattgcttaaaatgaaatttcagttcaggcacttaaaatatgaagctacattaaagaggagtcacaaaaagggaaagaaggagttcattagaaattcatcccctgcaatgcctttcactcctgcaaggttgccttttttcaggaagaaaaaagtccccagggtaaaaaaaatcaatactggttaataaaacatcaggtgtgcagacataactaggtatgacgattccgctgcacaggcctgcctgaatgcaccaggtgccatgacgattagtcatccagggcagacagcaagcctggtgaaaacacaatgcttgggcgctggaagggaaaggggaaacaggtaattctggggggaaattagtctgaatagttaaaccaaacaggaatgtttcctccaaagcaaaagaatgttctaatcagaaacagagaactcaaatgattgtaattttacctctacagtgacactgacaatatttaaatagaaaaacaccacatacgataagaattgaaaacaatactccattctgaggctatctgtggtaaaagaatgggtcttaaaagctcactgctccccaagtatttcacaatattgattctcctcataaataccgtatttagtttgttaggaaactaagggagaagggagcttggatctttaaaacgctttaatgctgccattctctgacacctctgtaaaggccacttttgaacttctaattacattttattttatggaagtcagaagttttatgtaatttacccaagttttaattccttcccttcttttttctaaatttctcatttcattcatttaatctttaaaatagaaagaaaacataaaataattattttgactttacagtctcatcctaaaactaaaactatgttagaacattttggaaaaaaaagattcagtgatttttatgacaagctatcttgtgtttaggaaaacatttcattatcagattagataaattagtgttatccacttttagaaatatatactcttcaaaaaaagtttactaagccaattatagttatttaactaccaatattatggatgagtcatattttcatcatttgctaatactttccactacttaaaatataacaaaaaatgcaaaatggccacaaatgtgacaacataaatacaaattctcaaattttacccaccttccagccattaaaagccttgaacttttgtaattattgagttttgtttctttttttttttcacctgaatgtacttaaaattcaagatgggcaaagaataaatataatttcactagaccctttcatgtttaattacagaaacttgactcattttctatactaccagattgggcatcatccactaagcacaactgcttttaccttaaacttcatgtaagtaacttaagtaactgataaatgtacatccataaagactggactttatgtaaggaaacaagcagaaaaggtgataagcagtcctttggacaatgcaaaggaaacaagagtagtccattttaaatctggtcaactgtctaatatcatctaccttcacatagtgttttatagtattcaaagcattacagcagggagtgccttcaattacacatgaggaaataagctcagaaagttgatgagacttccctggaaacagtcgatgagtagcagaattaggatcagaattaaaagctaaaacactcaactggatcagaatcctcttaaatagaaacatggacttcagataaagagtgcatgttctaaaagttagcattgattacagttcccaaacatcaggctctttggcaaagttggtttacgtacaatgttaatgaagtttgacctctaggcaggcaaactttgttctccatttcattcattcactggttcattcaacaaacacacacaaaaaaaaacactctataatacgcttagacaatgaccaagtgtgacttaaaagggttatggtataatgagggaaacagacataaaaatggattaattacaattaaatttaaagagaatgcttaaaatggaagtatctctaagaccctatggaacatagtagatgacagctgtgctgaactttaaaaaagaaattagaaaatagacaccaaggcagacagggtaggcttgtagtaaaaaccattttaggcagagtggctacaacttgctcaaaggcacagagacacataaaatgcaggacaaagtcaagaaattatggatgacacatctaattcatgcccaggggaagagacaggtgataaggttggaaaggtcagctaataagaggcattcaaatatttatggagagatgaaaggcaggaaagtagaggaaatcagggtgggaaggcccaaatcattaagtcatcaagaagccaataaagaattctaagaaggaggattacatgatcaggttgaggtttctggaagattactttagtagaatgttatgaacagactagagtgaaagcaaatctgaaggaaaatagacaagttcacagtatgtgcattagttcccaggaaaaataaagaatacctgaacaaagaaaagagctccagatgtgtgtggatcaagcagaatgtggtgttgtgaatagaaacagccaagtgttgtggccagagcaccacacttatggcagaaagtggttaagacagaagccaataatagacagggagcaagatcttagagagccttagatacaacattaacgagctcaggtcttatttcgtagttgatgaaaaatcatacaagagttttaatatctgtattttcagcagattattctggcaaccaggtggcagatgggtttaaagtagaaaaattagaggcacaagagattcttttatttactctgtggaggcagtagaagataagagcctaagccagagcaagagtagtaagaaaatcaccaggacttagcaaatggctgggtgaaagcagaggattcatccgtggcttaggtgacaaaggaggtggtgatgccaccaaatgggataaagaacaaagatagatccaagtttagagggaaatgaaaatgaattcattatggacatgctgaggttcaggaaaaaagacaacagcagataaagatgtttaagaggcaactaagtaaatatgcatgctattccagtgaaggtcagtgtgcaggtggtcacagaaatcctgagatttaaaaccaagataaagtataaattaagaagaaatgtggataatggaccaaatcctaggaaagccaacacgtaaaggaaaagtggaggcaaacaaaggaaagtgaaagaaacagaaaggaatgtcacaaatgatcaataggaaaagaatggtgtcacgataaagaagttttgagaagaaaggtgagatccagaatttagaatcagcaaaatgtccatcagctgatgaatggatagacaaaacatggcatacctatacaatggaatactgttcagcaaaaaaaaggaatgaagtactgatacatgctacatcatgaatgaacctcaaaatcattacattaagtgaaagaaaccaaacacaagagatcaaataatgttgactgcatttacatgaaatacaccaaaataggcaaatctatatagatacgaggtagatttctggttacttggaggtagcattaggtatgttccaatatatagtatgcatctctgggaaacaagggaggaaatgtgatgaagtgaagaacaaaagattcatgaataggagaaagaaaatctgtgggtggccaggtgtggtggctcacgcctgtaatctcagcactttgggaggctgaggcgggtggatcacctgaggtcagaagttagagaccagcctggccaataggtgaaaccctgtctctactaaaaatataaaaatttgccaggtgtggtggcaggtgcctgtaatcccagctacttaggaggttgaggcaggagaattgcttgaacctgggaggcggaggttgcagtgagcccagattgcgccattgcactccagcctgggcaacaagagtgagactccatctcaaaaaaaaaaaataaataaataaaagaaagaaagaaaatctcctgtgggtaagaatgggtgtgaaaaagaggtcaggaattgaggctgttcatacctgacattttcaatcttcttacatagaaatgacatcatcctctaagaaagaagggacaatggttcagaagagggcctgaggactaaagaaactgacaaaggacaaataattcagaacaatttttagtgacaactttacctaggtgtgtgagtctataccagcacatggctgcacttgtcatgaaagcactaattcagggttgagagtatggctgaggggcacaacgggaagacagggatgtatgagaactgaagatgctggtaagatagagttaggataatcaatcatttcatagacacagaaaaataaaagaaaaagaatgaaaggattagagatcaggactccataaagtcatatagcttgtgggaaaatgagcacaaaagcttgaagtataacaagggtcaacagagagtgtcacagaggctaagatcctcaagttccagtgctgacaccatccaaagtgtggccttatcaatggggagatgaaacagagaagaggtaagggtcactggaatgaaatttggttgaagaactacaaggccaatattcaatgagtgaagaaaagggaccagaagttggagaatggcagcaatgaaaaggggtcgatggcattgcagccaaatggctggcatctcaaaggagaaggttgctggtaaaacatgagaaagcaggcatacattctaataaagtgttgggggtacaggactctatttacaatgaaacaaaatttgaagtaaaaaggaactgggtgggaagcaagcgggaggatgaggccaactgctagtaacataggataaagccaggagatggatcagacaagagcagtttgctttttgtggaaggagtaaaacttacaaggtcacagggaagaagagagcaatgggtgaagctccctgccccccaatattctgactatgacacaaactgttttggtccaagaataggctaacggtgctatctagtacttaccctggactcagaaagttggtgagagctttgttacggcaaggacccagatgtggaataaattcattcattcgtataagtaataatttggggcatttctactattcataacacctacaatgtaatcccttatactttccaataataacttaataaaagaataacttaataaaagaataacttaaaagcactgagcttcccattatttctaatcttaacaggttcctaattgaatccttataatttgaggaattaagtgagcgacagagttgccaaaacccgtttcatataaatctttgactttgatcactgtctacattctacttaatacagtcttggagtgtgttgtatgtgtgtgaatgggcgcgtacacacatataaaatatttggggttttttgttggcaaggaggaagagagcagtggcaaggagacagaatcactgtaaaaagccaccaccaaaaacatcaggactccaaagcacaagcaaatttacaatggaaacaatttacagaagaatcctctgaaagtgctatcttaccttgtcatggactgtcatgcagctagctgcatccttctgaagtatttcagttaccccattggaaagcctttcatacttcagcttgggttcctcttcgctctcttcttcctgcacaaacggcaaagaaaaatgacacccgtcagagatttatttgttttgaaaacctcaaaacacacttcttacgagagaaccagagatggttccttcaatgatgttaataattccaactacagctaaaggttaaaatcttcatatttcatcttgcctaggtatatcaattgctgtaacttcactggtaaaataaattcaaaagttgaaaacaagagtatacagacttggtgttatattgtcactaactttacatgttcaaccttactatttggtacggcttcataaactattcttaatcctcacagttatggaataaagttagtaatcaatatttactataatggccttgaattaataaatcaaggagagttgtaaaaattattataataatgattcagagtaagattttattttacttcaataagtaataggaaacaaaaagtttacatatggagaactgtgatggcataaaactagccaaaacagaagttcataaaaataatctactcattgacattagctagagggtgaagactatggaattaccgtggtttgtagagtcaaaaaaccattcaaaccaccataattgcatagtcttcaccctccagctaatattagagtagcttgaggacatcagtgctcccaccacaaataaccagaaagtcttgatggaatatataacaacatctatccaaggcatcaaagggctgctgaggcaacctcaactagaaggatcaagattccagggcagcagagaattgagctggcattctacagccactttcttcctggaggcatttactaattctgggtgtaggacaagaggctgagaacccaagctctgcctgggaagacagccactgccgggggtagggaaagcagcacaccttctggcacttgcggggatggagtgacaaaactggagagagacctgcggggctaagatatcagtggaagagaggcagagacatgagcttgttacacagctacttttccctgtaagacaactgtcaatttctaaagctgcaaaggatgaagctaaaaagctgaacagaaagaaaaatgcaaaccagctgccttgatgtgttaaaaagataagaataagagttcaagaggcatcgggaaattggatcctggtgaatatcacagtcttagttggaacccctggtccccagaggacacaaaaacttaactcccttagagttctgactcagctcaatctttgattggagtaaggtatataacccccaacataactgtctagtgaaggaaagggtgactcctcttcagagaaagaaaactactggggcctctacaatttttcatgtacagtactaaggattcaataaaatattaccaggtatgccataagacgggaccaaatgaccaaaaatcaggatgaaaaaagaccataaaaataaacaaatgggtgacctagacattgaagttagcagggctttaaaataactatgactatatgttcaaaaaaaaaaaaaaaaaaaaaaaaacagaaaaagacagaaagctgatgaaaagatagaaattttcaacagaattctaatctgttaaaaaaaaaaaaaagaatcaaatgaaattttttacactgaaaatgttaactgaattaagaagtcaatagatggtttaatataagattagcaaaacagaagacaaaataagtgaaatgagtaaaaaaaaatatccaaagggaactccagagaagaataaatggaaggaaaatatgtaaaggaatctatgaggcatgtagaacacagtgaaaagctctaacatacttttcattacagtcccagaaggataaggaaaaatggaaaggaacaagagcaacatttaaagagataacaacagaattttccaaaactgataagacatcaacctacaaactcaagaagctctgcaataagcaggataaatataaagtcacacctaaggtgcatcatagtaaaaagaaaattaggcaaaagaaaaacgacttgtagagtaataagtgctctgcctatggaagattataagactgatgagacacactaggcagagactgcaaactcaaattcttacagaagtcttcacctgtggggcaagggattgcatcttcacatggaaaggggttaatctgtggattaatggaaatgatggagtacatcaagcatcatgctagagacttaatatcagatatctcatttcatcctgacttaaaagaaaaaacaaacaaaccctactgagagttaagtataattatcctgttttacagattttcagcaaaaactggtgatcagagattttaagtaatttcctcaagacatacagtgggtagaggagaagctaaagttcaaattcagctatgagtgctctaaagtcaataccttctataacacactccaaaatctccaaagaaaatgatgctacaaatcacaacagaagcctattctaaacctagaaataattataaactgtgtgatcattagaaaatgttttaaaatatgtttatttagcaggtgcattagctagctattgttgtgtaacaaattatgccaacacttgctgatttacttactttattattattttctataaagatagagactcattatgttgcccaggctggactcaaactcataggttcaagaaatcttctcgcctcagccttccaagtagctaagactacaagcatgtgccacactcctggccaccaaaatgtactgatttaaaacaacaataaatatgtattcgtttacagtttctaagggtaggcaattcagaagtggcttagctgagtggttcactgaggacttctcacggcgttgcagacaagatgtcagctagggctgtaactatcagaaggcctgactgggtttagaggatctgcttccaagatggctcaatcaaatggctggcaagttggtcctcactgttggcagaagttgccaacactcttggatcactcactccggaggaagccacttgccatgttctgatcaagcagccctgtggaggggtccacgaagcaagagtgatccaagaggaaacaaagtggaagccccatccatgtttcatatggcctcagatggaacactgtcatttctacaatatcctttcagtcatacgggtcagtcatgattcagtgtgggaggtgcaggcacagagcatgaataataggaggtaaggatcactggaggccatcatgcaggctatttcgtgtctactgataagctgtcttaaattcaattcccttgttatacataagctattagctgtttatttcggatgcaagtattaaaaacaaagatgatatacctgttattaactttccaagaataactttaagaactaatagcaacaaaagggaagtatatgcacagttatccatagggcctacacatttctatgaaaaggtagtgatcatctacccaacccaaggagctgttacacctcaaaactgacctgtttttaacagaaaatataaaatagctaattagccaagtctaaaaaatgtgaaaaaagaaaactgcaaaaaacaacagacacttctacttatgtaaatacaagcaagaaagagaaatcattacaaagttaatattaaatgtagcacagatgatgtgtgcattctgaagtaaacatgttaaatacaaattgaatcctgagtgttagtctttataataagatgccacatgttgctcaagtctggacatcaaatgtgcatccaatgtgaaaagttaattctagcctcttgactattttgcataaaagcactcatccacggaccattagataaagttactgtaaataaggtttccctgtcttacttataagtgaaaactaaataatttctcacacataaatatacaaaaataaatgttttcacaacacagctcagtgaagcatccttacggggtttcaaaaaccataaataaaatgaaaactccaatattaggcatttgatgtatcatttcacgcttttctgacgggtatcttttatgttaagttaaaagtagggtaaaggtgaattttttaaggttttttttttccttcttgctgtaaacaaagaaaatagaaagtgattgaaaaatacgattcatggaggttattctgctgctgctgactctatatcacactttaaataaaaaacatttaaaagtctagtagattatagagtttctctttaactaaaaaaataataataatagaaaaaaggttttcatgcagtttggacttccacggtaaacaacccagtgttaataaaaagcaaatcaataatttttgttaaattttaataatcctacaaacctacaaataaaaccatcaacagtctgagttaagatgacagttaactgcgtttctatgacaacctagtggaatagtacaagtcctgacttgcagctaagcgaagatatgaacagagtgacatttacccatacaagaaaaatttgcggctttcttttaaaaagaatcaattcctcaactcacatagatttttactaagtgtagagcacttttaattaaagacaagtcctttataccatcctacagaattctaaacactatctgaaaataaatgtcacatcatggtcaatcttactgagttttggacttaggaggagggaaattacttttaaggataacaaatcaaagcatttaaagacttctccctgaaaaactgtttagtgatgttgttacagtgttaccatggggtaaattttcatggaggaagtcctgtttacctaacttggtcttgtataccaacaagaatattttacatttcttttcacctaataatttaaaatttgtatacaagaaattgattttttcagtgtttacaaccaaaaataattgtgcagaatgggttctacatttttcatcttgtttaaacatatctttcacatatattggtacattttatatggcatcactgttacaggccaaatgaagacttgaattttactttttaaaaatgtgtgtcacatgaattctaggggttaagagaaagatcatcacattttctactgttactacttacacagaacttaaaatgtcacctctggataccatttctttattaaaatccattttgttttgtttttacaaaataaaatgatactcaatatactgattggggaaaggtgagatatcttataaagcccaaattaggctggtagaaaccaccaccagtggagcactcctcaactattcacatctcactctgtggagatgaccttcatcctctccagcttcacctgagaaagacctcagctgaacctccaggaattttaataagatgaatggtttagttggtttcatgtcatcaactacatctgactaggggcaaatccttttaataaatatccaatgttttaaagctagatacaatagggaaacactaatatcctcaaaagaaattcacacacaaacacacacaaaaaaaacctttcatgcagtttgaacttccacagtaaaaaaccaactattaataaaaagaaaatcgataaccaaccctggggatgaagctataaaatacaggttttcttcctctagaacattctttctagaactctaattacctatggggaattgaaatatccaaaattagtagtggaccttacaagcttaacatataaaaaacagctatcaaaatcctgtatcagaacatttgaattttaggaaatttgcattttaaaaaattctctctttacaaataattcaatttgtagaagccctatgactaaaatatttctttgctattactattaagaggagagaatagaaagataaaacacagttggtaccaaatacaaataaatttttaagagcataattaaaattaatacaatcaatcaaaacacatcttgagtttcaaaaacatataacaatattttaaggaatagttccagtcactatcacaggatattaacacattaacaacacgcacaaaaggcaacatacacaggagctacatattattggatattcacatttatttgaaactataacattatcactaaaagtacatgaataatataggacatctccaaatttgtcacattcgtattaaagttttccataaagtgtagaaaagatccaagatgagaaaaaagaatgcctaaaaaagaacctgaaggtaaagttcaaaatgaatcaaaaagtcttcaatcagctttgtatcgcccaccacacctcatcccaagaaagaatgctacttccttaaaaagacaactgtaactattaatactgtatgctatagttctattaaagaaagatcattttatttacacacaaagatgactatctggtaggaaagatggctttatagatccttctaaagtgtcaaaacgtatcaagaaaactacataaacaagctgaaagagtaacttctggtttccattaataacacaaggtattatagctgcctcaatgaccaaactttttaagaaagtgacatgaagataatggaattcatctacaataaaacaactgtggtcaaagctcccagcatgcctttccatcagactgctgagagataggcaattacattcttatatgaatgcaaaaaatgttgttaaattttcaacttacaagcaatattgctattaaggaaaaaatatattaatttttaaagtagctgaaattaggagctgataaatgtaatctggatggcatgggtctactttttcaaacagaaaattcagcatgagtttactatacccacatattattatttaaagcataaaatacatacggttaaatgagtagttctcagccagaggtgatttttgtcccccagggacatttatttggcaatgtctagagtcatttttgttgtcacagttgggtgggggaaaggtgctactgacatctagcaggtagaggccagggattatgctaaacaatttacaatgcacaagacactctcccagaacaaaaaattatccagcccaaagtgccagtagccccaaggttgaaaaattctggattaaataaatttcacaagataaaatattacatttacattaaaatctgttttcaaagacaatttaataacaaaaagaaatgttctcacaatgtctttctaagtgaaagaataggtcataaaacctgctttgtatgatccaaattttatttaagaaatgtatatgcatatatggggggaagatgagaagaataaacaccaatatagtaatttccctaaggtcggtttcttcctctgtagaatggggatgaaaatagaaatcacatcacccggttgctgtaactattaaagatagcaaataaaaaaaatcactgttgtgagctattgccaatattttctaaattttctaaaacaaacatatttattataaaaacggttcaacatcctcttcaacactttgtatctactgagctaagatttttatctctcaaagctgctttgctttaccgtaacacactaaccagaaaactgagaagttgagcccctaataattgaggagctctacttaagattcacaagatatgcagtcttcataaaccctggtctctcctgtgccctgtagtattagaatttcatgttcaattcaaggaggaaaaaataaggtgaaggttcccatgccctaagccacataccataaacaggatcaactcccatcatttagtttatattgggaaagcgataagaatatatagaagaggggaaaaaatgagaaaagcaaataagcttttcatttccttctagccatatggaataacctcaccaatcttcaagctatgccattcaggtggacaatttccgccactaaagccaacataaccctcttttcctctcttgccaatatcccttggtgatcacaagatcctcagaagcagagtttatgccttttcattgttctgaacttcacctaacagaactgtgggtacctaataaagaccagtgaaaacaaacgtatgtagtaacagcagaccaggtttggtaagcagcttttctaagacattctcatttagatttccacacaggaaaatccaaatcatagaatattaaccaaaggaacctcagagatcatctaaactatgtgttacttcgcagacacagagaaggaggggtaaaagggggagcagggaggtcgaggcaccaaacagaaggaaagggctggcaattttgaaataccataaactagaattatagataaatttatagaagtggaactatatcatcttctagcagtagaagcaaatagaggtcctgcaaactcagttgtcagaaaaacttacacttatttctaataaatttatgttgttatacgaaaaaggaaaatgctgaagctcttcaaattattttgtttgagaggagattaaatgcctctcgagcatttccaattgcacattccataagccaagtgcaaagaagcaacttgctaaccacccccaccaaagcctctaccagtttctcaataatttccaagaaaaattagataaagataaaaattcactatagcagtaagcattaaaatgattaccaaaatcaaggagaaactgacacatttgttgaatctaaattcctgacatattctgatttgtttcaagaaacataacccacctgaacaaaaggtattcagatgatttctagctctcccaccaaccctctgtgcccaagactggggctgagcttgccccagcctcacagagccgacccctgccctaccccttagctactcttttccagaaggagaactatgcttgcagcctctgcccactgtatctccaatcctcacacattttagccctgaccaccatctttctacatctttcttccacaggctgagactctaaacctctatcacctgggcagtgccctccatggtctgggagtccagccttaagcagtgcaggaccaaaggacctctaatagcaggaaggtgggcactgcagggaccagagaaaactaacaaaagtaaagctaaaatgaattaataaaccagaaaaaaaaatagtaagtccaagcattaataccttttacagacaaattgaatatgagacacacaaaaaaacagtgagaaaataaaagccattaaagtactatctatctcatgcagaaaggtacatggctcaggctgtttcagtggcaagttctattaaaaaccttcaaagaatggaaaattcccaacttatttaagctgccccataagaggcaaatataaaaacttccaaattcattttgataaccatgatatcaaaactcccaaacagtacaccaaaaacaacaaaaaatatacataaaattctgtcatctcatgtagaaatttaaatgtagaaagtctaaatatcataaatcaaaccccgcatatattaataaaaaacatgtaagatcaaatattgcaaaaacacaaagactgagtattaggaaatctgacgtcatttgataagtcagaggaaaaagaaaacgcagggccatcttgacagacactgcagacagcatttataaagttcaacacttgtttctgatcttaaaaaagctttcagtaaatacaaaggtttctttaccgaagagctaagaatgaagagccacgaatgaccatttgaattc

SEQ ID NO: 90 - DNA, 148220 bp, Homo sapiens
gaattccttatgatggaaccaaacccagggaaaaacaagggaacactcacattttacagctcagttaattttaggagagtagagaggaagtaaattgcatctcatctcctagcttgggttggaactgcccaatttaagaacaagtactaattagctgaaagtaaagctcagctgtgacttggctaaaaatgggacctcttgcaaaaatgtacttaaaactgcgtgtgatagatctgattcactttgcatgtgaaaactggactcatactgacaaaacaacgtgtgggggaaagagtttgggagcatttttaagacttcaagatgtttgttagagaaatgaccatctagtttgcccataatgtaaccagaaataaaatccaaactgacattttggcccagagtcttgatgagtatctctagccaacattcacttggttggctaatggtcaatctaataaccaagaaatagaactggatatcagaacaacagttttgataaaataaaggaaaggaagacaggctggataattcggagctttctaacagggttttggaaatgtgcataaagttttggagaaaatttaaccaatcgttttgaagccttccattagtagcaactcaaaactattcaaaagactgaatggtgaattaactcattttattttgaaactcctctgtgcttagcttttgactgaatttaaatttctgttggagcaagctaagttgttttaattttgatgttcaagtcaattaacctcttattgtgactttttgccttagttatacaaataaaattttatataatgttggagactcaatcattttgatgctgacatttcttaatcctacacatggtcacataccctggaaagatatacaaggctctgaaaacacagctgccacggggaagtgagattggatggctgggaaagagattgcttttcatgttatttgttttcacgtggtcctatacttgtgtactttttgaactttatgccatatgaatttattaataatttgacaaatcaatttaaaaccaactttaaaatcaaatttcaaatgcatgtggttcaaagaaaagcaccatgatagaattgaaagaacaggatctggaattagggacctgaatttgaatctcctcttggcgtttgtgtagttaggagaactcgggcaagttacctgacatctctgaatccctgttttccttatccttaacgtgggacagagtatttaatttacatggtttggtgaggacaaggcaggtaatatctctctgacagacctacttcatggcatgtgctccatggactggttatattattggtagcattcaatatattcagtaaaaacagtataatgtgtgccttctgtaatccccaaggagacagtaaatgtgttggtaacatcccagttaaatgcgtacctgagaacaggattttcccagacatagcaacatgggtttacagttttaaccatttcaccaacctctgccccaggctcttctggagggaatcaacacagcattgaatccctttcaattaacctttcttcttaagatcatagttctatcaaacttttaaaaattagttaaattggccaggagcggtggctcacgccagtaatcccagcactttgggaggccgaggcgggtggatgacctgaggtcaggagttcgagaccagcctggccaacatggcgaaaccccatctctactaaaataaaaaaaattaacagggcctattggcagttgcctgtaatcccagctactcagaagtcggaggcaggagaatagcttaaacccgggaggcggaggttgcagtgagccaagatcgcgccactgcactccagcctgagcaacgagagcgaaacttcgtctcaaaaaaaaaaaatagttaaattgtgtttccctattcatggaaatcattctgctattattctcagtgagtgtcttggttcgtgggtctccctcaaaccattttttaaaatttgatttgcttcagaatgtctcttatttttgtttcaagttttcaaaaaattgtccccgatattttcgatcttttgtgttttttactctccccctcactctggcaataagcacaggctctgccccctttctcccttcatcctccggggaacaggctttgcagtcggaggcctgagcgccccggtacctccgctgcactacgtagagctgccaccaggtggagctgaatccacacctctgagaccgcacacgcctctgacacttggcatcgtggcctctctgggtcctgattctttggaaggtaggcggtaacaacaaactgttaataaaaattaattaacttggaaaatgagaaaaatacaatgatagcagaaactatctcaagcaaaaatcatttcatataatctcgtcgctgtaattagcagcatccacggaagacggtggcttcctctcatatagatccagtttaataccccaggctcagcccattagtctctccttcacctcattcgttctgcagtgtgttcctctgagcgcctcatagtcacacatctgcaggcagtgcacaatgccttttgcacacggtcgaggtccttgaactgagtactttgtgcatgctattggcctggagattacacaggctgcagaacatggctggcttgggaaaggcagcacacggtggctaccaaactccttcagcggcagaattcccctaacaaattgtgagaatcccccacttgacgctaaaagttattaaatggatcctttttatcccttcgttgagaaaattcatgcaatacaaaaattgcaaaatcagcaatactcttcaatgggtgggcattttctttgtaagagcatcagctgcatacgcttgaatgtagccagtattatttagtcagcgcattggcagtggtttgtgagcacctcacaatagtggctgggaaacctcagggtagctctttggcatcagctagaaccaagttgaaatacaatttctgtcactttcaagatgtttcttaacctctgtggccctcacgctcttcacctgtaaagtggagataataaccttttcttagcaaggctattgtattataaataatgtgtgtgatggatgaaactggaggtcattatcttaagtgaaacaaccaagacacagaaagacaaatactgcatgttctcatttataattgggagttaaatgatgtgctcacagagtgtggaataatagacaatgaaaactcagaagagtggggaggaaaagaaggatggatgatgggaaattacttaataggtacaataaacattacttgagagatggataccctaaaagccctaactactatgcaatctatgcatttaacaaaattatctcctaaatttaatacaattttttaaaaaaagcaataatgtatgcaatgtcttcatcatgacggctggaagtatgttgtcagtaatggtagtcattattgctaaaagctaagtttcactcctaagcagctttgctgtttctgtggtatttagagtctctcccatccttgcctactggaccccagcttttctgccctagtgtcagccagctgagctagtgtcccccggaatttgcatgcatgaactctccctagctccaccagcccctgcctctgttccttgttccccagccctgactttgtgaatcttcctttcacggcctcaagtcgtctccagttctgctctaagctgaatcatcctttctaatgtatagtcctttcttccttactcagtccccaagtctccttccatctgtctctgtccctccacacattgaatggtcttcagttaccttgatatctactcacatgtctctccatcttccccatctctccaatttcccactcaaatttatatcaacacatcatacatttattttagctcaagggaaaaaaatataaatataatccatataaataagacactggcccatttacatcattagacaagtcattctttctaattatttttttcatctgaaacttcttctaacaccttaattttgcacgctgactttagaagtgtttacttgtatatttcaactcgtaacgccgcatggtctacgcatacagcttatactctcgctccccccatcacacacaacattctagaagcattactcaccataataccacctttctttctagaaaggcccaaaaatcactgctgcaacatttttgatctgggcctcttctctcttaacatggcctgggtctcgagctttctgcaaagcagcagatcttcgtacacacaggggaacagagcggcagtcaaaaggcttgatcaggcagctgtccgctgcactgtggcccctgcctcaccccaggtttctgcttctgtcgtgcccagcctgcccttggaagggctgggtaatcttactttgagtttgtagtcttgcttatagattaatgaacagactccttcatttatcaacattcacttatttatgtttccttcctttcatattttagttacactttctgcaccctgggaaattctttttaggatctgactatgaatcttcctctatttccattggttccctgagcaatctaaccaacttgcaatctttgttactgttaatttgcctatgacatatagatatatatattattatatacatattctttcccttgcaccttttcctattacatatatatttttatgtgtatcatatataacacatatatatgtattatatctataatatatgttatatataatatcctatgaaaatatatatggatcatatatatataataggaaaaggcgtaagggaagggaaaataatccatatatgttttcttggttgggcgcagtggctcacacctgtatcccagcactttgggaggctgaggcaggtggatcacgaggtcaggagttcgagaccagtctggccaacgtggtgaaaccccgtctctactaacaacataaaaattagccgggtgcagtggtgcatgcctgtattcccagctacttgggaggttgaggcaggagaatcacttgaacccaggaggcggaggttgtggtgagccgagattgcaccactgcactccagcctgggcaacagggcgagactccaactcaaagaaaaaaaaaagaatagatatgtgtgttctttcccttgcactgtttcctccctagtctaccttctgttttgtcattcagcagacccaagctcaattcctagcacggacatgactaaccatgtaaccaatgatttattgtccaaattcaaagaaaaaagaaatccaaagatcaaagaaaagtgtagatgatctcagatggctcttccacctctgaagcttatggccagatgtgaacctgctcctttaaatgtgaacctcctccttatggccggatgtgaacctgctccttaaatgtgaacctcctctttatggccggatgtgaacctgctccttaaatgtgaacctgctccttaaatgtgaacctgctccttatggccagatgtgaacctgctcctttaaatgtgaacctcctccttatggccggatgtgaacctgctccttaaatgtgaacctgctccttaaatgtgaacctgctccttatggccagatgtgatcctgctcctttaaatgtgaacctcctctttatggccggatgtgaacctgctccttaaatgtgaacctgctccttaaacgtgaacctgctccttatggccagatgtgaacctgctcctttaaatgtgaacctcctccttatggccggatgtgaacttgctccttaaatgtgaacctgctccttatggccagatgtgaacctgctcctgtattttttatgttcttcatctcctaagaagtggtccctctcatagtcacaggagtggatacctgacctaagctcatacaactcagaatgggtagagctgagacttgggcctaagtctggctgtaaattccatgtttttccacgaattgttttccaatgatgagacgaaattcaggggaaagaatctgggcctctgagaaagctactcttctgcacttatagcctctccagagtagttttctgatcaaattttaaagtgttctgggaggcttcaggaaagtagctcatccgtgagaaagaaagaaaataacctggcagaagctggttaccttctgaaatcccaactcctgagcggggagttcttgcttgtaagatcgctttctgaatgtcctcatggttgacttaacatcagctgagtcttctatgaaatgtctatttaacgtgactagaaatgcatgccaagagattaacgctgagcggggccaagtcccagctgaaaacgggtgtaagacgcaggggacccaagattttctgcctgatgatacttacttttctttcaaacatgaaataaaacataccccccacaggggatccacccttcttttgctcccccatctaattagaaagattgacttgtctaatgatataaattggccagtatcttctttatatggattatctttataatttttcccttgagttaaaataaatgtatgatgtgttgatataaattggagtgggaaattggagagatgaggaagatggagagagttatgagtagatatctatctaagttacttatttccccctccaggcccagttggctgttcctcctctgtgctgccatgctcccctgcacactcctctgtggggtgcttgtgaccatgtgctgttcactgactcgtccctctccgtcactgtactgagctcttggatggatgagctggatttcatctctgagttctcagtgcctagcataaggcctgatgctgaatgagtattcattcagagtgtgtatgtgcgtgtgtgcgtgtgtgtgtgagagagagagaggaagaaggagagggagaatggggggtggaagtgaaggggaaaagagaaaagtaaaaaggggaaaagggagaagaaaagaagtaaaaaatgaaggaacgaggccaggcgcagtggctcatgcctgtaatcccagcactttgagaggccacggtgggtggaacacctgaggtcaggagttcgagaccagcctggccaacatggtaaaaccctgtctttactaaaaatacaaaaagtagccggtcatggtggtgggtgcctataatcccagctactcaggagactgaggcaggagaatagcttgaatccaggaggcagaggttgcagtgagccgagatcatgccattgaactccagcctgggtgacagagtgagactcagtctcaaaaaaaagagggaacgactgtgagatacgtctggatcagcacttcattccttacctgactcctgtagatttctctaataagaggcccattcatggtgctttggatctctgggaataagttttaactcacatattactctataccacagccctcgacatatctgaatattcctctgtctccagtgatggttactcatgtagatggctgtaggggaaaaatcggggaactgctactagacatacttgtcatggtgtcgcagggccctacctctggtgcctcagattccttttcgtttgatagatcgtgggtctgtggactagctcaaatctggagatttggcaaaggatcctgactttccagtggggtgactgtccttagcctttttcttctacattcttgatctctttcagttatgtatattcagcagaactcttgttagctgcccacacagcctgcctcaagaacactatgttctgtgagccatctccaaagatccctgcaattcagcctgctcctatctaccagttcaacctttctgcccaatagggtaagtccacccgctttgcatctgacagttaagcactgccacctggcctctgctgttctagttatccatgtccccttgctactagagaactcagttctgtaacagcagctcctaacataatccaccccagctaatactttcttttacagcacattctttttaatcatcttgctaggcagagtgtcctccaggtctccttgggaacatgatcagccgataggcttttcggtcttacatagtagatccattatagcatttccactcttctaagccttttgatcctttcctttatcgtcttccaaggcaatttttggcatctccgcttaatttaatgaaggatgttactttttccaagcttccatgagtcagcaaatagcatatatttgactcattttccaagctccttgccagcgtattaaatcctgcatgatgggagagtggcttcatgttaacaaactcttccttatccagctttatcttccagtcaccccctggatccactggcctctggatccacccacaggcatctctcctagtacctgctagtgcacattggcccattcttgcaggagctctggggtacaaaatctcttttctgtgagcagcctcagatcttccccagcttatgttgatatttaaccctgtgtatgaatcgggtagaaggagaagaggagggagcagtttctgaggaagacaagcatcgtctcgtaaggcaccaactttatttgaactctttgcatattcctaaagtaagagagggtgccatatcttccaataagggaatgagatatttctgcagcccaagggagttcagagaaatctgggtgttcaaagttctcaactgcatttatctagaaatctttacaccaagactgagtcccactcattccctatcatgagccagtctttgctacaggagatttggttagactgaatgaatcttctttgaaattctgttacttttacagttcaattctgagtcttctcttcactttgtcagccctttgactgcagggagtgtctctttaattgctgccaaagaagctttctgactctcatacctttaagtagagctgagcgtgtcattttctctcctcaacaatgttggggcacttagcaaacattgactgaattccacagtccttatagttactgttttccttgaacctttcaaatactggtgcaaagaggagaaaatcttaacaactgcattcactccatcatctcattgctctggggtctatcagtacctccgctgatgcagttctctctgacatctgccagcaagtgacccacctccagattgtctgcttttagaaccacttccaagagacttggattgggctccctaggagcggagcctgagacagggattcctgtggaagtgacatatggtagaaatgctgtctgggaaaagggaggaaggcaagcaggataagccaagggcagagagctaacccgggatatggtttcagccacatcccataggacctccatagaggtgatcttgtgatgaaaccagtggaatggctttttgtatctctctgtcaggcagtctgcctcgggctgtggggattttttggggaggggtagagtataaatttgcatgaggtggtttctgttcagcctactgtgattccctgaaggggaggttgtaagcatttttagaagacaattctcacagtagcaggggggtgggtgttagagtgtgagtgtggggcagagaagcatcaacagctcccaattccatgacatgttccaaaaagtcacctaagagaagacagaactttttgatatttagggagagaaaagtctaatacacaaacggatttggcttaagcaactggacagaagatcccaacatcaaggaaatgtcaaagctatagataaattgtgtgtttgcatgtatagggttagatccctggttaattctcattaaattataagtttttgttgtcctcaggactgctgctaacatcccattctcaaaaagtgaacaggaggcaaaaataaaagttaaagaaaaaagctttatcccctttaccctaattctggaaaagagcatccaagtatttatgtaatggtgaagaagagaaaacaaatttaaaatctggtcatttctctaagaatggtatttagtgttaaccatatgaaagaaattgccagtaaatctagggaaaaagggtatatgtatgtatgtatgggtgattttgtggaaaactgttcaaaacagttttgaaccgtgcaggttcatggccttcagaacaataaaaaataaattcaggagaaaaagttgcaaacaaattgttttaccaagaccacatggtccaggcatactggaaataatgaccaagagatgaagaattatccctcatacaaatatctatctggttaggccaaagagagaacaacatcaaaaacagctgtgataacactgtgaagatttcaaaatatctcacaaatttaaagtattctactggttattgtttctgtgttaaacccaatgtgtatacccaatctaaataccctgagcccaagataacagcaatgcatgactaaaggaatgtgtagcatatggttcactaaagaccaccaaacatctcgacctcccaaccagattaactgaacccctcagacttcaagctcaaccgaagaagaggtttgttcatgtccagattttaagtgtttttcttaaataactgttttcacaattatccttgtttatctggccagacagtctgcagagcttccctgtcaatcatagttgctttaaatctgctcaccaatagttacaatgtctggatcagctctgcattgagttctgttgtttttttctcttgagaatgaattgtttccttgtctcaaatttttttaaaaaaggctgtaaattgtatgtagaacagctgaaaaacaatccattttcaagagtaaaaaacaatggaactcaatgcagagctgatccagacattggaatgatcggtgagtagctttaacacaactatgattgacaaggaagctctgcagactgccaggccagttaaacaagcataattggtgaaaaaaagcatttaagaaaagcacttcaagtctctggaaattgtactgagagcatacagcaaacaaagaaaacatttacttaagaaaatctatcaaagcttggtcagaagagtgagagtctatgatatttgaactacaacccactaccttcctcccacctcccagctcattacgataggaaatccactccaggcacgtgcagccaagagcactgggcttctttactatcagctcccagtcaagggctctggtatcttcccagaaggggtaggtagccaagcattgctcatccctctcttttccatgtacacattgcagaaattaatttccaggagaggaaagacgagaggtcagagacttcctgctattacccagtcctcactcatagggcaggggacctggctcgagagaagcatgctgaggatgctaggatcccactcatcctcactcacagagtagaagctctacaccagaaaaggcaaagcaggaagtgcaaagctgctacccctgtctgccaccctgaaactaaagcagagttgtcacttagtgagagctgcaccaccatcctcacccccagctcaagagctatggctcagatattttgctcaggggaagagccaggccataaaacagaaagctctgaaagaattcactttgtttgaaagagagggtaggaaagttcaagtccaacgaaactctcaaaaacaatgaaggttttagtggaaggcaaagaagaaggctgatacattcatgagaggtaagaaataaattatagaccagatagattaactgggagaccctgagaaagagagagctaagaaatctgacctcaaagccactgctataaaggaatccaaacttaattgtatcagactatggaacaatttacaacccaggcattatcaaaaataataggaccatcagctggcaattagtggagcctaacaattgtgtgtgatcagtgtgacagtcaaagaatccctattaaaatcactattacttcaggatctgcatacataaccaagactgcaccctctaagagcaatgctagagagtacacacagccagggaaatagtcatgtatcacttaatggcgggaatacattttgagaaatgcattgtttagtgattttgtcattgtatgaaaatcatgaaatgtacttcaacaaacctagatggtacaggctagatggtatagcctagtgctcttaggctacaaacctgtacagcatattactatactgaatactctaggcaattgtgacagtggcaagcatttctgtatctcaacatagaaaatatatgttaaaaatacagtataaaagataaaaaatagtacacttaccataaacagagcgtgcaggactagaagctgttctgggtgagtcagtgagaaatgataggtaaatgtgttgacctggggcattgctgtacactgcctgctgtagacttcataaacactgtgcacttaaacaacactacagtttctttctgaaataataaataaacctcagcatattgtaacttttttactctataaactttttttaacttttggactcttttataataacacttagcttaaaacacaaacacattttacagctgtacaaaaatactttctttctttagatccttattttataagcttttttctattcttaatttattttttactttttaaacttaaaaaagaaaaacgaagacacaaacacacacattagcctaggcctacaaatggtcatgatcatcagtgtcactgtcttctacctccacatcttgtcccaatggaaagtagtcagtggcaataaaaagcatagagctgtcatttcctatgataacagtgccttcttctggcataacctcttgaaggatctgtctgggactgttttatagttaacaccttttttgtaagtagaatgagtatattttaaaataatgataaaaagcatagtatagtaaatacataaattagtaaaattagtattattgccaagtattatgtactgtgctatacttctaactctatgtgctatacttttatacaaccacagcatggtatgcttgtttgtttataccaacatcaccacaaacacatgagaaacgtgatgtgctatgatgttacaacagctaccatgtcattaggtgataggagttgttcagctccattataatcttatagaaccaccatcttacatgcagtccatcattgactgatatattgttatatagtgcatgactataaacaaattgataaccaaattacaataataatcccctggaagtgagataacagtatccatagtgatacaatataatatctaaaatgtgtagttttcaacaaaaaattacaagatatgcaaagaaacaggaaagtgtgactcatacacaggaggaaaagctaacaatagaaactgtatgtgagagggaccagatggcatatttaacatttaaattcaaagtagacattataaatatgttcagagaattaaaggaaatgattttatttaaaaagtaaagaaaagtatgatgataatgtttctctgagtagagaatatcaacaaaaatatcaaaatgataaaaatggccacatggagattctagagtctgaaagtacaataagtaaaaaattaaccagaggagcacaactgtattttgtaactaatggaagaaataatgattaaacttcaagataggtcaatagaaatcacgcaatccaaagatcagagacaaaaaagaaatacagaaaaatgaaaaagtgtcagagaaatatgggataccactaagtgtaccaatatacatgtaatggaagtaccagaaggataggagagatacagaagaacgtaaaaaatatttgaagaaatcatggttgaaaacttctcaaattcgatgaaaaatattaatctactcacccacaaaggtcaatagacttctagtagaataaacacaaagagatctacagtagacaaataatagtaaaatctctgagaaacaaggaaaaaaatcttcaaagcaacaagagaaagtgtcttctcacatctaatggaacatctcacatctaatggaatcagtaagattaacagctgacttctcatcagaaacagttgagaccagaagggaacaggatgacatattccaagtggtgaaagaaaaaacaaggtcaaccacaaatcctatagctggcaaaattatctttcaaaaattaaggcagaagaaagaaattctgagataaactaaatgagagaatttgttgctagcagaccaaacttacaagaaatactaaaggaatttctgcagactaaaagcaagtgacatcagacagtgtttataatccacataaataaaataaaaagcattgataaaagtaagtttttatggtaagtaattataaggaatatatagtaagtaattataaaagaaagcataaatgcatgtttattctcttcttttaactagtttaaaaaaacagttacataagacaataagtatataccttatttgtgaatggaaaacataaagaaatgtaatagatttaccaaaaatagcacaaaagagttagctaggagcagaacagttttggagtaatgaaatgagatcagatgtaaatgtgaatctgagaaacaaatgaagataaccagaaaaaataaataaggttaacattacaaatgctagaaatatgcaaacgttctcctttcttctcccatctcctttaaaattataagtaacaattataacaatatattgttaagtttgtaagtaggtgaactatgtattacaacaataacagaacaaaaggaggaaaaagagaatagagctatataggagtaatgctcctatatctcactggcattgttagtataaatctgaagccaatctgataagatatatatgttaagctctagagcattcatttaaaatacaatttaaaaatcaacaaaggatttaaaatgttatacagtgatccctcagtatctgtgggtgcttggtttcaaaccaaggttccaaaagaggaaccccacagatacaaaaattcacagatgctcaagttctttatataaaattgtatactatttgcatataacctacatacatcatcctgtatacattaaatcattttagattacttataatacctaatacaaggtaaatagttgttattctatattgtttaggaaatcatgatttttaaaaagcatgtacatgttcagtacatacacaaccaacctttttttcccaaatattttttatctgcagttggttgaatccaagatgaagaatccatggatatgaagggttgactgccatagaaaaaatattcacttaatgcaaacataatatgtgtaatgaaaacgttaaatgatgttgttgaaaaggtggacaacatgcataaacaagaaaaggtttctgatagacagcttaaaactataagaaagaatataatggaaatgttataaataaaaccacgatatgggagatgaggaattattttcacaggttcattggtagattcaacatagctgaagaaagaattaacaaacttaaaaataggccacagtgtatgcatagtacaagtttcctaggtttcctactgctatggtttgcacgtccctttcaaaactcatgttgaactttggtggccattgtaatagtgttgagaggtggaacttttaagaggtaattaggttatgagggttatgctctcagggataaattaatgtcattattgggggagtggattcattttcatgagcatgaataaattcgtgtgagggcaagagagttcagcctctcttgctctctctccctcttgcatttctgccttccaccatggaatgacacagcatgcaggcccttggcaatgccagcaccatgcctttgaacttctcagcctctgaaatcatgagccaaataaacttcttttctttataaattacttagcctgtgctagtctaacaacaaaaaacagattaagatagaaaatgtgcaccaagagtggggcttttgctataacaaatacctgaatatgtggaagtggcttttagctgggtaatgagcagaggttggaggaatttagaagagcaggctagaagaatcctagactaccataaattgaacactaagggaaattctggtaagaactcagaagaaaagaagaaatgtagaaaaatctgaaacttttaaaagattacttaggtggtcgtgataagaatattgatagaaatatgaaaagtaatggccattttgatgaaagctgagacagaaaagaggaatgtccatcctttttttaaagtaaaggccattctttttatgaggtggcaaggaacttaactgaattgtgcctgtgttagtctgttctcacattactataaagaaatacctgagactgggacatttatcaaaaaaaaagaggtttaattggctcatgattctataggctgtacaagaagcatagtggcttctgcttttcaggaggcctctagaagcttctaatcatggctgaaggcaaaggagatgcaggcttcttacatggcaggggcaggagcaagagagagaagggaggtgctacacactttttaaatggccatgtctcatgagaactcattcacgatctatctcaaggacagtgccaaggggaatggttctaaaccattcatgagaaatttgcacccatggttcaatcacttcccaccaggccccacctccaatactggggattacaattagacataaggtttgggcagggacacagattaaaattacatctgtgtccatgcccatgggttttatggaaggtagaatttaagagtgatgaataagactatctggtggaagaaatttctaagcaaaatattgaaggatctgcaaggctacttttaaccatatgcagtaaaatgtaagagaaaagaaataaagatgaaatctataaccaaaaaaaaaaagcagaatgaaaagattttgaaaattttcagcctgcccacataaagaatgaaaatgtgtgtttaagagaacagaccaagggtgtgaccaagtgaccatttgctaatgagattagtataaatagaagggctcatcaagacaatgggcatttcagagatctttgaggctgctcatcccattacaggcctagagatctaggagggcagaatagctttggggaatgggcacagggtacgcttcacaggccacctggagttgctgctccctgcattcctggacagtgttctttggctgctcatggtgtggttcaagtaaccccaggtgtggcttgacctaccactctggaaggaaggtacaaatggtagactttggtggcatccatttggtgttaattctacaggcatgcacagtggaagagctacagaggcatgacttcctctacctagatttcaaaggatgccatgtgaagcctgtgggctcaggcagaaacttgctgcaggagcagagtcaccacagaaagtcttcaccaggggatgcctagtgaagccatgggagcagaaatgcccctgacactcaagaactgcagagctactagtgtgcaatgccagcctgggagaactgcaggcactagactctaacctgtgagagctgctgagaggactgaccacagcaaaggcttgagggctcaaccccaaccccagcatgcccaggatgtgggacatggagtcaaaggagattattttccagcttaaagacttaatgttgttttccctattgggttttagacttacttgggaccagtcaactcttttttcttgcctatttctttcttttggaatggaaatgtctattctatgcctgtcttacatcatattttagaaagatgtaacattaattcacaagctcacagatgaagagaaattttccttggggtaaatcgtgccttgagtctcacccatatctgacttagatgagacacttgtctttggacttttttttttttttttttttttttttgagacggagtctcgctctgtcgcccaggctggagtgcagtggcgcgatctcggctcactgcaagctccgcctcccgggttcacgccattctcctgcctcagcctcccgagtagctgggactacaggcgcccgctaccacgcccggctaatttttttttgtatttttagtagagacggggtttcaccgtgttagccaggatggtctcgatctgctgacctcgtgatccgcccgcctcggcctcccaaagtgctgggattacaggcgtgagccaccgcgcccggccgtctttggacttttgagttgatgctggaatcagttaagacatttagcagctatggggaagggatgaatgtattttgtatgtgagaaggacactacttttggagaatgaggggtgaagtgctatgacatgaacgtcccctccaaaactcatgttgaaatttaattaccattgtgacattgttgagaggtaagacctttaagaggcgattaagtcatgagggatatcccctcatgaatgaattagtgttgttttcacaggagtgagtttgttattctgagagtggatttgttatgaaaatgagtttggccctctcttgccctctcactctggccctctcttgcccttccaccttctgccataggatgacacagcaccaaggcccttgtcagatgccggtgttatgctcttgaatcataagccaaataaattttcagtgtccagaatcataagccaagtatgtttattttctttgcaaataatccaggctggtattatttatattctgttatagcaatgcaaaatggactaccactatcttattatgactatactagaacctaattatagacatctactatctaattatttggatcttatatcttatatttctaccagaagttggttttttaaaaaccctattcgccagcattcagatcaatacttagtattctcagagttttatgtttttccaatctgatggatgtgatacagtggatggctaagtaaactttggcaagttatttaaattctctgagcttctattgtctcatctcttaaaggatacttctctggattaatgaattagaaaaaaggtattctttctggtcagaacagatcctcatttactgggcttggaaaccatgggcacctttgtttaagcaaaagtctcccctttctccagccaatgcagtgccaccagagtccattggttggcttgcagagcatgggctggctgaatttaaagctcattccccaccttgtctggtactttaatgcaatgcaaactacccaaacatacatgacggttatcactcctcacaggacaagacaacctggcatcctcacacagtactcttcaaaattctcagtagcctcatcatcccactgctgaacagctcaattttctcacttactttagggctggtagaatctgctgattgttgttgtttaggtaaacttcttccttataaggacttcttccaatattatgtgaaattccaacagttacactaccaaacagccaatccctataatttctagaaagccgggagtcaaaagaatggcctcttatttttaaaaaattctgcccacagagaagatacacatgatggtactgagactgttggatttgagagacggagaatcaaaagacattataaagtttgaagtctagatctggatacagtctgaacagacatagttgtgtttaacagccataaaatacaggatgctctctagaattagtcatttagttcttatttgcccctgtccctatactcaccacaaagaagggcagtgaaaggaatatgctgaagcttaacaaaaataaattttcctccatttttatcctcaaatatttttatcttctttacaccacaaatatctcctgaatgagaagcattccaatcctcatatcgccattctagactggttctgtgacaaaacgtaaacagtgttacacttcctttccagtatcaatggggcagagagaaagagctttaggatatctaaaatgcatatggccatcttgccaaaaaattgcacaaaaatatagggaagaacttagcaacaggtgatgaaggaccaaagtgagcatctctacctttctactctgattaggacacctttctcagtacacctccctccacacttcctcccttccccagaaaatacattttcagagatggactatgaggaaatgagttgggctaatagaattcttacaaaaatgtctgcatttcctttctctagtcccccccaaatcacaagaatatgttcaacagtggaaacaggcaggaactaaggctatgagagtctcctggacagacaatggatttcattattaccagcctaatctacttccatggtgtgatggcgaattgtacacactctttgacttttgtaatgagaggataagagaaaagaggagttagaattttctaggtgacttaataattaaccctgaggcttggaccacctaaaactgacttacagaacagctaatctttcaggagttgacagcagcgtttcatcccatctcggagggcctctttgactttgtcattccgaagagtaaagatgaaaggattcaggaagggggttaacacagaaaccaacagggaaactatcttattgtactcaactccctgtgtttgcttgggtttcacgtagagaaacaagcagctgccatagccaatcacaacacaggtgaagtgggaggcaaaagtggagaaggctttcctccggccagaggctgacgggatcttgaggatggtggagataatgtaggtgtaggagacaatcgtagggatcaaagaaccaatgagaataaaaacagccattaagaaaaggataaactctgtgagaagagtgttatcgcaggacagtttgagcaattgccctcggtcacagtaaaaatggtctaatgaatttgatttgcggaaggtaaactgaaatgtggcatagatgggccagatttcagaaagaaatccaaacacccatgacactattaccacccaaatacaggtactgctgttcataatgatgttgtacctcaaagggttacacacagccacataacggtccacagccatcactccaagtaatgcaaactccatggtcccacaggaaaagttgagcgatacatgtagagaaagatactgtctgcatcccaggaagagcaatccccaaagcatcatggggacaattatggttgtgaccaggatctccagggtagagaggtggctgaggaagaaatacatgggggactgcagacgtttatccacacagacaatcacaatgatgaccgtgtttcccattaatgtcactaaatagaagaaaaagaatatagcaaaaagaatgtggtgtagtccttgggacccagggaagcctagaaggtggaattcagtggcactagagtggttgtccatcatttagtccttgattctgcttgttttgaagcccagagattaaaagagaggtggcattgctccacatggtcctgctctcaagagagaaggaagaaaaattaggttaagaaactatttccaacctgagaatcaggtgacatgtccctgctactgtggtcggcacatacatagcttgaggtacatgttgtcatcccaagtctacaagtgaggctctcacttccctgtgtaaccagccccctagaatgggtgaagacatcttcttctactggtggtgaaataccttccttgcctttttccccattaaatataccttctctcgggggcagaggctaagaccttttaaataggccagttttaaaggtgagtcaatcaggtccctccggtcctggagttactttctcttaggttaactgtgcaagatgacacaaaggcattttatatgatgttcaaaggacagaattttaaaccccagctctcatctgtaatggtaatgcatagacccacctttggggccagcagaaaggaggcagaggatgtaagactaacatctctgctgttccagattttaaaatctccattttacagaacagcaagatctctaaatgagaactctagagcttgggataatttcccagaacagatccattcttctctaattccattttccttccaaagttgtgggaggaaggaaagatggcacctggcacagaaaaggaatagatctgggaccgccagctgttaaggatgcctggctctctgcctgtcgcttcattccattattcaaatgtcaccctttccaaagactctttccaatcactctgcccaaaacagaaaagacacacttattattggacttccatttttttaataacagttgttattaccttgtattatgtctaattatttacttcattcctttatttaacaataaacaaatgtagtcatgaacagaacaaagaaaattccatgccctgtggagcttatattcaaggaagaggtgggggctagaccacacacaagacacctaagtaaaatatgcaatagtttagtttgcttatcatgtcacagggaaaaaaataagcaagaaagaaggagaggaaatttaagtgtatttattatttatcaacggcattagaatataaactccatgagggctaggacatgtcttcactgttgtattctgaggctggcacataaaatgtacatacataaattaagtagttatatattttatatatatatatcatatatcttttatatagatatagacagatacattatgtgaaatgaatatatcatagatatatcttatatattaaattatgtattaatttatcacaaggtaaccgaactaatagctgtgtgagtcaagatttgaacctaggtctgtcagatttcatcactcacacagctaactaccacaccttatattatattattatcttatattatttatcttatttatataagatatatgaaataagatatatgaaatatatcttatattatataaaatatacatatattttttatttataagatatttaaatacataagatatatgtatcatatacataaaataagtagtgctgacaaattttgctagatgaggtatggatggatggatggataatatatgattaaataatacttgttctggccagggcctgggccacattccctcaatcctattctggttggttttccttcctgcctcacattaccattttccctcctgcccttcccttgcttaggtaaccccttccctgtctacgtcactgttttactaatggtttaaaaagcttcagggacagaattgatgggaaagctcagtgttctggttttccacaacctctgcataaccagcacgagatgaagaaacatgagcgagaaggacaccgactgtcagggagccgtgactgtgttagcattgggtccaagaggagccggaagtgctctctgctatgcaggaagggtctggagatgagcctatacactctactgctcccctagcccacacttcaatatctgggtgactttgttctagaagataggcaggcccaggatgtcccatcctaaaatgcttttaccctcttcttcatagaggagaccccttggaaagacactcacctttacagaggggcttcgccgcctcttctgatgttctctagggctccgctgaggctacctcctgtcctgctagtgctgagccatgcacaggggccagaacaagttgctgcaatccccactcatggcgaagaagggaaatgtcctcccagaggagcttaggaaaaagcccagaaatgagtgttgggcaaagttgagggtcctctctctctcccctctcctccctcttcccttcttcccaagggtacttaatcaccgagttactacttcttaattagcccacgttcagggagtccccaggcaatcagtctagtgggagcagaacaaactttaagttattcccattttttgaccaattaagttttagaacttttgaaagtttttgtttgacgggaaaacctgaaatcttaccaatcagggacttcttaatactggggctgccttcctgaaaacctcaggtctaggtttccagatgtctcagattctaaacagtcaactacctctgtcgtttatcttaggcttttctcaagtttctctagttattcggagcctaaatcaacccttttcccccagtaggagacaccacaattggcctctaaaacatgcaccaatatcccaaaaaagtctgcatattggtcttggtcaaagccttaacttcaccaaatatcttctaaaaagcctgatgactccttcattcattttaaaaaggctcctgcgtttagtcctgtggaccctacagaatactgtaagaggtccctcccctaaatcgaactctattctgttctattgtctcaggttttcactcctcttgatatatgtgcatctgtatgcattccagcaagattcttccagacttttttttttcctatggcatgtccctgattaccagctggaccactgcaaagtagagagagcataaggacagcttatgtacacagttctgtttgcaacctggaggaactgacaaaatgtaagttggaaatctgtctaatgctggagtaagacagaaaaagtaggaattacaaaacatttgtctgcatttttgttttcattttaagtattttaagtacacctgttaaatctgagaatttcaattggtgcctaagggtataaattgggattaatctttcttccaattccttaaattgcccaagcccaaatacttgccatataattttagagaaattttccaagcatgtatctccatattctttttcgtaaaggctgtgaaaatctgtttgcaaccttttctttctcatttaacaacatataaaatatatctttccatgtcagcacatattactctacctcttttttttttaacataggattccattatgtggatgtcctattctttattagatagacatttattaattaattttcattgttgtttccatttttaattatgaaaaaatgatgctataaatattcttagatatttgtaagtacataaacatgtacttgtaagtaaagtaagtacgtatacatgtaagtacataaacaattatatttctgaaaaagaaaaaaaagattccctagagttggaatgtctgggtcaaatgcagatgtattgaagctattactttttattggcaccaaattacactccaaacattttgtattgattcacacaattactaagactgtgtaatagaaggggtcttgttttcctgacctgttataagccaaaggcataattaaaattttaattttaagttgaagagaataaaaacaagacaccttaaaagggaaatcaattaacaagcctgatgaaatggaaaatttttgaaagataaaaatgaccaaaaccaactcaaaaacaaatatggatatagaatcaacttgagtatccatcaatggatgagtgaacacagaaaatgtggtgtatatatacaatggaatagaattcagccattaaaaggaatgaaatcttgtcatttgtggcaaaatggagaaaactggagggcattccattaagtgaaataagccaggcacataaagacaaataccacatgttctcactcatatgtggaaactaaaacagttgatctcatagaagtacagaataaaataatggttaacagaagctagaaaggatataggggaggggaagacaggaagagtttggttagtggttacaaaatttcagttaaatagaagaaataagttccagtgttctgtggcatagtagggtgacaagtttaatgactatctattgtgtatttcaaaatagctagaagagaggaatttgaatttccccaacacaaagaaatgatgaacgtttgaggttatagatatcccacttaccctgatttggtcactacatgttgtatacatatatcaaaatatcacatgtacccccaacatgtgtacaattattatgtaccattaaaactttaaaagtaaaataaatggccacagatgttgtacaaaatttaatcttaatagagttgaaaatattttgtaaaaaataaatccaaacaaggggccaagatggctgaataagaaaagctctggtctgcagctcccagtaagaccaacacagaaggcaggtggtttctgcatttccaactgaggaacacagttcatctcattgggactggttaggcagtgggtgcagtccacggaaggtgagcagaagcagggtggggcattgcctcagctgggaagtgcaaggtgccaggggacctccctccttgcagccaagggaagccatgagggactgtgctacccagctggattactacgctttccccacagtttttacaatctgcagatcaggtgcctacgccaccagggccctgggtttcaagcacaaaactgggtggctgtttgggcagacaccaagctagctgcaggagtctttttcgtatcccagtggtgcctggaaccccagcaatacagaaccattcgctctcctggaaaggggactgaagccagggagccaagtggtctcactcagtgtgtcccactctcacagagcccagcaagctaagaaccgctggtttgaaattctcactgccagcacagcagcctgaagttgacctgggatgatccagcttggttggggtaggggcgttcacaattactgaggctttactaggcagttttcccccgacagtgctaaggcagcagggaggtctggactggatagaactcaccacagtgtggcaaagtggctgtggacagactgcttctctagattcctccttactgggcagggcatctctgaaagaaaggtaacagccccagtcaggggcttgcagacaaaactcccatctccctgggacagagcacctgggggaaggggaggctgtgggcacagcttcagcggatttaatctttcctgccagctggctctgaagagagcagctgatcctaacaagaggaattctcccagcacagcacaccagttctgctaagggacagactacctcctcaagtaactccctgaccccgtgcctcctgactgggagagacctcccaacaggggtcgacagacagctcatacaggtgagctctggctggcatcaggccggtgctcctctgggatgaagcttccagaggaaggagcaggtagcaatctttgctgttctgcagcctccactggtgatacccaggtgaacagggtctggagtgtacctccagcaaactgcagcagacctgcagaagagaggcttattagaagaaaaactaacaaacagcaacaacatcaacatcaacataaaggacccccacacagaaacctcatccaaaggtcatcaacctcaaagatgaaaggcagataaatccacaaagatgaggaaaaaccagcacaaaaatgctgaaaattctaaaaaccagaatgcctcttctcctccaaatgatcacaactcctctccagcaagggcacaaaactggacagagaatgaaatggatgaattgacagaaatagacttcagaaggtgggcaataacaaactcctgtgagcaaaaggagcatgtcctaatccaatgcaaggaagctaagaaccttgacaaaaggttacaggaactgctaactagaataaccaatttagagaacataaataacctgatggagctgaaaaacacagcacgagaacttcttgaagcatacacaggtatcaataatagccaaatctgtcaagcagaagaaagtatatcagagattgaagatcaacttactgaaataaggtgtgacaagattacagaaaaaaaatgaaaatgaatgagcaaagcccccaagaaatatggtactatatgaaaagaccaaacctatgattgattggtatacctgaaagtgacggggagaatggaaccaagttggaaaacacacttcaggatattatcgaggagaacttccccaacctagcaagacaggccaacattcaaattcaggagatacagagaatatcactaagatactcctcaagaagagcaaccctaagacacataattgtcaaattctccaaggtttaaatgtaggaaaaaatgttaagggcagccaaagagaaagggcaggttacctacaaaagaaagcccatcagactaaccggatctctctgcagaaaccctacaagccagaagagagtaggaggccaatattcagcattcttaaagaaacaaaatttcaacccagaattttatgtccagccaaactaagcttcataagtgaaggagaaataaaatcctttacagacaagcaaattctcagggattttctcactaccaggcctgcctttacaaaagcccttgaaggaagcactaaatatagaaaggcaaaaccagtaacagccactgcaaaaacacaccaaaatataaagaccaatgacactctgaagaaactgcatcaactaatctgcaaaataaccagctagcatcatgataacaggatcaaattcacacataacaatattaaccttaaatgtaaattggctaaatgccccaattaaaagacacagactggcaaactggataaagagtcgaggcccattggtgtgctgtattcaggagatccatctcacgtgcaaagacacacatgggctcaaaataaagggatggaggaatatttaccaaataaatggaaagcaaaaaaaagcaggggttgcaaacttagtctctgataaaacagactttaaaccaacaaagatcaagaaagacaaagaagggcattgcataatggtaaagggatcaatgcaacaagaagagctaactatcctaaatgtatatgcacccaatacaggagcacccagattcataaagcaagttcttaagagacctacaaagagacttagactcccacacaatgacagtgggagactttaacagcccactgtcaacatcagacagatcaatgagacagaaaattaacaaggatattcaagaattgaactcagctctggaccaagtggacttaatagacatctacagaactctccaccccaaatcaacagaatatacattcttctcagtgccacatagcacttattctaaaatcaaccacataattggaagtacaacactcttcagcaaatgcaaaaggatggaaatcataacaaactgtctctcaaaccacagtgcaatcaaattataagtcaggattaagaatctcactcaaaaccgcacaactacatggaaactgaacaacctgctcctgaatgactactgggtaaataacaaaattaaggcagaaataaagaagttatttgaaatcagtgagagcaaagacacaacatactagaatctctgggacacagacaaagcagcgttaagagggaaatttatagcactaagtgccctctctcattactcctattggatgttctggctagggcaatcaggcaagagaaagaaatagagggcattcaaataggaagagaggaagtaaaattgtctctgtttgcagataagatgattgtatatttggaaaaccccactgtctcagcccaaaaactccttaagctgataagcaacttcagcaaagtctcaggatacaaaatcaatgtgcaaaaatcacaagcattcctatacaccaccagtagtcaagcagagggccaaatcatgagtgaactcccattcacaattgctacaaagagaataaatacctaggaatacaacttacaagggatgtgaaggacctcttcaagtagaactacaaaccactgctcaaggaagtaagagaggacacaaacaaatggaaaaaaatttcatactcatggataggaagaatcaatattgtgaaaatggccatactgcccaaagtaatttatagaattcaatgccattaccatcaagctaccactgactttttttgcagaatttgaaaaaaactactttaaatttcgtatggaaacaaaaaagagcccatagagccaagataatcctaagcaaaaagaacaaagctggaggcatcacgctaccttacttcaaattataccacaagtctacagtaaccaaaacagcatggtactgatatcaaaacatatttctgaaatacaccacgcatctatagctatctgatctttgacaaacctgacaaaaacaagcaatagggaaaggattccctatttaataaacgattttgggaaaactggctagccatatgcagaaaacagaaactggaccccctccttacaccttatacaaaaattaactcaagatggattaaacacttaaatgtaaaaccccaagccataaaaaccctagaagaaaaccaaggcaataccattcaggacataggcatgggcaaagcctttatgactaaaataccaaaagcaatgacaacaaaagccaaaattgacgaatgggatctaatcaaactaaacagcttctgcacatcaaaagaaactatcatcagagtgaacaggcaacctacagaatgggagaaaatttttgcaatctatccatctgtcaaaggtctaatatccagaatctactaggaacttaaacaaatttacaagaaaaaaacaaccacatcaaaaagtgggcaaagaatatgaacagacatttctcaaaaggagacatttatgcggccaacaaacgtggaaaaaaagctcatcatcactggtcattagagaaatgcaaatcaaaaccacaatgagataccatctcataccagttaggatggcaattattaaaaagtcaggaaacaacagatgctggagaggatgtggagaaataggaacgcttttacactgttgatgggaatgtaaattagttcaactattgtggaagacagtgtggtgattcctcaaggacctagaaccagaattacgatttgacccagcaatcccattactgggtatatacccaaaggattataaatcattctactataaagacacatgaacttgtatgtttattgcagcactatttacaataacaaagacttggaaccagcccaaatgcccatcaatgatagactggataaagaaaatgtggcacatatacaccatggaatactatgcagccataaaaaagaatgagtccatgtcatttgcagggacatggatgaagctggaaactctcattctcagcaaactaacagaggaacagaaaaccaaacactgcatgttctcactcataagtgggagttgaacaatgagaatacatggacacagggaggggaacatcacacacgggggcctgttgggggttgaggggcaagaggagggagagaattaggacaaatacctaatgcatgtggggcctaaaacctagatgataggttgataggtgcagtaaaccaccgtggcacatgtatacccatgtaacaaacctgcacgttctgcacatgtatcccagaaattaaagtaaaattaaaaaataaaataaaataaaaagaaatccaaaatatataacagaggatggggcttgttattgggggcctgatgaggacacaaatgaggtaaaggcaggtgaaggataaagatagcattggagtgagtcagaaagcaattagaataagtaggcaaagtgagttaaatagattatggcttttgggtggaggtagagatgaggatgggagagcaaatgaggaatcatgaagagaaaatggcttatctagccctaatagatgtctgagtgtggcaaggagctttcagacccttccccaaacagatgtctctttggctaagttctatcaaaacatttctaagcaacgttctgcaaacacctcttaggggaatagaacattttctttgtaaaaacgaagacagatattttctgtcagtagagcccataacattgagagcacaatttaaaagtgtacatctttggtgaaagtggaaaaatttcaaaatagcgtaagatcatgaataaaacattgaaattggaatcaggaaacctgagtgctgattccttctcatacttattagctctgtgatacttggtgtgaattttcagccctctaggtttgaaatatcagacccctcatctgaaatatcagggcattgatgggcatgatgtgtaatttttcttccacttttaccttgtgaaagtcaaggggccgaaatggagctagttttttttttgtttttttttttgagacggagtctcgctctttcgcccaggccggactgcagtggcattgtcttggctcactgcaagctccacctcccgggttcatgccattctcctgcctcagcctcctgagtagctgggattgcaggtgcccaccaccgcgcccggctaattttttgtatttttagtagagacggggtttcaccgtgttagccaagatggtctcgatctcctgaccttgtgatccgcccgcctcggcctcccaaagtgctgggattataggcgtgagccaccgcgcccagccatggagctagttttcaagctttcttcttaatggtgacctgagcctctcagtccaacatgaggactctccactcatgactctttggatggaactcctccacaaagctaacatttttgtctgaatcagttctctctagataacatcatgggccattacagtccacaccagatctagtacataaacttatcctagattaatgattttacaagtgagtagaagtgtttgctgaatatccttaagctcaaggccattccatgtctatgtttgactttcccacataagtatactcggacacaggtaagagaagtcatcatggcccagagaaagaaaaggacattctggcaaactagtagaacagatagggttattacctatccactatatagggttgcattaataatgtatgttattagagataggattattaccccagtggcagagacattacccacaaaacaggaaatgagaaggaacaaaccttactgacctgccacaaaacttcctaactgaccttcacatctaccctcgcttccctctgtctactctgttctccccatagcagcctgcgtgatcctttaaaacacagactagatcaggtctctccccggattaaaacctttctctctgccatttggttaaagtcctgagacctgtgaggctctgcatgatttctagaaatacctttctctaatgtcatcttgtgtcactcctctgctcagtgacactgacatcctttgtgctcctgtaatggcacgctgctccatctctcagagtgctcattgtgattcccaccatgctgtgcctagttagcaccagataccagttaatgattactcctatagatgcttcccataacctcacagacatatccatgttcaggttccctgccaggggctttccagatattacagtaaatgctgcagtgcgctgcccggactcccattcagaaccaagatgctaattacccccaaattgctcccaatcaaagagaaacaccttccccaagattatagcccttcctctaaggtagcctgcatccaatggcctatggatgcagaagtataatgcccaggccccaagtttctgttcaggacaactctgggcacaattcaggacaactctggaaagccgtcctagctcagagctccccgtaggatttaagcctctgttgtgacctcatcacaggtctgtccaaacatcttctccctcatcactcccagatctaagacaaccacgtagtttcttgctcaaaacaactcactattttgtaagtgtgtgtgtgtgtgtgtgtgtgtgtgtgtgtgtttacctggttttatagcgtatggtaacatcggtcttcatcaaatatgctccatagtggggagaccatgtccactctgtttactgctgtatcttcagtacattgtctaaaaaataacagttattcaaaaacaattcttattaaagtttgtttttttaatttacagtgagattgagttcttttcatgtttaaaaaatcatttgcagttttctttaatgaatgtacaggtttgtaagagaacattttgcataaatcaaacaaatctttatttcatgtttctgtttttatgttttgtttctatcttgcataaatatttcatccttaggcagttacacttaacagtcttttagactcccgggatccgtgttttcctttgaaaagcctatgttcatactccaaggaaattaaaaacaaaccaaaaaatcccattttttactttttacatttaagtctgtttgagccatcgggaatttattattttttggaagcataaggtatagatccagggttttggtttttccagatattctgtgaatgtaatacatatttctaggacaaagggaaggtggtgacaaggaagggagaagagagagagagcccccaaaaaacaaacttagaggcctgccatggcaaaaaaaaaatacctcctcctctatctgggttgggacacagagggcatccatatttggatgtggagaaacaagagattagaatgactatgatattaataagggccaaagaatatcagcaatggaaagataatgttttccaacacttcgttttacatattgtaagcctgaaactcagaaatcgagtgacttgttaaggtcatgctgcagtttactagctgagttgacatgagtgaccgggaactcctagaccacccttctacaggaggcagtcagctgttgtcagcagggaatgaagcaccagtaggttgagtggagtgaccttcaagaatcctggcaaccctgagattctgagactcacaaatgtgcttttgaagatcagcagtcttataatcaaagacagatgctttaaggtgaataagttacatactggaacacagtaaaagctcaataaatacctcagcaatgagtgtggcatgtccttatcaataatgataagtaaatgtgcctctggacatgatgaagaggatccatgagcgtaagtgtgcagtttatgacaacgtcagtgtctgggatggttgctggagtgccagggagacacagccccttgggactgagcagtggagaaagggggaaggggacctcacagctggggatcctgaagcttcagactctcctccatcctgtaacactgggatagtgaggccagacagcaggaaagggctggagaagagcattgctaaacaaacttagcttgctcttgtcagcttactaacatctaccatgctcttctataccccaagacgacctgtactagtgtgttacataacatgttttatttaattctgaaattaaccttatgagggaggcattactatccccataatattggggattttttattgaataaaattccagatttttatctgcgttacatttacttaatgaatgcttagtcaacaactactatgtaaatgttacatttcaaacccaggtcgaactccaaagccccccaccacacacacacacacacacacacacacacacacacacacacacaactgaggtgctggacccagttctcatctgcctcttgttgctgtctgactgtacccattgttagtttaagcatcagcgttgtacaacccaaaggactcctggctttcccttgttcccacaaggagcaccctgctggagtctaaagtttcccatttggcccagctcatttcttaaaatcagcaagacccaaaggtttcaaaacagagtgggtgaacagcaccatcatccctgggagcaaagaacagcaagagaatcattctcattggatttccctgccacctccatgctatctccagcctgacatcagtcatggatactgctgccctgggctgtatagggagaaacagtaagtctcttcatcacagactcaatgaaagttgctgacagattctaacttgtggagtcacttgcaaagcagggccagggttgcttgccccattcccaaggggcttatgtctccgtgtcaaaatctgggtaccacagtcaggaagccgccgaagtaaatgacctaataagaaaagctcgccatgctggacttatgaattaagatgcattggctgggtctggagaatgaatgagttataaggattcggtttcggttagtcaagatgagtttagacttggcattaagattagtgagagggttgcatgcttactgcttagggagatagatccacttctgtgattagatgtcattgctgatggccaggatacagttctaggaaatacctgtggttccagagagacagctaacatgtgtcttctcagggcttcatttgtgtgctctcatttctgattttatttactacttatggatctctaaaggtattcattcagttaactataattaaagtgtgcagccagcacactgctggacccatacatagatgcatcaacacacacacacacacacacacacacacgcacacacacaaacccatcaccttcacgttaaagaagtgtggttggcggttgggttagaaggggagatgatgagaatgaagtttccatgccaataacaacagcggaaactgctgttattgaactcttcctatgtggcagccataatccaatttgatgctcacgctagctctactattttttatcttacatctggggaaaattccactccaagaggattagtatcagcccaaggtcatacaactggcaattcacagggccaggatataaacctagacggtccaaggtctgtgccgtcagcccccatacaagagtgagtcatgtcagggaagggtggtccactaggatagtcacagcattttaagaagcagagctagaagtccagtgcaatccacataccacacacatctttcagggactgtcagagcagcagcatccaatgggtcttgcctggattccagagcttgaatctaaatatcttgattccctttctgccttcagccattgtaaacatgtagcagatggtcaccccaaagggatcttattgtctctctgttctggctccccttgcttcctgaattgaatggctttgctgctgctgctgaaagctggaaatatgtggctgagtgagagttctcagcagaggggcatctagaaagcctcacaggggtgctttagactggcttctgtgctcagcctctggccatgctcagtcccgtgtcctgcctgcctttcctccctccttctgctcacaatttctgcttttctttgtcacttctgctgcttctcttgggttaccttttattccttctagctttctgtctgcattcctgggcctcctgtgtctctctgtctctcactttctctccattactgcttttctaacacctcgcctctctggttttgtgtttctcgcatccacactggctctctcctgtgaaccttggcctttctttatctctgaccacaaaggtacatagggcttaacacagaaacgatgaaaggaaacttaagggattagaatgtaacactaacaacatctgctacagcaaggtcacgctgaagtcaccaataactcaaatctttcaacggcttttaacaactatgtttgtttctcactcatgccatgcgcccatcactagccaggaagtagactctgctcattattatactgtagggactggagcagtagaaagctccctttaaacacattcttccatgatctcagatgtggagaaaaagggaatgtgactcaaatgccaacccttaaagctcttgctatgaagtgactctcattacttctacccatatctcactggctgaagaaaatcactcgaccactcctgaattaatggagcaaaaatatgtgatattcccactgggagggtcacctccaggaaggacaacaaatatgagtgaacaattatttgtccattataaacgtctgggtttctgtttgtttgtttgttttacttattctcttcctcatgaattttgggtttagcttatcaaataatgtaagtaatttcagtttcacagtttctgtcactgctgagctacagaatatctgaaacagtcatagcattactattcttggcatgatatagagggaaaggacagtgtgtgaagtgggtgaaatcagagcttcggtctcaggccccaacatgtgatgactgagaaacactgacatttacttaagctctgtgagattctacattgttatctaaaaactgaatataataattctccctcacaggttaactccagaataaatctgtagtcattacatgtgatttttttctcctatgtctctcatattcttctcattcaatcagcaagatatcttttatataatcaatataaatcaataagcaatgtaatgatatacaagtttggattatgtttaggttggtgagacaaaatgacataaaaattaagagcagagtctttgggatcagatctgattcaaattcaaactctaccatgcagtagctggtgttagtagctactatcaatgtttttgtttgtttgttttgtttcttttcttttgagacagggtctacctctgtcacacaggctggagtgcagtggtgcaatcatagctcactgcagaactcccaggcccaagtgatcctcccacttcagcctcctgaatagctggggctacaagcacgcaccaccacacccatctaatttttgtattttttgtagaaatggagtctcactatgttgcccaggctggtctcgaactcctgggctcaagcaatcctcctgcttcagcctcccaaagtggtgggattacagtcatgagccaccatgcagccactattgtcaatatgattaaggattgaaagccattccagccaggtgcaggagacatccctatttgtcatttgtctaccattgcagcccatatcattcacgatttatttgccttgctccaccccttccttactctgaaaaattagaatattaatagaaaacaggttttaggatcagtttttatatcacacaaacatttactaatgctttgagctcagatatgtaggaatatttatgtaaagaaaaacataagttgtataacccttaccaaattttccaagagtcttggattcttttaccaagaaaaacctcacagataaagaaactttttaaaaagtcttgctttttttgttaaaataaatttttctctaatttttgagagctaaatggttaactgaaaaataagcattcattaacagaatgtgttacacaaaaatttatcacacattttaagagacgtattacgatatatgcaaaaatcaagactgtgctgtgtggtttttaagcttagtgacaagtagatcaaataaggtctatgaatcgtatttgtgtttgacatctaagcaaactgtctgggatcagttgtgggagtaaagcaagatgtttttgaggcctcgcgatgtgcatgtgtgatagacagagtaatattttgttgtttttatgtttcagagatgcttgcagcttgggtgatataaaactcccagtggggcaatgtgtctgccttcctcataaatggacaaaaaggaagaaatacagtgtagtatcagaacaagcttgacttcagatactgcagcctcctgttctctgagaaggggagtgaaaagagagtggggtgagttagtgtctttctttccattcaggatcagatatctgacagagtagtctaagccttagaaaaagaaaattttgttgacttatccatgacaggttttttaaagggccacaaattttttggcactcctcccattaagatatggctctggctgggtgcggtggctcacacctgtaatcccagcactttgggaggctgaggcaggcggatcacgaggtcaggagatcgacaccatcccggccaacatggtaaaaccctgtttctactaaaaatacaaaaattacctgggtatgttggtgcatgcctgtaatcccagatattcaggaggctgaggcaggagaatcacttgaacctgggaggcggaggttgcagtgagctgagatcacaccactgcattccagcctggtgacagagtgagactctgtctcaaaaaaaaaaaaaaaaaaaagatatggctctatgcccctgcctcttgaatcttgtgttgcttggactcataaaagtatggcaaaagtgaccatatgtgacatctgtgacaatcttatttgacaagtagatcaaataaagcctatgatttgtatttgttttagacatctaagcaaactgtctgggatcagttgggaggataaagcaagacattttggcacaagtactgtgtatcatctttgtgcataaaatgggtgcccctttccatcaggtagatgcagctccttcagcccccatgtgccccttcagtctctccatcaccacctttgtacagtctacaagccacacaattttactcaggggccctaattcagctcctatctccatccaccaccaggcaagtgccctcttgctagactcttcaattctccaggtgacccacatcaattctcaagaaaactattttctgtctgattccagcctacaggtattatcatgtgagataatttcttcctccaatctgtctgaaaatctagcagttacatatttctgtgcattaatagggagctaccccatcccctgatttgttagtaagtcagaattgagggaggaaactcccactctcaactctgccagcagtgaaaatctgcagagatgtcatagaagacagctggagattggggcagaaaagcccccagtcagaggatatctggctttgggaggcagagcacatcatgaaaacaaaggattcctgtagcatataaagaaaaaattcaggcatctagagtgagccattcaatccttccttacctccttcctttaccatgaacaaaacgagatgagttaaatagttgccaaaaatttgatcataaattttcttctgtccctaccaccaaacatgttcaaacattccatccacccctttctaaacatattgtcctcgtgccactccaagttggctttatgccaaaatgtagagaaaaagagttgctttgtagtagcaatgggccaagattagatatggcacatccaagaaaaagagtacaccagggagtaatctgtgtctcacctaatggccaggcacagctttatgagattgagtctaataatgcaagtcaaaatgtcaacatatcccaggaaacagtagggcagatctgagcagaggtgctgacatttttattgtagtccctggactctcttcctcttctggaaatgcacattcagagatgattacagtgcaatctaacgcccccaggaacatatacagctcctttctcaagctcttccccgacttcaggcattttcttcttcagattttcaaaaacaaaacaataattttattacaaaacaactgaaacaagaagtagctcagattatcagttactgataagcaggttggtttttatgtttgtgtattttgcccacttccaagggcctgagtgtgataattacatatggtttgatgatgaaaataaagatgctttagcttagatatttgttagtattttccagattaccttagaatccatgaggactggcccacctaaaactgatttaggtcagtaaatctgacctgtaagaaggttcagaaagggggtcaacaggaaaataaacaggaaaactaccttgttttattctgctgcccaaatttgcttgggtttcacgtagagaaacaagcagctgtcatagtcaatcaccacacaggtgaaatgggaggcatgagtggagaaggattattttttggccagaggctgaggggatactggagtaggaatcaatctggatcaaagaagcaataacaatggaaatgtccattaatagactgtgtgaaaagatgaagagttgactgaggaagaaatccccgggagactgaagacttcatcaattcaaccatgtaaatgactgcatttcccattaatctcatcaagtgaaagaagaagttaaccaaaaggaaatggggcagttcctcaaagcctgggaagcccaggagacagaattgagtggcactagagtagttcccctcgctgtttcaatcctagctctttctctctgggaaggctagaaaggaaacaagaattaacattgctccacatgcctttaatcccaaaggaaataaggacagatttaggattatgctcctggattatggagcctgatctatgttatgatcatttaaccgagttgacgctacatatttattaaggaatgaacacaattgtgtaaagatgaatggatctggtcaaataagtggttcaccaggcaccaaagctgcatggtagtcattgcgataggcagaggaatgccccctcaacgatgtccaagccctaatccttggaatttgtgaaatgttgctttacataggaaaggggactttgcaggtgtgattgggttgaagaccttgagatgaggggattagcctgggcgatccaggtgggctgaatctaatcttaggggtgatccagatgggctgaatctaatcttagggatttgtaaaagtggagaaacttctcctctgagttcagtcagagggctaagtgatgacagaagacggttctgagagacacatgtgactggctttgaagatggacgagggaacaataagccaaggaatgtgggcagcttctagaaggtggaaaagcaaggagactccagaaaggaaggcagccctgatgacgccttgattttagctcattgaggcctggtcaagttactgacctggagaatttgtcaggtaataaatttgtgttgtttaagctacaaaatttgtggtaattggctacagaagcaatagaaaatgaatagtcatgaaggcccatgtagccccgacctatgctcctgcctttcaattcccaagcccctgcctccagccctgctctgcccaggacctgtcttcctacctgagctccctgctagcaactggctcctttcttcttcctcctccatttctagccttgtgacctacatttttctttactttctttctttttgtttttgtttttgttttgagacgaagtcttgctttgccacccaggccggagtgcagtggcacgatattggctcactgcaacctctgcctcatgggctcaagcaattctcctgcctcagcctcctgggtaaatgggattacaggctaattttttgtatttttagtacagacagggtttcaccatgttagccaggctggtctggaactcctgacctcaagtgatacacccaccttggcctctcagagtgctaggattataggcatgagccaccgttcccagcctcttctttgctttcaatgggtcagctccaaatctcagttccaagctcaagtcctacagaaagattgcctggtcaacccctccagccctggttattcttaacctcagggcccatctgtactaccttcattgcacagcttttccttgaaatctttgagtcattatttctgtctcagtgtgggtggggttgcactgggtatcatgcataaggtttaaatgtctctgagatgaaagactgtgactcagagtttactagggagctggaagcttggagtggcctccccatattccctttacctttgtccccagggtgtgtatcttctcacaggagccagatcccaagatgtgtccaccaagggccctgcctctggaggcagatatctgtttgattcccagacttctccaaatgatactttctttggagaattttaacaagaggctgctatggtccagggcctccattccctgcctccctagatccctaaaccctggatccacttggagattttgtctgcaaatggaaactctggatccagccctggctaggtacccaggctgtcataattttagtccagctgggaaaattcctttgtgttttttccatgatctcatattttttccatggtcctgggaggaggggaagggccaggagacaggcactgccgaggtgctgatcctaagccgtcagctgcttgggtgtatctgggtctttatccatttctttattcagatctttttctcaaatgttacttcctcaaaacagaggacatctcattattctaaggagcaacgtcagtgcctcagaagtccccagagggctccttggcttcctgtcattcccacagaaaacactctgctggagtctaagtttcccatccagcataagctgaactgtaaacatcatcaagacacgaaggacttggagatgtggatgagagaaagagctgaaaacactcatccttgagagagaatggacagaatcagcacctttcccctctggtctcctgagggacttatttcccatctcccagccccacatcaatgctgctgcccctggctttgtagtgacacagggtaggtgctgaattagaaaatcagcataaggactggcagagttttagctcacccagcagtgccacctcttccaagctgtgcacaaagcccctttccaccctttccagccgcaagacacaacccaagggaaagagactgcatctctgatgtcattcatgttatagagtgaggccagtaggcaggtgtctccaggtatgaatgcctaagtgagagcagcttacaaagaagacaacaggcttggaggctaaggtgagggggggaagtctgtatgtcagtcaggttctcatgcaacacaaacataaggactgggtttgaatttagtcagtgctggggtagattttaggattttagacctaccgttaaggcttgccagtggcatgggtgcaaggctttatttatttatttatttatttatttatttatttattttttattgtttttgagatggagtctagctttgtcatccaggctggagtgtattggcatgatctcagctcactgcaatcccacatcccaggttcaagtgattctcctacctcagcctcccaagtagctgggattacaagtgcccgccaccatgcccagctaatttttgtatttttagtagagacggggtttcactgtgttggccaggctggtcttgaactcctgacctcgtgatccgcccacctcagcctgccaaacagctgggattacaagcgtgagctaccgcgcctggccgggtgcaaggctttttaaaattagaatgtcattgctgtgtggccaggacacaaccccaaatgaagcatttatggggctggagaaagggccagagtatatctacacacagcttcactccttccactcctgacagtttgtgttgtaaatactttgtttgtgtttgaaatgttttaaagtacccttttagtgaactgaaattccaagaaacagtgtaaagctgtaaagatcttcacacacacacatgctggcaatgagaagaagtgtagagagatgatgggcaaaaaaaatttgagttctattgacggtctaacaataagaacagtgataacaataacaacaacgatttgttggctagtatgtgctagtcactgcactaagtagtttacttatttaattttataatcaccatagaggctaagtaccagtaataccattattttacagctgaataaacgggctcagagagagtaagtaacaaagaagagcagatttacggcccgtgacaagcaagtctagagccagaattcaaacacaggcaagccaactccatagcttacactttgcaccacggcgggaggggaagtgcaatggagacggcaaagcagcacccttgggtagacagattatgccgttgggaagcctgatgactgtgtgtgtcctgggagagcagccacttggatttccaggctcgctccctgacctgctgcaccctttctgctctccatctttgcaaacacgaagcagaggtctcctctaaaggaagttaatttctggactcaaaactctgactttcactaatttcatgatcatagccggagaaatgtgcacaagcgagggtcctcagagaggcagctcagaaaggtttgcagggaccctttaaaaagggtcttggggcacaacctctgggtgtgacatagacggattagcctacatttgggggcttctgggtcacatgcactaatgctctctctccctctctttttctgtgttcctccccttcctgtatttctctatttgaattttttctgttctttctctggtcctctgttgtttccttcttgttttctccctaaatgtcaatgtctgttgccatgtggtcttccttaatcttttcctctgtttttctttcttccccccctttttttttttcttttttgagatggagtctcactctgtcacccaggctggagtgcagtggcacgatttcggctcactgcaacctccacctcccaggttcaagcgattctcatgcctcagttttgcaggtagctgagattacagttgcctgcacctggcttatttttgtatttttagtagagacagggtttcaccatgttggccaggctggtcttgaactcctgacctcaagtgttccccctgcctcggcctcccaaagtgctgggattacaggcatgaaccaccatccccagccttctctcttcttaataatggctttctatgtctttcacttctctcataccctcactctgtttctccttgactctcccattcctgttttgttatctttctttattgccgtttctttctgcttttctgtttatcactcgctggctacttgcctttctctctctattctctgtctctgtccctgtttcttctgtttcaagttcaatggttctctgtctctatctctctgtttctgcctctccgtctgtcttttgtttctcttgcatgcagggccccatactgtggatcatggcaaatctgagccagccctccgaatttgtcctcttgggcttctcctcctttggtgagctgcaggcccttctgtatggccccttcctcatgctttatcttctcgccttcatgggaaacaccatcatcatagttatggtcatagctgacacccacctacatacacccatgtacttcttcctgggcaatttttccctgctggagatcttggtaaccatgactgcagtgcccaggatgctctcagacctgttggtcccccacaaagtcattaccttcactggctgcatggtccagttctacttccacttttccctggggtccacctccttcctcatcctgacagacatggcccttgatcgctttgtggccatctgccacccactgcgctatggcactctgatgagccgggctatgtgtgtccagctggctggggctgcctgggcagctcctttcctagccatggtacccactgtcctctcccgagctcatcttgattactgccatggcgacgtcatcaaccacttcttctgtgacaatgaacctctcctgcagttgtcatgctctgacactcgcctgttggaattctgggactttctgatggccttgacctttgtcctcagctccttcctggtgaccctcatctcctatggctacatagtgaccactgtgctgcggatcccctctgccagcagctgccagaaggctttctccacttgcgggtctcacctcacactggtcttcatcggctacagtagtaccatctttctgtatgtcaggcctggcaaagctcactctgtgcaagtcaggaaggtcgtggccttggtgacttcagttctcaccccctttctcaatccctttatccttaccttctgcaatcagacagttaaaacagtgctacaggggcagatgcagaggctgaaaggcctttgcaaggcacaatgatgagcccagggcccaggggaacctggcctgcctccattgagcagttctgtggggagggagacctccagcaagtgggaagaacactgctgagtttctttagtttttttccctctgagcaataactacagtgagccctgagtgctgcactgtctggcccaaagctcttatggaccaccatggaagagttccctacatcccctggcagccgtaagaactctgagagtagcccagagctttcagtaaagggaagtgcatgtgctttgcatttaaggaagagcagccaagaagtgctctatgatcaagaggtagtgtccaatcccagtatgtgtgcatgggtgtgtatgtgtgtacatatgtgtgtatgcgtgtgcatgttccgggtgtgcttctctatcacagtatgcactgctgctgagtgtatgcaccataagtgcttgggctacatgggatcaagagaagaagcaaaacttaccaaaaacaaactgattgtttttcaatgtgtgtgtgagtgttgggaggaggactgggtccttgtataattattcatccatttattcattcatttcttcaacattgagtaggctgtgtgtgtcaggcactgtaacaggtagagggtagaaaggtaaaaaaggcataaatggttcttaacctgacaaagctcttggcctaaggaaggaaaaagtgataaatagctgtttccagcacagtggggaacgtgcaacagtggattcacagacggtattatgagcacacaggggagcaacactgagaccaggaggaggctcagcgacggcttcctgacaagatgacacctgagtagcacattgactataaggtggacactgtgagagtgcaattcatcaggtacctttgcatcagagaaagatgaaacagagagaaattaaaacaagataaatctccgctagtgaggaattatgtggtttccagagaggaaatattcagagttttagaaagacaaaataaactttgctcctgtatgattagaaacattcatttgcctaaaggcaagggattgtaataaacctagtaagttcacttattcagtgattatatatcctattttacacacatacatattatattgtacattacataaaatatgaacattatattacattcacatacgtgtgggtataaaattcttgaaaatctattatgtcccatgctgcctttggagttaaacatcagctccactgtcctccctcctccaactatagcctgaaatttttaaaatcttccagttactttgacctcaggatcatggtgttcccttagcttttgcccatgcagaattttctaaagtagccccaatttaagttgttttgacacactgtttctgtaagtacactttaatttaccaaactccatatcccaatttgtgatatataaactacaaccaggagtttattcgtagctacacttacttgaaaacaataaaactactaatttatcacaaatgtcaagcatttaaaaaatccactatgtggaaatgaatgaggtaagctcatttggagcttgagagatgcagcttgcttaccaacccattggttctccttgtgacctcctcttaccccaagctaactccttcctaaacgaggcatccctttctctggctttctgaaagtgtctttctttcttgctgagataccccttagccaagtcggagggtcttttcacattcccagtttcagtttctggaccaaaattttgcttgttctttaattacataacagagcaatgattctgttgtttgcagttgctattgaatgaattgatgtttttttcctctgtttattctctgcttgctacctagaaaagtatttgtagagtaaatgaaagaaggatgagtaaattaagaataattctactaacaatatcttacttttgtatacttttcatactttatgaaccacttttacatatattttccatttggttttaccctcatagtaattcagttaaataaatattcactgatcacccatcatgagcaaaacactccactcagcagtggctgttaaagatgaaagaaatgaggagtctgacctcaaggggttccatgtactgagagaaatttaaaagtgtggttaatttcaataaggtgttttcctatagagtatgagagctcggaaggaaaatttctgattctgaaactgcagcaagcggtgttcccgacccgctttagcgggtaagggaaacatggctgagaggaagaatgagttggtcaaagaaattgcagaaccgacagcaggatctggttcttcaaacctttttttccatctccccatctttggaattttcttcttccatctgaattaaaagttgggttaattcaaagttggaacctccaggatctgaagctgctcagttttgcctcctctagacccttactgagcacatatctatcaagattctacaagtttgtagatttgtaatggcaacaattctagtaaccccttcctcacagtaattgcacatttagtatccatcacttgaaagaaacacatattggcagaaagcaagtatagattcaatgttacttttaaagatttgtgtttcaatatcaaaggcatagaagcaacctagatgcccatcaatggtggactggataaagaaaatgtggtacatatacactatggaatactatgcagccataaaaaagagtgagggcatgtcctttgcagcaactcagatggagctggaagccattttcctaagcaaattaagacagaaacaaaaaaccaaataccacatcttctcttataaatgggagctaaatattgagtatacatggacacaaagaagggtataatagacactggaacctactttaggatggagggagggaggagggtgaggattgaaaaactatcaggtattatgctgattacttgggtgacaaagctatctgtacaccaaacctcagcaacatgcaatttacccaggtaacaaacttgcacatgtaccccttgaacccagaataaaagttggaaagaaggaaaaaaagatttgtattttatttatcaccactgtttccacaaacatttgaaatagagcaaataatacctacacatgtaagatatttttattttgaataaatattttgattctgttcatatacaatgttaattatacagtggattcacagtccctttgctatgacatcattttccctgggaggtgagaacagttgatgtggttgtttgtctatgtaaggttgttggatgtagatgcacagatggcaacagcctttccacttcatagaagtggcttacactggaacctaatttcagggtggtaggagggcaaggttgctttcaatacccagaactaatttaagtgtgggcgaaatcatgacaggatttcgtgaaactaaaatgttttccctggccccaaatatcctcccacacacccttcatttgtctggcatcctagttctaaatggctaacccaagaatccattctcacacatgtatatcccagtgggaagccaaaaaaatggatttatttcttccagttgggaggattagagagcaagaaattgaaggtatgaaagtttttgaagaaggaagacaaaggcatataatcacttttcaaaggaaagtcaggcctgggtcttgcggtggttggtagcaacatcaagaccctgcacagatgggattttaggagtggtgaggtgtaaaaccctctgggtcaaactaagaaaatgtcagtgttgcctacagtggactagattcatatcaatctaattcactaattctttcagcactaggttttctgatgtacatatgttttttcaacaatgcctgacgggtactgaggaatggtggtcgtggctcagtggtctgatagtaaatgtttagccacctctctccatttgctgacttctagcatttgccaacttcctggtgtcaatattttcaccatgtccagttttaagctaccgagatgacatctgaagttggagttacggaaagatgccccaccatgcagccccatatagtatttccaccacactgagacaggtggcctaaataacctcaatctcatggacaaaagtaaaatatagcaaagtaattaggagttttgaatatgaatcacctttgtttttagcataacttatttgattttgagtttctgttatctaattttttttatcatgcctgtatttaattcctgccaatttaacggtcgatttccagacatttccatacgtcctctgaaatctaggcagaggttcccaaagctcaactcttgtcttctgccacatcacgtggaagctgccaatgcttggggtttgcaccctctgaagcaatgaactgagctgtaccttctttccttttagccatgactggagctggagtggctgggatgcagggcaccaagtcctgacgctgtgcagagcagcagggccctgggcctggcccattaactatttttccctcctaggcctctgggctgtgatgaaagaggctgctgtgaaggtctctgacgtgttctgtaaacattttccctattgccttggctactaacatttgggtcctcatctccatctgagaccacctcagcctggacttcattgtccatatcactatcagcattttggtcaaaatcattcaacaagtctctaggaacttccaaactttcccataccttcccatcttcttctgagccctccaaactgttccagcctctgccagttagccagttccaaagtcccttccacattctcaggagtcttgtagcaatgccccagtatgggttctccaggaggctccagaacatcactagcatcctacctctgggtttcccttagatcctgctccccagtcaatgctgcattgctgtcattctccttcccttgagttagacacctgccaagtcctatggaggtaaagctcatggaattgcccttataagggaacttatgaattattttatctgatagacacaggatcctccatatatgaggggacttggcttcttcactagcagctgggcagctcaccactcacacttgtgtttctgccacttccctcactcagtggacaattcacccagaagttcttgggttacccagccctgggggtgagtccaaaggactgtatatgaggcccttgtccttgtcatggaggaagttggctgtgatctaaggagaggggacatcacagatttccttccctctcctccacagacacagaaggcagatcccccattctctgcctcatccccatgcctcccttttgttggaggacccgaccaaaccagccttaaaggggtataacatgtgactaattcagctgctggcagagagggaaatcaagcatttcagaaaagctaagctctctgaacttacttaggtttttgcaaaattaaaggcaatacagtttcagtgctgaagataaatagcacctttggtgactacaatatgattgccctaggcaagcagagatttctacactgatgtacacactgaagtttgttgttatcaaatatgccctgttatttcagtgagtacagcatcttgcagaggacacttacgggtcccctggggggcttgggtctgattagtgatgatacccatggccagtctccagaaatccactcattaatctcgtctctttaggctttggttgtctacacaatataccattttatgcctatgttattttacacactcagttgcctctctcaggaattcacttttcctcttctcagcctataaaactgttctttggacctcaaaaagtcatttcagcttaactttcaacttaatcaaaagaaatggggcattccccaagagctttgccttcaggaactcagaggaagtcacactgaggtttgatataaggatttcttcttaagatttgaaccatgcagtgaagaaaggggcttcctcccacagctgggaatggtccatctctggacttggttcaatgtagttttgtctatgtgtggattctgagctccttatgttaggtgtcgtgccttatagatctttgtttttcctgtacctagaatatagtaggtgttcaataaatgctagctgtcattaatcatgaggtttatgtgaatttggaacatgagttagcacgataacctaaacatggaatgccatcttagttgatggtaagaaatgcagtcaacagagcaagaggaaaggtttcccactgcactacatctcagttagttgtccacactagtacgtcagtcagttccaagatgcacctaacaggaaccaaacaaagcaatgcagaaggcaagagttctagaaacggtttgatgcaacctcctatttgtaaacctgaatattttggaggggaatgcatagatatctttgcttacctgctagtctgcctgcataactgaaaaaggcagaactgggacaatgggtgaaggttagaggacgtcacattgaggtttgacataaggatttcttcttaaaatttagaaccatgcagtgaagaaaggggctgcctcccaccgctgggcatgctccatccctggacttggttcaagcagagtccctaagccagtctgatcagtgtgttgcagtggggatgcctgcactgagacagagggaggcaggcctgcatgacctacaaactcccttgcagttccatgaagctgtggtttacttacatcatgtcttaaacctgaggagccttttataacagctactttgatttggaactggaatcccaagattcctcccagcaagttgcaagatttttaaaaaattattttttcgtttctatctatccaggagtctcatttgccattgtgcacattgacatccctgccacattaagacaaatgtctggaaccaatatatctagacatctctaggtgacatccacatagaattctaacagtgagtcagaggctgggccattgattgaagtcactcaagaagcttaaagtcagactaggatgagagtcttcagggtcttcatcctggttactactgtctccggaaatgggacctgggataaaggtcactaaggaatgatggatccaacaatagcaaatgtgtccccaaattccctcttccaatgcccttcacgttgttgagattggaacaaggcctttcttatacaatttattgtttgaaaactctaccagcaaattgtctagctcagcgttactcagatattaacgtgcataggaatcacccggggatctgcaaaaatgcagattctgatttaggaggtctcaggtggggcctgagattctgcatctccaataagctcccaggagatgccagtgctgtttcaagcatcacactttgaagagcaaagaaccacaggcaaggctgtggggcaggtcaggctgcatgatgctggattccatggggtgattgctatgaaggcccaaagctagtcagaccgtccccaaaactgaccagagaccccacttccaaggaaatcctatgaaaaacaggagatagcccgctataggctattgattatttttagttttttaagagggggaatgtgcagagaagagcgagtagcaggaaggagtccctggggaggacactgagtgactcctgtgctgattattttaggaggagaagctgaggaaaagtatctgcatctcagaaggagataattactttccacttagctcttcagtttttcaggaagtttgcaaggagggcaagtaattagtctcttgggaggtgaaagagacaagttctcaggatgaaaaacttttccctgctggtctttacagcagaatcagaagtatctgcccacttttggcaaggcccacaaatgcaaaaatgtactgtgggggttgaaaaagaaaaagagctatgttagagatcaagctaaatggcagagacagtaagacagtggtgcctccaagctctgtgtcctggaaggcttcccctgaaaccattcttcatagtcttggccctgtggggtggctcccacactgtgacaccacactgcaagttatgagcagggcctctcctctagggatcctgtggacagaaccagcttcagaaatgagaggaagtttgcatctactctttgccccgctttgctaatcctagcccagcccagctgagactcagtctagtaaaagaaaccagacccggatctcttcctgcccctaccatcttcccatgacttctcacgccatccagatttccgaggaatgcctctcttatcagccctcccaccacgttacctacaacaccagtcccactccgtttactccttctcatctgatttctaccacctttgcttctaccatccaggggccctggtaatctggccaggctgctctcaggaaacccagcctcagaaggcctgggcaactggtccttcttctggaacttggatctaagattctgcagtagaagggaagtagtggccccacgggaaggggaaggcagcaagtctgagagtgcagacgcagctcagctttcccccactctcaagtgcatgaaaaaggtaaggtcttcatgactttctataagagggttggaggagtggctcccagagagccatttctgtggaaaggcaagaggctttggggccagatggaagaagtgggcagcctgggtgtgaggggtgcttccatccaggagcggtcaggccgagagaggggagccaacagaagcacatggctcctcctgtgttggggtgccaggcctctctgctcttcttagagcacctcccattttcagaactctatcatagaccttgaagccaggtcctgaaaaggaaacacatccaaaataaaggaaacttaaaagaatgcaagcaaaaccacagagctaagaaagaaaggttttaataggacattttaataatagctacatttactgagctcttacttaatgtgccagaccctgcactaagagccttatttgtttggattatctcttttaattaagaccgtcccattgtactcactctgcattccctatccattccttaactatcccaggtgcacagaaacttgcctttgagacattctaccaatgtgtgtccattagttctctgcagtgcaggagaagaaacttgcatgaagatgagggaccaggagaaaatgagaaaaaagagagtgaggagctccagcttaggcatgtgggtgcccacctgcagcaagtctactcctcgtgacttgtcaggtgctctctagccctgtcaagggctcaccctctcacctacaggctgctgggtctccaaggaagatccttttagtcacatcctcaatgacctccttgaccttctcattccggaaggtgaagatgaaggggttgaggaaaggggttaccattgcagtcaccatggccaccgccttgttgaggtatgtggagtggcccttgcctggcctcacgtagatgaagatggcactgccatagcccagaaccaccactgtgaggtgagaggcacaggtggagaaggccttctggcatccagaggaggaagggatgtgcagcactgcagccacaatgaggatgtaggagaggatgataagcagcatggtggtcagcacaaagagcagggacaggaagaggtccatgcgctcaatgtggcgggtgtcagagcaggcaagcttgagcagcggggcagagtcacagaagtagtggccgatgatgttagggccacagaaccagagtcgtgttttctgcagtgtgggagagacaatggagaggaaaccaaccacccaacaggccaccaccagcttcacacacactggaccattcgtgatggttgggtagcgcagggggtggcagatggccacgtagcgatcaaaggccatgaccatgagtatcaggaagttggcagagcccagggagaagtaaaagaaagactgggttaggcatttggccagggacatggtcttgtgagtggatagcaggtctgccagcatcctatgtaccacagtggaggtgaccaccatctccatgagggagaagttgcagaggaagaagtacatgggtgagtgaaggcgggaatcaaggcaaatgaagctgatgatggccaggttgcccagcagcatcagcacatatatcaacaggatcagagcaaacagcagaacctggaactcatggagataagaaaatccaaggagctcctctgcctaggaaaaccagagacctttgttcacttgtttatctgctgaccttccctccactattgtcctatgaccctgccaaatccccctccacgagaaacacccaagaatgatcaattaaaaaaaaaaaaaaaaaagaaaatcccaggagcacaaactccctgacaatgctgtagttacccattgcacttgatgcccattctatgtgacacctgtgagaggttgagaactgttagcaggagattgccatcaacctctctctcaatcaggtccccatagtgctggcctggctccccatgcacactagcctgtgtgcacagttgaccccaggagacacattcccaaaaggcaggagtttccctggggcgaggaatggattactggctgggatgagcagatttatgacttggccacctctacattatcaccattcttaagctcttcctcttctgtcttctactcattgattatattgtacaacacacttaataagctccaactctgtgcaagacatttggctgggtctgaggatgaaggggtaaacacttcctaactgccaaatgtaatggtctgttgttcaaataatagctgatatttactgttctttccctgtgccagaagatgcgctagataccttacacattatttccttccatcttttttgctgaatcttcatcctcttttcttctctataacattttcttctctataacatttcaggctacaaataacccgtttttgaagtgacttccacccttgactgcaaggaccctgcactcttgaatttctcctaccatcctgggttccctcgtctgtctccttctctagctccctgtctttctgccattttctaaacatggatgaccccacatttcttttcttatctttgtttaaaaaaattctctattttctccttcagaaatctcaccttctttaaccaaagcaatctttaaaatgtaaatgaatttcaaatctggattttgtcctcctctgagtcccggcccacatctctaaccaccagattgaccaccaccacacattcaacacatctaaagatacacacctagtcctcccctcccgcaaaggccatgtttatggctcccaattccccagtcatctgggctggaaactggaagcatctagccctcctttgtttatccatatccaccaccctagttcaaggatctgtttcctcttaaccattgcaacaacactcttaattttttttttattggtagattgctcaatcaccaacctatccaggcaccatgctgctattatattttattttcttaagttattgtgtcaatcaactgtttttaataatctgtaacaaggccgggcatggtggctcacgcctgtaatcccagcactttgggaggctgagggcgggtggatcatctgaggtcgggagttcgagaccatcgtggccaacatggagaaaccccatctctactaaaaatacaaaattagccgagtgtggtggtgtgtgcctgtaatcccagctacccaggaggctgaggcagaagaatcgcttgaatctaggaggtggaggttgcagtgagctgagatcatgccattgcactccagcctgggcaacaagagcaacactctatctcaaaaataaataaataaataaaaataacctgtaacaatgagatttcatttataattactttcaaaatcaatcaaactagctagccatctatcttcatccagaaaaagagtaaaaggatgcattttaaaatattaacaatggctatatctgggtgtgggttataggagtttacttttaaaaatcttgtattgaaattatacatatttaaactgttgtattagtctgttctcacgctgctataaggacacacccaagactgggtaatttataaagaaaagaggtttaattgactgacagtttggcatggctggggaggcttcaggaaacctatgatcatggccgaagggggagcaaacacgtccttcttcacatggcagcagcaaggagaagtgcagagcacaggagtgaaaaagccccttataaaactatcagatctcgtgagaacttactctctatcacgagaacagcatggaggtaaccacccccatgagtcaattacctcccactgggtccctcccacaacatgtggggattatgggaactacaattcaagatgagatttgcgtggggacacagccaaaccatatgaaatgtatatcatgaggtttggatagaaatatacatagtaaacttattacgacagtcaagctaattaatatatccatctcttcatatagttaccatttttcacatgtagtgagatgacctaagatctaccctcttagcaaatgtcaagtatacaatacagtatcattacctgtaatccccatgctgaacattagttcgctagaacttattcttcctgcccaactgaaaccttgtaccctctgttcttctatatgtccacattcatttccaaattctcttcatttaaatttgaattctcttcatatattattttagtgataaaaaaattaacaacaataatctcttcctttttcagtcaaatcaagcacagattctccctggcaactcctgccctacatgactctccccattcaccaccccccatagcttcacccccacctccttgtcacacactttgtgataccactgaactgaacccttgatattctccataagttaattccactttgccttcacacacttccctttttattcctgtgcttagaatactttgttctgccatctttgcctggcaaattcttaatcacccaccagggactatctcaaatgtcccctcctttatgaagcttcatcctcatccagatgtgaagtcatcctgcctggagttcccaatcaggaaagttaacaagatctgccttgcattataattgtgtacagtcagattccaaatcctggattcctagtttctcagtgtcagggctcttttttcatctttataaccttcagaataccaagcaacatgtcttacacagtgtaactactcattacattttggttaaacaggccaggtgcaatgtctcacacctgtaatcccagcactttgggaggcagatgtgggaggactgcctgaggccaggagttcgagacccagactgggcaacatagagagaccctatcactacaaaaaataaaaaagttagcctggtgtggtgccgaatgcctgtagtctgagctacttgggaggctgaagtgggaggatcacttgggcccaggaggtggaggctgcagtaaactgtgattacaacactgcactacagcctgggccacagaggaagatgctctctcaaaataataacaattttggttaaaccaatgagcacacatgttgggttttcatttctagtcctgagaaggaaagttttgccaaatggaaactcacattttctttaatgatgatgtgtatgtgtaatgtggactttaacaaaatgtaatggggcaatcacgaccccacaatttcttatcagaaagctaaaatgagaccaataccagcaaggcagcatcctggaatcaagcacactattatttctgtagcaaagtacacaaatattcacactcaatgaaataaaggcagaaatggcctcatgtttagttcaaaacaagttaagccgtctaagtgctttgactcaacatttaagaaagaactttcagcattcaaagcattttgattatagaattgtggataaagggttgggaatggctagaccccatccactgagggcccaccatgcactggctcccgtgccacaatgatgctgtgaaatcgttaccaacttcatatcatagatgataaaaactgaggcttggaacgtttaaggatcttaatccttatggtcaataaatgttgagttaggtcaataaatgttgagttaggatttgaatctagagttttctaactccaatatctatttgtttgtagtaatcaaaacttcaagtatgtgaaatctgcagtgttgaatcaagcacagtgccatatcaatctctgaacacaggactcaaagcttattgcttatatctatgaataaaaatgcttatatctacaaaaaaactatttaatgcatggcaaatgaatgaatgcattaaagtcccactatcagctatggactatcagtgataggtaggagatggggagggtgtccctttcccagcagaaagatctaacttgagtctcaaatgctattgcaagactggttagcggtgctccaaacagggtcagtcctcagccctccatctcttattgggaatccatgacaatccagaaatccaggaagctgctgttcctccaattaccacttcccagactgtgacctcacccttttcagcccccatattgatgtccttcatattcttcaggtgtcataaattcctaagccagaatgagaaattcaacccatgggcctattttgtgtttcatttgccacctgccactcagaaagcaacatctttctaccaggtttcagagacatcatgttttgaggctctccaatctaaaacatctcaagtcttggaatcagaggtcaaatggggattctaagataaactttgagtcaggagtaccccagttcatgcggcaggcttagcttcataccacatcgctggcatccttttcaaactggcctccaccacagcccccatttttgtgcccttgcccttcacccctcatcccaaaccctcttgcatttatcttcccaacctctgtccagacacttaaacttttaacacttagtttgttttttccctgttcaagatctcacctctcctctcaggtttgatgactgatgctcctttcttcatacaaaattcatgccagtcacttcttcatgaggcttcaagactctgagtcacaatacgccccccgaccccttccaattcagcaagcctgcaactcagggcaagtccctggagtatgtcttaggacttttcgtgcttgttcaataattttacattccaagtttttattttagaaaactgattgttagttacaagtgaagttaacataagcaaagtgtaacttgaatgtcgaatagacttttttctgcatcagagtctttgatagaatatgtttccctcagtgcagcctctctttgctatagaacagatctctctcaggcccaggagtcctgcattcctgagattcaggcaaactcaacttgtccaaccagtagaccatccagtgctcaatcaaaacaggccaagcacagcctgttgacagtggcctagtcaaggctgtgtttagctatttagcatatgctttggacagcatcccacgttaactgtacttgcagcctggactccccagagtgccctcagctcccctcactcattcctgttaaggatccttgctgagaagagatcctgtttatctttctaagtccttcatgctgcaggttttgcagttcacagctctgttaaaatgccaactagcggagagcttccacatccccatataatataataatcctccagagacttggaggatttgaatgttctctcctgatggtgtatctttctccctctccatattaactctctcaatcctcctaactgaattatccttgtgcattttgactcttgaaacaatgtttctgctccagaaaaatgactgtttttcacccaccgggaatgcagagggggtagcagtactgtcaccctggttctttgtggcagtaatttccatcatcagtgtcctgggggcatgctgagctctttactgagggaaagagcagggtgaggaatgagaaagaggagagagcaaggaaagtacctgaacacccctcacttttggcaggtctttgcaaggggcaggtggccaggggaggacatagaggtgaacagcaccctggggctagcaggccagctaacagcaagaattaaaagcaatgaatgatgcaaaagcaccatgcactaagcagagaaaggtctagggaggctcaaatagaaaaagagacaccgcaggactagacctaggctgagctttcccagccccagcctcaggaagggacaaaagaagtgggtgggacagagatccttggcttcttccccagggggaggacaaaatgggaccaatgcagaggatgcagtcctgtcatgatgaaatgtaatgctgcacctgatgtcagcagtagcacagtgaacaggaggaaatagcaactgaatcattcgttcacttactcactcattcattcagaaagtcatggacaataccaaatactgctggtgttctaggaatccagtgctaaaaacagtcctgggttttgccatccaattgcaaaaaaagacagcaagtaagtttaaaacaacaaactgtgataggtgcaatgaaaggggcatgacagaaagggaaggaaggggagggggactcaccagtgccaggtcacatcctgccacccaggtccaaatgcaggacctggagctcagaccctgtggacaacagggccagtgcaacgggttgaatggggcaaagaggttcctctcagactccctgcaggcacagtcccaaatctgggtcctctggggcagcccacaggaaagagcaacaacgcgaccccagaatggagatgctccactctgcctggtgtgctctctttacctctttcctcccgctattcaggaactcccagtgggagacctggaactgaaagggattcagaaagatcgaagtttcccaccctcttcagtgctgatggtgtgccccagcagggtctggaataggaacatgatggttgttcccagtgagcagttgcttctactagggacttggccacatcccaggaccatcctcagtttggggaatgtgagctcctgggagcaggcagcaactgtgagtccacaggggcctcctaggaactgtgactgctctgtctcacactctcctgtctcctgtgggcacaaagctcagtgcagccctggcagccctgggatttgcaagctggagtgaggagaagagggagaagaaacagggagttgggcaccgactgttttagacgcaggcaattcaggaacaaagaaaatgagcaaagaattgttacctctggccacccaggagggaaaaaaaaataggtccactgtcttgttgttttctcataaatgaaaaataagaggaataccaaagtagaaaaacacatctatttttagaaaaacgaaatggccagggcctcagcattaagatactgggtgaaccaaaatgagaaatcagggatctgtttacaattataaaatggaaaatatacatatatatacacacacacacacacacacacatatatgtatatatatgcacatacataaagggaatatgtgtgtgtataaatgacaaaaatatttgttgtcaatttgtaattctgtatatcagctatgaaaaatttttaatatgacattgggacacttcaataaacatagaattttgtatctctctctctctctcttttttttttttttttgagacggagtctcgctctgtcgcccaggctggagcacagtggtgcgatctcggctcactgcaagctctgcctcccgggttcatgccattctcttgcctcagcctcccgagtagctgggactataggcgcccaccaccacgcctggctaattttttgtattttttagtagagacggggtttcaccgtgttggccaggatggtctccatctcctgaactcgtgatctgcccacctctgcctcccaaagtgctgggattacaggtgtgagccaccgtgcctggcccggaatcttgtatctctttgtcaccaagaccagcttccctgacttctccacccacccaaggatgtgcatcacctctagtgccaaggactcaagaaatgacatagtccttttcctttgtcccttgctgtacttcatggcaataacagctatatcacgtgttcctgcagacattgtctcatttgatcttctcaacaaccctgtgaagcagccgttatgggtgtcttcattccaccactgacggtacaaaggaagccttgctccagggcatgcacctagtaagtggtgtctgggtttgaactccaaggagcagagtacaggtgatcttcagcttgggcactttagacttttacacatgaccttgcataccccctacactgacattttctcattcgcctttcacattttcatatatttgctgatcaaggagcatttcaaatatcacatatagcatctcctgccctaatggttcaagtttgtctgttcaattgtctaacaattttaactgaaaacactaacaagtgaaaatgaaaacttgtcttgttgaacttctatttgcataatgcattttcatggggatgttgtcaaaacaataacaaacaaacaagcaaacaaacacagtacatctgtctcaaagattgagcccaggctagagtttcatgatcgtgcacctaagcttcagaagaaggggtctgaggcagaattgaaaggaaatacaacagtcgtgcttctgtgagatatgtctttttttctagacttctcatcctttccccaaatatatgggaaatatgtttgccccgctggagcttcaaatctctgctcgggttcacattaaatttggtggtgggcacaaccatcaccaccttaatgtttaaatggccaaatatagcaacaatggagaggggctttgaacccccaaatcattttaagtagttttgtaacatattttatatgtatctagaagctgtgagtgacccatctgagacaaaaaaaaaaaaaagtggagatagagactgaggtaagatggaggaagcagggtcgtggggattgtttaaagaaagtgagtttaggcagggcacactggctcacgcctataatcccaacacttagggaggccaaggtgggtggatcacaaggtcaggagttcgagaccagtctggccaatatgatgaaaccctgtctgtactaaaaataccaaaaaataaataaataattaattaaaattagcctggtgtggtggcaggaacctgtagttccagctactcaggaggctgaggcaggagaattgcttgaactcggagggtggagttgcagtgaactggcgatgctggctcttttttggttccatatgaactttaaagtagttttttccaattctgtgaagaaagtcattggtagctgatggggatggcattgaatctataaattaccttgggcagtatggccaagaaaaaaacaaacaaccccatcaaaaaatgagtgaaggatatgaacagacacttctcaaaagaagacatttatgcagccaaaagacacatgagaaaatgctcatcatcactggccatcagaaaaatgcaaatcaaaaccacaatgagataccatctcacaccagttagaatggcgatcattaaaaagtcaggaaacaacaggtgctggataggatgtggagaaataggaacacttttacactgttggtggaactgtaaactagttcaaccattgtggaagtcagtgtggcgattcctcagggatctagaactagaaataccatttgacccagcaatcccattactgggtatacacccaaaggattataaatcatgctgctataaagacacatgcacatgtatgtttattgcagcactattcacaatagcaaagacttggaacaaatccaaatgtccaacaatgatagactggattaagaaaatgtggcacatatacaccatggaatactatgcagccataaaaaatgatgagttcgtgtcctttgtagggacatggatgaagctggaaaccatcattctcagaaaactatcgcaaggacaaaaaaccaaacactgcatgttctcactcataggtgggaattgaacaatgagaacacatggacacaggaaggggaacatcacacaccggggactgttgtggggtggggggagtggggagggatagcattaggagacatacctaatgttaaatgacaagttactgggtgcagcacaccaacatggcacatgtatacatatgtaactaacctgcacgttgtgcacatgtaccctaaaacttaaagtataattaaaaaaaaagaaattgacaaagaagtaaacagccaataaacaagaaaaaatacaaacagttagtaatcaatgaaatgcaaatgaaaacagcaatgatatactattatttatctattatattagtttctgtaaaaggtatttgtcaaagttctggaaaacaagcaattttgtgatcttcgttggagccctattatacagtcattcaccacatttcagtcaacaatagactgactgtgatcctatgagattacaatggagctgaaaaattcctattacctagtgatgtcacagtgcaatgaattactctcatgcttgtggtgatgctggtgtaagcaaacctactgcactgccagttgtataaaaatatagcacagacaagtatgtacagtacgcaatacttgataatgataataaacgactgttattggtttaaaaaaaaacagaagaggagaattttgtgataagggtttttagtaaatatgttaaataagaaattactggggaaaattactcaccactttcagatccaattctggaaaggttgtattatgttcattaacccttttctgggtgtatgagaaaacagaaagttcaaaaactcaggtccatttgatctttaagaatgtattcaattaagaaatatctattcagcaattgctatggactgggaactatactaggtactagtaaaaaaaaatataaatgacatataacctctgtcctcaaggagctcaaaatctagtaaagaagacaagtaaacagaaaattacatttaatgtgtaaagaaataaagaaagatatggagcaaaatcctgtgaaagtaaagaatgtgcaaagagtgggttgtcctttgttctggggaagccaggtgggagtgacatgcatactgttcttttaaaaggagtaggtgtttgagtgacagagaggagaataaagtgcatttgaggcaggcttaatgatatgagagaaaacagcatcttcaaggagctttgacttcctcacttatggttctaaatcagagtttccattagagttctgattgaaatgtaatctgggaaaagacttcagaaaggtcaggaatcaaggtgtcttgggactggccgtcttcctctctgtgctcccctactcccacccccatcactcttttgtttctccggctactcttttgtcctcttccctcttttgaccaatctcctctgagtccctattacgtgatacatctgcatagccatagactcatcacgactaccttgtcccaactcattctaaactttcaggtcaaatatccaccaatgcctttgagtttcccttcaaattcctgagggagaaatctaattggtccaccttatagttttcagacatgtccacggaacatcataaagtttcacatggtaaccctaacatatcatatcaacaaaggagacataatgaccattgaaaaagtcactatttcacttttaatatctaggtatctagttgagtattctagattcatattttcagaatgagatgatccacaatttcagtgttttgcaaccctggatgcacattacaaccactcctgggagtttttgaacacccagacaacatgcccagaaattctgatataattaattggtctggggtgagacttcccaggtgactgtaatgtgcagacacatcaagaaccatgaagactatctcttagtgtgtaacctaagaagcgatgatcagcttccctgacaccagtgactaatgaagtccttccagctttggtcaacagcattcgccatatagccagagagtctctgacatcatactcagctgatccccctataccttaggtatattttgccggaaacaaatgggagcttttttgaaggaaaaatgtgtattccctcccttcagaaatgcaggcattccagtttataaaataggggatgaacaaatggagaaggtgggatgctgaatgatgggctaacttctcactggaatctctgaattctattaactggtggtgacagtagctacatggcttatggagtgattctggtgtagctgaccttgacagatagtattctccttcccagtgacccctactgggatttctatctctttggttcagagccagttcattcaatgctcagtgaggggcatcttttcactttattttgttttagctcctaatgtggtcagaagactagaggggcaggtagtcacctcttcatctagatcatctgcctggctggaaaattactaggaatggggggttatgtttcacagtgtgcccccttcaagagtgagggtagcccagtcctgcccaggctattccaggactagcaatcacaaggttaactttctgtcccaaagatccatgtccctgaatcatccaaaaacaacactgtgaaactagcccaatgtcatcagttatttatcccaagatttattggcatggacctgcagccggatatttatcctcggctaggacttctaaggacaaggtatgagaataaagcaaagcagcagacaagcagctctcagaaggctcacattctgagtacccatatctcagaactcccagatccatgtgcagaaagacactatcttatattagaaacaccaatacacagacatatactcatgtatatcagactgtggtcaccattacccagcttacatgtgagttcacacacacttgtatacacacataattccccatccccttcccaatagctcattatcaatactaacacgtatttgtgtcagagcggaaataaattcccactgcctgaatctgtgttcactttcatgatgaacaactagacctttctacttctcctcttctttcattaccttagacatcactctagagatgacacaccagggataaggcacttttgcccatggagaaggaactgtgcttcttttggaggatgagctggccctatggcttttctgtctgcctagtgggaagcgggtgctccccatctgaagtagaagagcccagaggtgaatctgcacagtgaaggcaggaagcagggcacagacattttgacaatgaagaagctttttctcaaattctcatccctgctactatagaaacattagctagcctggagggctgagaatggttagccattccttctcactcttctctttcatattgctctaccttccagaggtcatctcatctcagaggttgtgcctctgcctccaagaactggtggtcaccacagtgatggcatgcacactctcctgttctctcacccctctctaaggccatgtatcatcagtcatatgccaatgcctggaggctacagctggaccatttccaggttaattccaatgtgaggttctgtaggacttgaaaaataacttgaaataaccttctgttttccccagagcctacataagttgtatagtttgggtcaggccatgtctcctattttctgtcttctacaactggttacctatagtttgtccagaggtctcagctagagggagagagaaaacatcccatgctcataaattgggataattaatatcattaaaataaccatattgcccaaagcaatttaaggacctaatgtaatccttatcaaaataccaacatcatttttcacagaattagaaaaaaatcttaaaattcatggaaaaaaatgagcccaaatcaccaaagcaatcctaaacatgaagaacaaagctggaggtatgacatttcctgacctcaaattatatgacaagggagtaaaaaatgttgggtaggaggaaggactaaattgcagctcccacttggatggacaaaacagcatgtggagactcatactgtggacttttgctccaagaactactgtaggaatatatcaggaaggccaagagaatacacagaccctttgaagggaacaaattgatcctgcaggacccaggagacagcccagattctgtgagtgtccaaactgtgaaagtgggaaagggggattgtccaccccaaacacataacctcactggggaacctgaaggtcccaatcatgggagaaggattagaccttacctggatctgagacaatttacagaactgagtgaaatacagggatggatgaaacagcaggaaaagccctgtgggctctctgggtccccagggaagtcatttctgacttgtttcaagtggtccttggggagggctgccagaggaactgggaaaagaccacagggagaaagaaacctccaggtgaactttttaacaattccaactgaatgcaaagtttcctggccagacctcgaggaagggtgtgaatctggtatgcagacttaacaggcagggaggcatgaaagccctacttgctttctcagccaggaggctggtagcttagggcaagttctcagccctactcgcccactgactggaaacaaatttggcactgttgagggggcatggtgggagtgagactggccttttgggttgcatgagagctgggtgaggcctgtaactgccgcctttcccccacttcctgataacctgcatgacacagcagaggcagccataatcctcctggaaacaactccattgacctgggaagcacatcccatcccccacagcagccagagcaagccctgcccaaggtgagtctgagctcagaaacgcctaatgctgctcccacctgatggtccttccctacccatcttattggctgaagacaaagtttatattctcttgggagttctagggccctgcccaccacctgatcctcctctatactaccacagctgatgctctcttgaaagcatcacctcctggcaggaggcacaaaactagtgcattaaataactacaactaaggatccttacagatcctgtccatttcactctcctgccacctccattggagcaggtgctggtatccatggctgagagacctaaagatggttcacaccagagaattctgtgcagacactccccacaccaccaccacccagtattagcctggagactgtcagccctgctgggtggctagatctagaagagaaataacaatcactgcagtttggctctccagaaaccatatccctaggaaaagggagagagtactacatcaagagatcaccccgttgaacaaaataatctgaacagcagccttgacccccagatcttccctctgacatagcctactcaaatgagaagaaaccagaaagacaattctggtaatatgacaaaacaagattctttaacatgcccaaaaaaaatcacactagctcaccagcaatggattcaacccaagaagaaatccctgaattgccagaaaaagaatttagaaggtcaattattaagttaatcaaggaggcaccagagaaaggtgaagtccaactttaggaaattaaaaaaaatgatactagacatgagggagaaatcttcagtgaaacagattgcataaattaaaaacaatcacaacttcaggaaataaaggacacacttagagaaatgcaaaatgtactggaaagtctcagcaatagaatcaaacaagcataagaaagaacctcagagctcagagacaaggtttttgaaataactcaatccaacaaagacaaagaaaaaagaattttaaaaaatacacaaaacctctaagaagtctgggattatgttaaatgacaaaatgaccaaacctaaggataattggcattcctgaggaataagagaagtctaaaagtttggaaaacatatttgggggaataataaaggaaaacttccccagccttgcaagagatctagacatctaaatacaagaagctcaaagaacacctggaaaatttatcacaaaaagatcatcacctaggcacatagtcatcaggttatataaagtcaagacaaaggaaataatcttaaaagctatgaggcaaaagcatcaggtaacctataaaggaaaacctatcaaattaacagcagatttctcagaagaaaccctacaagttaaaagggattagggctctatcttcagcctccttaaacaaaacaatcatcagtcaagaattttgtatccagtgaaactaagcttcattaatgaaggaaagatacagtctttttgagacaaacaaaaagactgagagaatttgcccctaccatgccagcaccacaagaacagctaaaggagctctaaatcttgaaacaactcctggaaacaaatcaaaacggaacccgtttaaagtatgaatctcacatgacctataaaaaataagcaattaaaaaaaaggtattcaggaaacaaatagcaaaatgaatggaatagtacctcacatctcaatactaacattgaatgtaaatggcctaaatgttccacttaaaatatacagaattgcaaaatggataagaattcaacaaccatctgctgccttcaagagactcacctaacacgtaaggtctcacataaacttaaggtaaaaggatggaaaaagacatttcatgcaaatagacaccaaaagtgagcaggagtagctattcttatatcagacaaaacaaattttaaagcaacagcagttaaaaaagataaggagggacattacacaatgataaaaggccttgtccaaccagaaaatatcacaatcctaaatatgtatgtgcctaacactggagctcccatatttataaaacaattactactagacctaagaaattagagaaagcaacacagtaatagtgaggaacttcaatactccactgacagcactagacaagcatcaagacagagagtaaacaaaaaaaaacagtggatttaaaccataccctggaacaaatggacttaacagatatttacagaacattctacccaacaaccacagattgtacattctactcatcagtgcatggaactttctccaagatacaccctatgataggccacaaaacaagtctcaataaatttaagaaaactgaaattatatcaagtcctttctcagactacagtggaaagaaattggaaattaactccaaaaggaaccttcaaaaccatgcaaatacatggaaattaaataacctgctcctggctggccacagtggctcatgcctataatcccagcactttgggaggcctaggtggatggatcacctgaggtctggagttcaagaccagtctggccaacatgccaaaaccccatctctactaaaaatacaaaaatcagccaggcatggtggcacatgcctgtaatcccagctatttgggaggctgaggcaggagaattgcttgaacctgggaggcagaggttgcagtgagccgagatcacaccactgcactccagcatgggtgacagaatgagactcagcctccaaaataaatatgtaaataaatgaataaataaataacctgctcctgaatgaccattggatcaataatcaaatcaagatggaaattaaaacattctttgaactgaatgataatagtgacacaacctatcaaaacctctgagatacagcaaaagtagtgctaagaggaaagttcatagccttaaatgcctacatcaaaaattctgaaggagcacaaatagacaatctaaggtcacacctcaaggaactagagaaacaatgacaaaccaaacccaaacccagcagatgaaatgaaataacaaagatcagagcagaactaaatgaaatggaaacaaacaaacaaacaaacaaaagataaatgaaacaaaaagctggttctttgaaaagataaataaaattaatagatcattagcaagattaaccaaaaaaagaagagagaaaatccaaataatctcattaagacatgaaattacaagtagcaccacagaaatacaaaaaaaaataattaaggctaatatgaacacatttacacacataaactagaaaacctagaggagatggacaaattcctggaaagatacaaccctcctaccttgaatcaggaagaattggaaaccctgaaaagaccaataacaagcaatgagattgaaatggtaataaaaaaaattaccaacaaaaaaatgtcaaggaccagacaaattcacagctgaattctatcacacattcaaagaagaattggtaccaatcctattgacactattccacaagacagagaaagagggaattccccctaaatcatttgatgaagccagtatcatcctaataccagaaccaggaaaggacacaacaaataaagagaactacagaccaatttccctgatgaagatagatgctaaaatccttaacaaaatactagctaactgaatccaatagcatatcaaaaagataattcaccatgatcaagtgggttttataccaggaatgcagggaaggtttaacatatgcaagtcaataaatgtgatacaccacataaacagaattaaaaacaaaaaatcatgtgatcatctcaatagatgcagaaaaagcatttgacaaaatctagcatctcgttgtaattaaaacccttagcaaaattggcatacaagtgacatactgcaatataataaaagctatctatgacaaacccatagccaacataataatactgaacggggaaaagttgaaagcattctctctgagaactggaacaagaaaaggatgcccactctcaccacttctattcaacatggtactagaagtcctagccagagcaatcagacaggggaaagaaataaagagcatccaaatcagtaaagaggaagtcaaactgtcactgtttgctgattatatgattgtatacctagaaaaccctaaacactcttccaaaaagctcctagaattcagcaaggtttcaggatacaaaattaatgtacacaaatcagtagctctgctatacaccagcagtgaccaaactgagaatcaaatcaagaactcaaccccttttacaatacctgaaaaaaaataaagtaaaatacttaggaatatacctaaccaaggaggtgaaagaactctacaatgaaaacttcaaaacactgctgaaagaaatcagagatgacacaaacaaaaggaaacacatcccatgctcatggatggatagaatcagtattgggaaaatgaccatactgccaaaagcgatctacaaattcatgcaatccccatcataataccaccgtcattcttcacagaactagaaaaaacatttttaaaattcatatggaaacaaaaaagagcccacatagccaaagcaagactaagcaaaacgaacaaatctggaggcaccacattacctaacttcaaactataaggccatagtgactgaaacagcatggtactggtacaaaaatgggcatatagaccagtggaacagaatagagaacccagaaataaacccaaatacttacagccaactgatctttgacaaagcaaacaaaaacataaagtgagaaaggacaccttactcaaaaaatggtgctgggataattggctagccacatgtaggagaatgaaactggatcctcttctctcaccttatacaaaaatcaactcaaggtggatcaaggacttaaatctaagactgaaactataaaaattctagaagataacattagaaaaacccttgtagacattggcttaggcaagggtttcatgaccaagaacccaaaagcaaatgcaacataaacagagataaataggtaggacttaattaaactaaagagtttcatgtttatagcagcacaattcgcacaattcgcaattgcaaaagtatggaaccggtccaaatgcctatcaatcaatgagtggataaagaaattgtggtgtatatatatatatatatatatatatatatatgtgtgtgtgtgtgtgtatatataattgtggtatatatatataatatgtatataattgtggtatatatatatatatatatatatatatatatatatatatatataaatactattcagccataaaaggaatgaattaatggcattgcagcaacctggatggaagtgaagactattattctaagtgaagtaatttaggaatggaaaaccaaacatcatatgttctcctaagtgggagctaagctgaggatgcaaaggcttaagaatgatacagtgaataaaatttttatgataatgatgatatagtcgctgactactcttttaattaaaatagtaataatctggagagagatgaagaggacaagtggagcccaagagagtcagatccacagctattataacataaagtgaatagaaaacatctataattgataaatcaattaacagaagtataagctcttcattaagaggtgtggaaataattatgagggaagacaaaagtggtgttctctgtgaaataggaactatatatgtgagacagagaaggatgtgggctactgttttttagtacaggcctttcagtactgtttgctcacggcaacctccacttcccaggttcaagagattctcctgcctcagcctcctgagtagctgggattacaggcgcatgccacctagcccagctaatttttgtatttttagtagagatggggtttcaccatgttggtcagattggtctcaaattcctgacctcaggtgatccgcctgcctcggactcccaaagtgctgggattagaggtgtaagccactgcacccggcctatcaagggcattttaataagcatcagtaactgagctacccatattgaacttgggcaacttatccaatctttagtttctaagcacagagcccgaggtcaaggaaaggcaagtacagtaattatatttgactcctacaaacaatagagcttaaaacaatagtccacagtcaaataaccacatccaaagactgcctgttactcacttagtatattggtctgagaaacctggttttacctcatttcaaacaggaaactgttacagagctcagatggaatgtccagcagcacatcatggtattgattgttgcactgtaagtgatctgggcttgagcccaaattaacttcttacaatatggctccaatttaccctcccaacatttatctcccaacattttcattcagaaatcctttgttctagctaccctatcttttcactatattctatttgcactctcatttctctgttttcacaatgcttgatcacatctttagccattttcccacctagatcttttctgttctctccatttttctgactgctgcccatctttcaatactgaacaaatcagcttcttagtgcatatctgtgatatgcaaaacactgttaggtgcttcaagagttagtcttctaagagctttatgttttattagaacatgacacaagtaggcaaataactataatgcaagataaagtgaaaaagattctataagaaaggtttactcaaaatactgagggttcaaaatgtgtattataacattaattaggaagaattagaaaatagtgcatgtagagagaattatatgaaatgcacctcaaggaaagcatttgcctttgacagctggaaacacgcactgtagaaaggcattatttggggttgaaagtatgaacaaagctctatcagcagagcatctttaagcctcaatgaaaagcccactgtggctaggaggtatagtacataaataggaaagcaataggagatgagtctgtaatttcaagttgtcatggtagaaggccctgaatcccaggttgaggaatttttactcacttcaataggcaggagaagaacataaagattttttttgagggaagtggtccaatcagagtaacactttagaaagattaatttaacagaagtttttaagattatttgaactgaatgaaagaaaaggtacaaactgcagttaggaagctattctagtagtgtcagtgacaagttttgcaggtggccaagaaggaagtgaaagaaaactgaatagggaaggaaggaagactgcaagggacttggtgctgattgatccgtgtctccatctctcttgcactatgcaaagaaaaggactctagtttgcatacctagtagactggggaaatgctggtagcaaaagagaagagattgagtagaatatgttttgaatacactgagttaaagtgttaaagaatggtgctaagagtaaagttcatagccctaaatgcctacaccaaaaagactgaaagagcacaaattgatattctaaggtcacaccttggccaggcatggtggctcatgcctgtaatcccagcactttgggatgccgaggtgggaggatcatgaggtcaggggattgagaccatcctggctaatatggtgaaaccccatctctactaaaaatacaaaaaattagccaggcatggtggcacacgcctgtagtcccagctactcgggaggctaaggcaggagaattgcttgagcccaggaggcagaggttgcagtgagccaagattgattgcactccagcctgggcaacagagcgagactcaatctcaaaaaaaaaaaaaaaaaaaaaaaagataaggtcacatctcaaggaactagagaaagaagaaaaaaccaaacccaaaccctgcagaagaaaggaaataaccaagaacagagaagaagtaaatgaaattgaaacaaaaatacaatacaaaaagtaaatgaaacaaaaagctggttctttgaaaagataaataaaattgatagaccattagcaagattaaccaagaaaagaagaaagaaaatccaaataacctcattcagaaacaaaacaggagatactacaacagacaccattgaaatacaaaagaccaaccaaggctactatgaacacctttatgcacataaactagtaaaccttgaagaaattgatacattcctggaaaaatacaaccctctgagcttaaataaggaagaattagatatgctgaacagaccaataacaagcagtgagattgaaatgctaattttaaaattaccaacaaaaagtctaggaccagatggattcacagcagaattctaccaaacattcaaagaagaattgttaccaatctttttgaagctatttcacaagacagagaacgaagaaaccatccctaattcattctatgaagttagcatcaccctaataccaaaactcatgaaaggacataagcaaaaaagaaaactacagactgatatccttgatgaacatagatgctaaaatccttaacaaaatactagctaactgaatctaacagcatatcaaaaagataatccaccatgatcaagtgggtttcatacctgggatgcagggacagtttaacatatgcaagtcaataaatgtggtacaccacataaacataattaaaaacaaaaatcacatgatcatctcaatagatgaaaaaaaaagcatttgatgaaatccagcatcactttatgattaaaactctcagcaaaatcagcatacaagggacatacttcaatgtaataaaagccacctatgacaaacccacaggcaacataatactgaatagggagaagttgaaagcattccctctgagaactgagacaagacaaggatgcccattctcaccactccttttcaagatagtactggaagtcctagccagagcaattagacaagagaaaaaaagaaagggcatccaaatcggtaaagaggaagtcaaactgtcactgtttgctgacaatataatcgtttaccctgaaaaccttaaagactcttccagaaagctcctagaactgataaaaagaattgagcgaagtttccagatacaagactaatgtgcacaaatcagtagctcttctatacaaaaacagtgacaaagcagagaatcaaatcaagaactcaaccccttttacagtagctgcaaaaaataaaatagttaggaatatacataaccaaggagttgaaagaactctacaaggaaaactactaaacactgctgaaagaaatcacagacaacacaaacaaatggaaacacatctcatgctcatgcatcggtagaatcaatattgtgaaaatgaccatactgccaaaagcaatctacaaattcaatgcaatccccatcaaaataccaccaccattctttacagaattagaaaaaacaattctaaaattcatatagaaccaaaaaagagcccacatagccaagacaagactaagcataaagaacaaatctggaggcatcacactacctgatttcaaactatactataaggccatagtcaccaaaacagtgtggtactggtataaaaataggcaaatagggcaatggaacagaatagacaacccagaaataaacccaaatacttacgcccaactgatctttgacaaaacaaacaaaaatataacatagagaaaggacacccttttcaacaaatggtgctgggataattggctagccatttgtaggagaatgaaaatggatcttcctctctcaccttatacaaaaatcaactcaagatggatcaaggacttaaatctaagagctgaaactataaaaattctagaagataacattggagagaacccttctagacgttggcttaggcaaagatttcatgaccaagaacccaaaagcaaacacaataaaaataaagataaataattgggacttaattaaactaaagagcttttgcactgcaaaaggaacagtcagcagaataaacagacaacccacagaatggaagaaaatattcacaatctatacatctgataaatgactaatatccagaatctacaacaaactcaaacaaatcagtaagaaaaaaccgaacagtcccatccaaatgtgggctaaagacatcaatagactggtctcaaaagaagatatacaaatggccagcaaacatatggaaaaatgctcaacaacattaatgatcagggaaatgcaaatgaaaaccacaatgtaatatgacctcactcccacaagaatggccataatcaaaaaatcaaaaacaggggggagagaagccaagacggccgaataggaacagctctggtctacagctcccagcatgagcgacgcagaagacaggtgatttctgcatttccaactgaggtactgggttcatctcactggggagtgccagacagtaggtgcaggacagtgggtgcagtgcaccgtgcacgagctgaagcagggtgaggcaggcattgcctcacctgggaagcgcaaggggtcagggaattccctttcctagtcaaagaaaggggtgatagaacggcatctggaaaatcgggtcactcccaccctaatactgtgcttttccaatgggcttaaaaaacgacacaccaggagattatatcccgcacatggcttggagggtcctatgccgacggagtcttgctcattgctaacacagcagtccgagatcaaactgcaaggtggcagcgaggctgggggaggggtgcccgccattgccgagttagttatttgataaggtaaacaaagctgccaggaagtttgaactgggtggagcccaccacagctcaaggaggcctgcctgcctctgtaggctccacctctgggggcagggcacagacaaacaaaaagacagcagtaacctctgcagacttaaatgtccctctctgacagctttgaagagagtagtggttctcccagcactcagctggagatctgagatctggcagactgcctcctcaagtgggtccctgacccccgagtagcctttctgggaggcaccccccagtagtggcagactgacacctcacacgtctgggtactcctctgagacaaaacctccagaggaacgatcagacagcagcgtttgcggttcaccaacatccgctcttctgcagccatcacggctgaaacccaggcaaacagggtctggagtggacctctagcaaaatccaacacatctgcagctgagggtcctgtctgttagaaggaaaactaacaaacagaaaggacatccacaccaaaaacccatctgtacatcatcatcatcaaagaccaaaggtagataaaaccacaaagatgggaaaaaacagagcagaaaaactggaaactctaaaaatcagagagcctctcctcctccaaaggaacgcagctcctcaccagcaatggaacaaaactggacggagaatgactttgatgagtcgagagaagaaggcttcagaagatcaaactactccgagctacaggaggaaattcaaaccaatggcaaagaagttaaaagctttgaaaaaaaattagactaatggatcactagaataaccaacgcagagaagtccttaaaggacctgatggagctgaaaacaaaggcacgagagctacgtgatgaatgcagaagcctcagtagccgatgcgatcaactggaagaaagggtatcagtgagggaagatcaaatgaatgaaatgaagcgagaagagaagtttagagaaaaaagaataaaaagaaacgaacaaagccttcaagaaatatgggactatgtgaaaagaccaaatctatgtctgattggtgtacctgaaagtgacggggagaatggaactaagttggaaaacactctgcaggatattatccaggagaacttccccaatctaggaaggtaggccaactttcaaattcaggaaatacagagaacaccacaaagatactcctcaagaagagcaactccaagacacataattgtcagattcaccaaagttgaaatgacggaaaaaatgttaagggcagccagagagaaaggtcgggttacccacaaagggaagcccatcagattaacagctgatctctcggcagaaactctacaagacagaagagagtggggaccaatattcaacattcttaaagaaaagaactttcaacccagaatttcatatccagccaaactgagctttataagtgaaggagaagtaaaatcctttacagacaagcaaatgctgattttgttaccaccaggcctgccctaaaagaactcctgaaggaagcactaaacatgcaaaggaaaaactggtaccagccactgcaaaagcatgccaaactgtaaagaccatcaaggctaggaagaaactgcatcaactaacaggcaaaataaccagctaacatcataatgacaggatcaaattcacacataacaatattaactttaaatgtaaatgggctaaatgctccaatgaaaagacacagactggcaaattggataaagactcaagacccatcagtgtgctgtattcaggaaacccatctcacgtgcagagacacacataggctcaaaataaagagatggaggaagatctaccagcaaatggaaaacaaaaaagggcaggggttgcaatcctagtctctgataaaacagactttaaaccaacaaagatcaaaagagacaaagaaggccattacataatggtaaagggatcaattcaacaagagctaactatcctaaatatgtatgcacccaatacaggagcacccagattcataaagcaagtccttagtgacctacaaagagacttagactcccacacaataataatggcagactgtaacaccccactgtcaacattagacagatcaatcagacagaaagttaacaaggatatccaggaactgaactcagctctgcaccaagcaaacctaatagacatctacagaactctccaccccaaatcaacagaatatactttcttttcagcaccacaccacacctactccaaaattgaccacatacttggaagtaaagcactcctcagcaaatgtaaaagaacagaaattataacaaactgtctctcagaccacagtgcaatctaactagaactcaggattaagaaactcactcaaaaccgctcaactacatggaaactgaacaacctgctcctgaatgactactggggacataatgaaatgaaggcagaaataaagatggtcttcaaaaccaacaagaacaaagacacaaataccagaatctctgggacacattcaaagcagcgtgtagagggaaatttataggactaaatgcccacaagagaaagcaggaaagatctaaaattgacaccctaacatcacaattaaaagaactagagaagcaagagtaaacacattcaaaagctagcagaaggcaagaaataactaagatcagagcagaactgaaggagatagagacacaaaaaacccttcaaaaaattagtgaatccaggagctggtttttagaaaagattaacaaaattgatagaccactagcaagactaataaagaagaaaagagagaagaatcaaatagacacaataaaaaataataaaggggatatcaccaccaatcccacagaaatacaaactaccatcagagaatactataaacacctctacgcaaataaactagaaaatctagaagaaatggataaattccttgacacatacatcctcccaagactaaaccaggaagaagttgaatctctgaatagaccaataaaaggctctgaaattgaggcaataatcaatagcttaccaaccaaaaaaagtccaggaccagatggattcacagccgaattctaccagaggtacaaagaggagctggtaccaatccttatgaaactattccaatcaatagaaaaagagggaatcctccctcactcattttatgaggccagcatcatcctaataccaaagcctggcagagacacaaccaaaacagagaattttagaccaatatccttgatgaacatcaatgcaaaaatcctcaataaaatactggcaaaccaaatccagcagcacatcaaaaagtttatccaccatgatcaagtgggcttcatccctgggatgcaaggctggttcaacatatgcaaaccaataaatgtaatccagcatataaacagaaccaaagagaaaaaccacatgattatctcaatagatgcagaaaaggcctttgacaaaattcaacaacccttcatgctaaaaactctcaataaattaggtattgatgggatggatctcaaaataataagagctatttatgacaaacccacagccaatatcatactgaatgggcaaacactggaagcattccctttgaaaacgggcacaagacagggatgccctctctcaccactcctattcaacatagtgttggaagttctggccagggcaatcaggcaggagaaggaaataaagggtattcaattaggaaaagaggaagtcaaattgtccctgtttgaagatgacatgattgtatatctagaaaaccccatcgtctcagcccaaaatctcctcaagctgataagcaacttcagcaaagtctcaggatacaaaatgaatgtacaaaaatcacaagcattcttatacaccaataacagacaaacagagagccaaatcatgagtgaacgagtgaactcccattcacaattgcttcaaagagaatgaaatacctaggaatccaacttacaagggatgtgaaggacctcttcaaggagaactacaaaccactgctcaatgaaataaaagaggatacaaacaaatggaagaacattccatgctcatggataggaagaatcaatatcgtgaaaatggccatactgcccaaggtaatttatagattcaatgccatccccatcagctaccaatgactctcttcacagaactggaaaaaactactttaaagttcatatggaaccaaaaaagagcccgcatcgccaagtcaatcctaagccaaaagaacaaagctggaggcatcacactacctgacttcaaactattctacaaggctacagtaaccaaaacagcatggtactggtaccaaaacagagatatagaccaatggaacagaacagagccctcagaaataatgccgcacatctacaactatctgatctttgacaaacctgagaaaaacaagaaatggggaaaggattccctacttaataaatggtgctgggaaaattggctagccatatggagaaagcttaaactggattccttccttacaccttatacaaaaattaattcaagatggattaaagacttacatgttagacctaaaatcataaaagccctagaagaaaacctaggcaataccattcaggacataggcatgggcaaggacttcatgtctaaaacaccaaaagcaatggcaacaaaagccaaaaatgacaaatgggatctaattaaactaaagagcttctgcacagcaaaagaaactaccatcagagtgaacaggcaacctacagaatgggaggacatttttgaaacctactcatctgacaaaggactaatatccagaatctacaatgaactcaaacaaatttacaagaaaaaaacaaacaaccccattaaaaagtggttgaaggatatgaatagatacttctcaaaagaggacatttatgcagcaaaaaacacatgaaaaaatgctcatcatcactggccatcagagaaatgcaaatcaaaaccacaatgagataccatctcacaccagttagaatggcgatcattaaaaggtcaggaaacacaggtgctggagaggatgtcaagaaataggaacacctttacactgttggtgggactgtacactagttcaaccattgtggaagtcagtgtggcgattcctcagggatctagaactagaaataccatttgacccagccatcccattactgggtatacaaccaaaggattataaatcatgctgctataaagacacatgcacatgtatgtttatagcggcactattcacaatagcaaagacttggaaccaacctaaatgtccaacaatgatagactggattaagaaaatatggcacatatacaccatggaatactatgcagccataaaaaatgatgagttcgtgtcctttgtagggacatggatgaaactggaaaccatcattctcagaaaactatcgcaaggacaaaacaccaaacaccgcatgttctcactcataggtgggaattgaacaatgagaacacatggacacaggaaggggaacatcacacaccgagacctgttgtggggtggggggaggggggagggatagcattaggagatatacctaatgctaaatgatgagttaatgggtgcagcacaccaacatggtacatgtatacatatgtaacaaacctgcacgttgtgcacatgtaccctaaaacttaaaagtataataataataaaataaaataaaaaagaacattacaacatgctctgcaggggtaaatgctttatcatgtattactacattttaatcacatctttgtaaagccagaagcattttgaaagtcacattacagacattgtttaaacatagtttgtatttaccaaagcataggacgttgtatcatctcatattaattagttagttggctcaaaattagtggtaatgacttagtaattcaataatttctcttagctttaaaaccttctttatttcagaactatttcacctcttggtttttgtttttgctgtgcatcactgcctgccagctgctaatctcttatctcccagtggattacgtgtccagtgaagggactgaatgagatactagtggcaaattatattgatgattcatattttgaataaatagattaagcttgtataaacaaacaaacaaaaaaatcaaaaacaggagatgctggcatggatgtggtgatcaggaaacacttctacactgctggtggggatgtaaactactacagccaccaaggaaaacagtgtggagattctttaaagaactaaaagtagatccaccatttgatccagcaatctcactactgggtatctactcagaggaaaagaagtcattatacaaaaaagatacttgcacacacatgtctatagcagcacaatttacagttgcaaaatcatgagaccaacccaaatgcctatcaatcaacaagtggataaagaaaccgtgatataaacatatgatggaatactactgagccataaaaaggaatgaattaacagcatttgcactgacctgaatgagattggagactattattctaagtgaagtaactcaggaatggaaaaccaaatgtcgtatgttttcactgatatgtggcagctaagctatgaggacacaaaggcataagaattatacaatggactttggggacttatggggaagagtgggagggaagtgagggataaaagacaacatatatggtgcagttgtatactgtgtaggtgatgagtgcaccaaaatctcacaaatcaccactaaagaacttattcatataaccaaataccatgtgtaccccaataacttatggaaaaataaataaataaataaagtgttaaagaaatatcacaatggaacaaggcccctagaaattaacctgagtgctgaagcactttgtgagctagaatccgagacaaaatagtaattgcaatggtctattaccttgatttgtccagagctgaggagtctcccaggatagaagactttcagtgccaaaactcagaaagttctgggcaaaccaggataaggtagtcatcctcaagacggtggaatgcagaaagtgggcagaaatgccaaggtgtgatatcaattatttatctaaattatctcaaaatgtgtccagggctgggaggcagacatttacatgaaaagcgtgggtgagatttctgtgtgtacaatccagacagatgaagttcttggttcacatggggctttctatcaacgaccattcaccaatggaattggagccctgaaaatttacccagggaatgtgtctggggtcactccctagagatactacaagactgaatacagggttggagtgcaagggcagggtacttggatcagggtagtgccaaactggcaaatggagattcagtgacaactatttcacagtatttaagaggttgaaatggcaagcaagtgaagataggtggattaaattgatccctgacacaagcacattattttgcctataaaaccaggaagaacaatctgtctcctgtcctgagggcacattcatgacatttgccattgtgcagctactgttgacttttcctgcagaagaaaaatctgtctaaaaggacatcttgaaaggctaagagggcgtgttgggaccttctgccagctggcctgaagaggctcacaaaccacctcttcctcctggttcctttggaaattccactgggcaatgcagactggttcatcttcttgtacttaactgagctgccaggttggaaatagtcctaaacttttcgcacagagctgtaatcttaaactgtaattttattttattttatttttaaaatttttaaaattttaaatttttttttaaattattatacttttaagttatagggtacatgtgcactaggtgcaagtttgttacatatgtatacatgtgccatgttggtgtgctgcacccattaacttgtcatttacattaggtatatctcctaatgctatccctccccgctccccccaccccacgacaggccccggtgtgtgatgttccccttcctgtgtccaagtgttctcattgttcaactcccactgatgagtgagaacatgtggtggttggttttttgtccttgcgatagttttctgaaaatgatggtttccagcttcatccatgtccctacaaagaaataggaacacttttacactgttggtgggactgtaaactacttcaaccattgtggaagacaatgtggcaattcctcaaggatctacaattaaactgtaattttaaattgagagatgcaacatggtgtaatgagaagtagatggcttttgtaactacagaaacctagtttaacctggccacttacttcctgtataaccttaggtacattaattagtttctatgatccttagttctctctccataacattggtttaataatatgtatctcagggattttgtgatacatagacataaccatatgaacatggaaagcacagtgtacatgaggtataggaagccccccttccccccaccccccacaaagtggtctaattctctatctgtgtgtgtgactgtgtgtgcaaaactgtacatgtgattgtgtgtgtgtgcagagctgttcagataaccccctgccctacagccttacccaagaacagaaactctgtctcatccttcctcaacagctgtgttgtaaactgggtgcatagctttaatttcacagtccactaggctctacttctccatctcccccatcgaactccatgctcaagatcacacttgtggcttctatctcattgtaaaaaaaggaggtggagcatatttctttgcaattcatggaggaacataaagctatctctgcctcttggatggcctgtcccaaatgtctttctctatagggtttgctattaacttccctctcagaactgctttgctgcatcccataagttttggtatattgtatttccatttttgtttgtaagattattaatctccctcttaatttcttctgtgacctcttgattatttcaaggcattttatttaatttccacactttgtagaattttccaagatctctcctgttattgatttctagttttatgccattgtaattggagaagatacttgatatgatttcaattttcttaaatctgttaagacttgttttttgtttgttggtttgtttttggcctaacatatgatctatcttagagaatgtcccatgtccacttgagacaactgtgaattctgttacacttggatacaatgttctgtttgtctggtttatttggtcaaatgtgtaattcaagtccaatgtttccctattgattttctgtttaaatgatttgtctgttcttgaaagtggggcattgtgtttccctaatattatggtattagtgtacatttctccctttagattacttaatagtttcataatacattacatgctccaatttggggtttatatgtatttacagttgttatgtcctctttatgaatttatccctttattattatatatgaccttctttgtctcctttttaaggtttttgacttaaggactattttcttgatatgagcatagctctccctggtcttttttggtttccgtttgtgtaaaatatcttcttccatcccttgaattttactctctttgtgtccttactaataaagagagtcatttataagtagtctatactaagatctttttctgtttgttttaagccattcagccacatttatgtcttttaatttgagaatttaatctatttacatttaatatagtaattgataggtaagaactttctactcccattttgtaatttgttttctgggtattttgtggatattttgcctttttctcacttgctgtctttcactatggtttgatggttttctgtagtgatatgctttgaattctttctttttatattttgtgtaactactatagagttttgctttgtggctaccttgaggcttatgtaaaacattgtatacttaataacaagctattttaagctaataacaacttaactttaatcacatacaaaaactctacatttacagcccctcccaccttttatgacattgatgacaaaattaacatctttttgtaatttttatcccctaacaatttattgtacctgcagttgtttttaataattttgttttttaaccataatactacagataaaatttctgaattcaccacatttatagtattagagtattctgagtatcactatatattaatgtatcatcaagttttgtacttttatacatcttatgtcattccttagcagcctttagtttcagcttaaagaactccctttagcaattcctgtaagacaggcctagtggtaataaaatcccttagcttttatttgtcaggaaaagtttttatttctccctcatgtctgaaagaaagctttgctaggtaaagtatttttggttggcagtccttttttttttgcttttaccattttgaatacatcatcctactctctcctggactgtaaaacttttgctgagaaattttctgacagcagtatagggactcctatactaagcctagtactcaatagttattttttctaatcctctcccttctcccacccttcgcccttaagtaggcctcagtgtctgttgttcccctctttgtgtcatgagtttcattatttagctcccacttataaatgagaatatgccagcatggtgactcacacctgtaatcccaacactttggaaggctgaggtgggtggatcacctgaggtcaggagttcgagaccagcctggccaacatggtgaaacaccatctctactaaaaatacaaaaattagctgggcatggtggtagctcccagctactcgggaggctgaggcaggagaatcacttgaaactgggaggcagaggttgcagtgaaccaagatcatgccattgcactccagcctgggcaacaagagcaaaactctgtcaaaaaaaaaaaaaaggctgagaatatgggatgtttggttttctgttcctgtgttggtctgctaaggacaatggacttcaacttcatctgtgttctcataagacatgatcttgttcttttttatggctgcatagtactccatggtgtataagtaccacattttctttatccaatctgtcattgatgggcatttagcttgattctatgtctttgctatagtgaacagtgccacagtgaacattcacctgcatatgtgtttatggtaaaatgatttctattcgtttgggtatatacccaaaggaatgagattgctgggttgaatggtagttctgtttttagctctttgaggagtcaccacactgctttccacaatggtggaactaatttacactcatatcaacagtatacaagcattccttttcaccacagcatcactagcatctgttattttttgaccttttaataatagccattctgactggtgtgagatgatttgcattctctaatgatcagtgatactgagcttttcttcatatgctacttggtcacatgtctatcttcttttgaaaagtataatacttttttgaaaagtcaaatatttttcagtgcaatcaatttattgagagaaaatttgagcataatgagaatttcatattttcttacaggcagtttcagcagcaagaagcacaaagtgaaatagaaactgtaccaagttaaaccaattcacataagaatacacaaaacacactcatatacctcaaacatctaaaagctatctcggtacactgagtgtattgatctcaagggtttgtttattgtcttgttacatttgaaaactactgtatataagcaaacactctttcaatatcccaaacatgtttaagtgtcctggttcaaaacaccagcagggaaaatggaaaaaaagggcatactatttgtatgtgaagactttaaacagaaattacccaatcctgtagaaatggctcccttcagtgttattaatggctaattcagtggtttcaaacatcactacaatctccaaagccttcggccatcagatgacaccataagttcaaatgagaaagccacaaaagaattttcagcagtgatattaaaattaattgaagaagatagctacacattggttcaaaaatggcaattttgaaaaaacagacacgcattaaaaatctcaaagtacctacaacccaaaggcaagaaaaaaatgcccaagtatttaagaattgcaaaagatcaagagtcaacaaatccagccaaagacaatgaatcctgcccatccacacctggtgttatagccttctgtctgatgtctgataactctccttctactacttcacagtatcccacatgctgctacctcctgacacctatttccacaaggaaatttcatgtattcttcaatataaactctcataattattgtagtatttatgtatgttttaactatcaaatatgtgtaatagtgtactattccttttgtttacctctttatttatcactgacaatgtacttgagtgttataccattaatcccatttttctcataactcagtttttattgtacaattttgcatattgcagtgatttttaggaacatatatggcacattataggagaactgactgtacagacccaaattaaattagcggatatttgtaccaaaagacatgtacaaaaaaatcttaacaggtttattcaaaatagcaaaaactataatgctaaaataaagaatggtacatttagataatatagtactaaacatcagtgaaaaatatttagttactgctaagtgcaacagcctaggtaaatcccataaaaataatgttcacagaaagaagctagaaaccaggaagtaggtatattatgattctatttatatgaagttcaataaaagaaaataatagtctttgatgagagaaattagaatcaccgcttaaccttatggggtattgacacaaagaggtcatcttagtctattcttcctgctcttagaaaataccagatacttggtaatttataaacaatagaaatttatttctcacagctctggagcctgggaagcccaaggccaaggcagtagcatattccgtggctggtgaaggcttactctctgcttccaagatggtatcttgttgctgtgttctcacatggcagaagagtgaaagggtaaaaggagtgaatgctacatgctcacatgacagagagaaaaggaaaaatgttaggcagttttctgaagcctcttttataagggcattaatactatttatgaggatttcaaccttatgatgtaatcacctcccaaaggccctacctcttaatactatcactttagtgattaaatttcaaaatatgaatttgggagacatattaagaccataacagagcacaaggagagcttctagtgtacaataaattatctatattttaatttgcttggtagtttcagagggttactcctttgtaaaaatgtatcaaggtcaacttaaaatctgggtattttatgtatgttatacctcaataaaaatatttaccaacaaattatttaaaaatatgtagggagaattaaaatacatagcagcaataacatacaaagttggagacaaggataaaataaaattatctaaggctttgtattgttcagaaagagttgatataattaatattagactttcatgttacatctgtatgtaggataaaatttctaggataaccacaaaaaatatttatagattgtataacatcaaagctaatgtagaaaagaaactgaataataaaaaagtgttataaattctaaagaaggcaaaaaataaaaggaaaaaaatatggaagagggagaaaaatatgtatactatatagtttgatagtaattaaaacccaaatattgtatatcaagttttatgttaaatgtaaatatatgaaatgtttagattaaaagactaatatgttcagattgtagaaaaattccaaaatccacttatatgcagcttataaaagtcacatccattaagagtattaaaaggtagaaaatgaaagcatgcaagagaattcagcaggcaataactaacgaaatacagctggtgtcactacattaatattagacagaacagactttatggccaaaaatattctatgttttcattgccaaaaggtgagtacaacaggcaaatataacaatcatgaatttatatgcacctaataacacaggctcaaaatgcataaacttttacaaaataaggagaaataggagaaattacaactcttccattgtaaaaaattttaatataccactctctgtatattattttacaaattcagtatgcatatacactacctaatgaaaacaattttaaaccttaatccaataggtatatataaaacatggtactcaaaaatacacattcttttcaagcatacacataaataacttcacagaaactgaaaaaaaatgtttaaatatatctcaaatgatggaaattatgcagtatgtattggtttcctattgttgctgtaacaatttgccataaatgtagtgtccataaacaacacaaatttattatcttacagttctggtgatcagaagtcctaaatcaaggagttggcagggctgtgttccttctggaggctctaggagagaatggattccaatgcctttccagagtctagaggccacctgcattccttggcttacagctcctttgcatcattctgaactctgcatctgtcatcacatcttctctccccttgacactcctgcctgcctctttcctttataggaagttttagtattgcattaggcccacccagataaccctggatagtcttcttaacttaatgacatctggagagccctttttgccatgtaaggttacatacagtctccagagattaggacatagacaattttttttcaagatattttctatgttatcttcattagatttttaattacttaggaaaattatgcttaaagggggttaaagtttttacattcatataaccttctgtattgacttcaaagttttttttatcactttggttaaataaggaactattattttacaataatctatgattctgttttaatcaaatgttttgaaccttttagcatcttcaaaaaacattctcaaaatcaaataatcattgctaattcttcatgttttattttccagagtcaagaaaacctttttctttaaaactatttatagtttacaagcttgagtaaaacaataaagtttatctatgtctctacctgatccagaatttgaaaactattcaaaattcccctaggactagggacaattgcagaagaggtgagtgcctgagattgtaagagcgagttttcagacagaaaattctttcagaccttccaaaccaaagatggatacacaggtgtctaaatagctgatggctcaacacatagaatttatagataagtcaattttttaacactgctttttggctttgggtttttggctcttatgttacttagagggtttcaaggattaatgagtgcctacccacctctattcccatatagcctaaaatgtttagttgtttataagtcttttggctcaaatttccttggccatagggttcctgccaagggacatgagggaccctggacaagttgccacgccaccacagcaactgtatgggacaaaataaaatattggccatcaatgctgcttctggtatatcttgaccaaaaacggggaatgtaaactaaaaaataaaatcttaagccacccatcgtctgaatggaccccacccccattggccaagggaaccccacaaaaatttaaaaacttagttcccctccatgatgggacaggaaggcagacatgtcccattataccccctctcttttatggtgtagacacaacaactgaccagcattgatattaaaatagagatcataagaccgacagaacagactctgtgtggcaataagataccaaattataaaagacctatcttaggtcttaagatacctaagaccatgccaggtaagagttaattcacacacccctatgcttaaaggataaattatgttctaactgccacaaggttttcttttttctagcagctattttaagctgaaaaagaaaaataaggaatcataaaacaattttcagctccaccagatgctgaaaaactgaactcctgttccaccagtcacagctgtaacttttactggataagatactgatttcagtaactttcttctgataaaaatactactaatcacagactagttctggccagtttacagaaattgtgcaattgtgtacctttttgtcctaaaaagacctttgacatacaggacctaattgtaatatatttaaatgttgtctccaccccaaagtaaacatgggtcatatgttacatgtttgttcagtacaaatttgtcaaggccactttcataaatattcatagtgtcaggcctctgagcccaagctaagccatcatatcccctgtgacctgcatgtatacagccagatggcctgaagcaactgaaggtccacaaaagaagggaaaatagccttaactgatgacattccaccattgtgatttgttcctgccccaccctaactgataagatatagtttcccccccgcccttaagaaggtactttgtaacattctcccccacccttaagaatatactttgtacgcctatcccaaacctataagaactaatgataatcccaccaccctttgctgactccttttttggactcagcctgcctgcacccaggtgaaataaacagccttgctgctcacacaaagcctgttggtggtctcttcacacagacgtgcgtgacatttggtgccgaaacacggcacaggaggactccttcaggaggccagcccctgtcctcgccctcactccatgaggagatccacctatgacctcgggtcctcagaccaagcagcccaaggaacatctcaccaatttcaaatcgtgtaagcggtcttttcactcttcttcagcttctctcactactcttcaatcttcctctctcgctacccttcaatctccctgtcctcccaattccagttctttttcctctttagtagagacaaggagacacatattatctgtggacccaaaactccggtgccggtcacagacttgggaagacagtcttcccttggtgtttaatcactttggggacacctgcctgattatttacccacactccattggtgtttgatcactgtggggacacctgccttggtcattcacccacattcccttggtggcaagtcaattgtggggacatctgctttggctgctcacccatattgcagcccagggctgctcaccacccccttctccatctctctacctttctctttaaacttacctccttcactatgggcaaacttctgccctccattcccccttcttctcccttagcctgtgttctcaagaacttaaagcctcttcaactcacacctgacctaaaacctaaatgccttattttcttctgcaataccacttgaccccaataagaactcaataatggttctaaatagccagaaaatggcacttttgatttctccattttacaatatctagataatttttgttgaaaaatgggcaaatggtctgaggtgcctggcgtacaggcagccaggcattcttttacacattggtccctccctagtctctgttcccaatgcgactcgtcccaaatctttcttctttctctcctgtctgttccttcagtctccaccccaagctctgagtcctgtgaatcctccttttctacagacccatctgacctttcccctcctccccaggctgctccttgccaggccaagccaggtcccaactctttttcagcctccgctccctcaccctataacccttctattacctcccctcctcacacccagtctggcttacagcttcattccatgactagccctccccgacctgcccaacaatttcctcttagagagtggctgaagctgaaggcatagccaaggttaatgctcctttttctttatccgacctctcccaaatcagttagcatttaggctctttttcatcaaatatgaaaacccagcccagtccatggcccatttggcaacaagccttagacactttaccaccctagacacagaggggcctgaagtctgtcttattctcaatatgcattttactacccaacccactcccgacattagaaaaagctccaaaaattagattctggccctcaaccccacaacagcacttaattgatctcaccttcaaggggtacaataatagagaagagttgcaattacttgcctccactgtgagagaaacccagccacatctccagcacacaagaacttcaaaatgcctaaaccgcaggggcaaggcattcctccaggaccacctcccccaggatcttgcttcaagtgccggaaatctggccactgggccaaggaatgcctgcagcccaggactcctcctaagctgtgtcccatctgtgcaggaccccactggaaatcagactgtccaactcacccagcagccattcccagagcccctagaactctggcccaaggatctctgattgactccttcccagatctcggcttagtggctgaagactgatgctgcccaatcaccttggaagcctacaggaccatcacagatgctttgggtaactcttacagtggagggtaagtctgtccccttcttaatcaatatggaggctacccactccacattaccttcttttcaagggcatgtttcccttgcctccataactgttgtgagtattgacaagaggctttaaaccttttaaaactccccaactctggtgccaacttggacaatgttcttttatacaatcctttttagttatccctacctgcccagctcccttattaggtcgaaacattttaactaaattatctgcttccctgactattcctaggctacagccacacctcattgccacctttttcctcagttcaaagcctccttcacatcctccccttgtatctccccaccttaatccacaagtataggacacctctactccctccttcgtgactgatcatgcacaccttaccatcccattaaaacgtaatcacccttaccctgctcaatgccaatatcccatcccacagcacactttaaaaagattaaagcctgttatcactctcctgctacagcatgggcttctaaagcctataaactctccttacaattcccccattttacctatccaaaaaccagacaagtcttacaggttagttcaggatctgcgccttatcaaccaaactgtcttgcctatccaccctgtggtgccaaatacatatactctcctatcctcaatacctccctctacaacccattattctgttctagataaacctagctgaccccataaatcctaaatcctttccccactcccctttccattccttaaaaaacagccctaaaagctgctcccacactagctctccttaattcatcccaacccttttcattacacacagccaaagtacagggctgcgcagtcagaattcttacacaagagctgggactgtgccctgtagcctttctgtccaaacaacttgactttactgttttagcctagccctcatgtctgcgtgaagtggctgccgctgctttaatacttttaaagcccctcaaaatcacaagctatactccacttactctctacagttcccataactttcaaaatctattttcctcctcacacttgacacatatactttctgccccccagctccttcagctatactcactcttgttgagtctcctacaattaccattgttcctggcccagagttcaatctggcctcccacattatcccagatgccacacctgatccccatgactgtatctctctgatccacctgacattcactccatttccccatatttccttctttcctgttcctcacactgatcacacttggtttattgatggcaattccaccaggcctaatcgccactcaccagcaaaggcagggtgtgctatagtgtcttccacatctatcactgaggttactgctctgcccctctccactacctctcagcaagttgaactcattgccttaactcaggccttcactcttgcaaagggactacgcatcaatgtttatactgactctaaatatgccttccatatcctgcaccaccatgctgttatatgggcagaaggaaatttcctcactacacaagtgtcctccatcattaatgcctccttaataaaaactcttcttaaagctgctttacttccaaggaagctggagtcattcactgcaagggccatcaaaaaggcatcagatcccatcactcagggcaatgcttatgctgataaggtagctaaagaagcagctagtgttccaacttctgtccctcatagccagtttttctccatctcattggtcatgcctatttactctcttactgaagtttccacctatcaatccctctccactcaaggcagatggttcttagaccaaaaaaaaatctccttccagcctcacaggcccattctattctgtcgtcatttcataacctcttccatgtaggttacaagctgttagcccacctcttaaaacctctcgtttcctttccatcatgaaaatttatccccaacccgccactcttgactgcctcttggagtgcacagacaatctttgctgacaggacacactccaatactttcaccctgatgaagtcctattctttacttttatactcactcttattctcgttcctgttcttatgccaccctctacctctccccagctatctccaccacactatcaatctcactcactctctcctacccgtttctaatccttctttaacaaacaattgctggctttgcatttctctttcctcaaaactcgccaaggccctgacttactcactgctaaaaaaaaagggggactctgtatatttttaaatgaagagtgttgtttttacctaaatcagtctggcctggtaaacagtatcaaaaaactcaaggatagagcccaaaaacttgccaaccaagcaaataattaacactgaacccctctggacactctctaattggatgtcctgggtactcccaattcttaatcctttaatacctacttttctccttcttttattcgtgccttgtgtcttctgtttagtttctcaattcatacaaaactgcatccaggccatcaccaataattctataggacaaacgctccttctaacaaccccacaatatcaccccttaccccaaagcctttcttcagtttaatctctcctactgtaggttcccatgccacccctaatcccgctggaagcagccctgagaaacatcacccattatctctccatactaccccccaaaattttcaccaccccaacacttcaccactattttgttttgttttgttttttattaatataagacaggaatgtcaggcctctgatcccaagctaagccgtcatatcccctgtgacctgcacgtatacatccagatggcctgaagcaactgaagatccacaaaagaagggaaaatagccttaactgatgacattccaccactgtgatttgttcctgccccaccctaactgataagatatagtctccccaacccttaaaaaggtacttcgtaatattctcccccacccttaagaatgtactttgtacgcctatcccaaacctatagaactaatgataatcccaccaccctttgctgactccttttttggactcaggccacctgcacccaggtgaaataaacagccttgttgctcacacaaagcctgttggtggtctcttcacacacatgacacatagcttcttctgtaacctcttaaatatatatgtttagccaacctgtcatcaaatccccaggaactccatgtacaattgacagagaggaacaaactagttgattttttttattaatatggggggttgtatattctgtagtcaacatctgcttatccgttgattcaaaaaagactgcaatgtttacaggggtgccaggaaaaaccaatgacatggataatttagagtactattattttgtctaccacacagagtatgtcctccaaaatcaatgcaaataatctaaaataaatgataaaaattttatgtttggagaataaagcatactcctaaataaacatagatcattgtagtcccacttgtttatttttgcttttgttgtctgagcttttattgtggtatctaaaaaatcattaccaaggccagtatcaaagagcttttaccctaagttttcttctactaactttggaatgccattggctgagagggggtgtccattcagatggttgggccatgcttagaattttatttttggtttacaattccttctgagactcaaagaaagaatcaattttcttgccatttccagctagaacctattctgattccttgacttttggcccctttctctatctccgaagccagcaacattgcattctctctgactcttctgttttcaaatctttccagttaatcaaaatagagaaagactccggttttaaagattcatgtgatatgattgggcccacttgtaaaatccaagataatcttctcatctcaagatttccaacactagacacatctgcaaagtacctttttccaggtaaggtaacagattcacaggctctggaggacttggacttctttggaggagccactattcagcctaccacagctagtaaaaaaaataaaaattctttagtcttacaaagaatatcttcaaccatatacaccaagtactaagtttaatatcgaattatcaacagctttccctttacagccaggaataccataggattttcactatcattttgtgtattaaacattgtcctggagggtgtaaatgataagattgaaactgcctttgcaaaaattacaacaattagaagattatggcagtgaaggggatgtaatctggccaaattccttcttgcctttggtcttcaagttgaccttaattattcctgagcttaggctaagctaacttcggaagacatttagtttatagcttaaatgataatagcccttccctaaaactcaaccactgttgtaaagctaatgagagaccaccaggctaggaggatggagaggcctgaattttgctaggtgtagacataaatgattgccagccattattccagaagtcacaagatatgcaacttccccagttacttctgcagataacatcactattgtagaacctaagattggccttttgagatatattttcaggtttttcgcatgtccgataccaatggcttcagctggacctcccaagctcctgtggtcccacccagaggcgacttagcttgtagaaggaccatcttccacacccctgtgattgcaaccccaatgaatcaacaacaagcactcactgcctagccaccccacccgttccctcaaattaccttggaaaaatcctagcccccaaattctctggtaggctgatttgagcaataataaaacttggtcttccctttcactggctctacatgtataaaactttctctattgcaattcctctgcctcgataaaccagctatatgtggacaccaggcaagaagagtccattgtatggttacacagtaaattaagaaaaaatacaaagtataagggtaagaatttttaaaaactgttatatttgcaagtaatatatttgtgcatagagaagattcaagagcactgtaaaggaaaatttaaaaatctcaatgcatgcctatatcaaagtatctcatgtaccccataaatatatatacttatgatgtacccacaaaaattgaaaataaaaaaaatctcaggaaccccaaactccttacatcaaaaggaaaattaagcctggtgactgagtggcacaacacaaacacatcatccttttcccaaatgaatagcttttacttcataatcttgtgtcaaagcattatccattagccacaacccctgcagaaaggcaaaaagcctcaggtatccctgatgactgtcttcacaaattgttctttgctggccttaagctttcaggaggtatatcctgccataaaaaaaagggcatgtcaattataactttaggtctgcaatataagtctagctcctataactaaagtctgttaaaattcagactgataatgtcaattacaagataatcttcccaagtacagaacaaagacaagctgagattgatcaatcctccacctaccctgagaaatctgcataactgattttcctttactccctctttttttggtaaaacattcaccttatcttatgtaaaatgtagatttacaaggcactaactaaagtctcacaaggatgtaaccattcacctcacaccacctacatgccttccccatttcaaggaaatgtataaatgctaaacctcctgaaaacctctttggagaacacaagaattggcaatctggcactggtggtttcatttcttggtgtaaattacatagcacgcttataaaactacagctgctttttgttgtttgtaatttggacttcagaaaaacattgtgggccaggtatggtggtccacatctgtaatcccagcattttgggaagccaaggcaggcagatccctcgaggccaggagttcaagaccagtaaaacttcatctctactaaaaatacaaaaaatagcccattgatgctaggaagaaactgcatcaacaaacgagcaaaataaccagctaacatcataatgaaaagatcaaattcacacataacaatattaaccttaaatgtaaatgggctaaatgccccaattaagagacacagactggcaaactggataaagagtccagacccgttagtgggctgtatacgggcgacccatctcatgtccaaatgcacatataggctcaaaataaagggatggaggaagatctaccaagcaaatggaaagcaaaaaaaagcaggggttacaatcctagtctctgataaaacagactttaaaccaacaaagatcaaaagagacaaagaagggaattacaaaatggtaaaaggatcaattcaacaagaagagctaactatcctaaatatatatgcacccaatacaggagcacccagattcataaagcaagtccttagagacctacaaagacttagactcccacacaataataatgggagactgtaacaccccactgtcaatattagacagatcaacaagacagaaagttaacaaggatatcccggacttgaactcagctctgcaccaagtggacctaatagacatctacagaactctccaccccaaatcaacagaagatacattcttctcagaaccacatcacacttattcgaaaattgaccacatagttggaagtaaagcactcctcagcaaatgtaaaagagcagaaatcacaacaaattgtctctcagaccacagtgcaatcaaattagaactcaggattaagaaactcactcaaaaccgcacaactgcatgaaaactgaacaacctgctcctaaatgactattgggtaaataacaaaatgaaggcagaaacaaagatgttctttgaaaccaatgagaacaaagacacaaagtatcagaatctctgggacacatttacagcagtgtgtagagggaaatttatagcactgaatgccacaaaagaaagcaggaaagatctaaaattgacaccctaacatcacagttaaaagaactagagaagcaagagcaaacaaattcaaaagctagcagaagacaagaaataaccaagatcagagcagaactgaaggagatagagactaaaaaatccttcaaaaaatcaataaatccaggagctggttttttgaaaagatcaacaaaatagatagaccactagcaagactaataaagaacaaaagagagaagaatcaaaatagatgtaataaaaaatgataaaggggatatcaccacggatcccacagaaatacaaactaccattagagaatactataaacacctctacacaaataaactagaaaatctagaagaaatggatacattcctggacacatacaccatcccaagactaaaccagaaagaaattgaatctctgaatagaccaataacaggctctgaaattgaggcaataattaatagcctgccaaacaaaaaaagtccaggaccagatggatttacagcagaattttacctgaggtacaaagaggagctggtaccattccttctgaaactattccaatcaatagaaaaagagggaatcctccctaactcattttatgaggccagcatcatcctgataccaaagcctggcaaaaacacaacaaagaaagagaattttagacaaatatccgtgatgaacatcgatgtgaaaatcctcaataaaatactggcaaaccgaatccagcagcacatcagaaagcttatcgacacggtcaagtcagcttcattcctggaatgcaaggctggttcaacatacacaaatcaataaatgtaatccatcacagaaacagaaccattgacaaaaagcacatgattatctcaatagaggcagaaaaggccttcaacaaaatacaacaacccttcatgctaaaaactctcaatacactaagtattgatggactgcatctcaaaataataagaggtatttgtgacaaatccacagccaatatcatactaaatgggcaaaaactggaagcattccctttgaaaactggcacaagacagagatgccctctctcacgactcctattcaacatagtgttggaagttctggccagggcagtcaggcaagagaaagaaataaaggtatttaattaggaaaagaggaagtcaaattgtccctgtttgcaaatgacatgattctatatttagaaaaccccattgtctcagcccaaaatctccttaagctgataagcaacttcagcaaagtctcaggatacaaaatcaatgtgcaaaaatctcaagtgttcctatacaccaatgattgacaaacagagagccaattcatgagtgaactcccattcacaattgcttcaaagagaataaaatacctaggaatccaacttacaagggatgtgaaggacctcttcaaggagaactacaaaccactgctcaatgaaataaaaaggacacaaacaaatggaagaacattccatgctcatgcaaaggaagaatcaatatcatcaaaatggccatactgcccaaggtaatttatagattcaatgccatccccatcaagctaccaatgactttcttcacagaactggaaaaaaactactttaaagttcatatggaaccaaaaaagagcccacattgccaagacaatcctaagcaaaaagaacaaagctggaggcatcatgctacctgacttcaaagtatactacaaggctacagtaaccaaaacagcatggtactggtaccaaaacagagatatagaccaatggaacagaacagaggcctcagaaataacaccacacatcatctataaccatctgatctttgccaaacctgacaaaaacaagcaatgaggaaaggattccctatttaataaatggtgctcggaaaacaggctagtcatatgtagaaagctgaaactggatcccttccttacaccttatgcaaaaattaattcaagatggattaaagacttaaatgttagacctaaaaccataaaaaccctagaagaaaacctaggcaataccattcaggacataggcacaggcaaggactgcatgactaaaacaccaaaaccaatggcaacaaaagccaaaataggcagatggaatctaaactaaagagcttctgcacagcaaaagaaactaccatcagagtgaataggaaacccacagaatgtgagaaaatttttgcagtctacccatctgacaaagggctaatatccagaatctacaaagaacttaaacaaatttacaagaaaaaaacaaccacatcaaaaagtgggcaaaggatacgaacagacacttctcaaaagaagacatttatgcagccaacagacacatgaaaaaatgctcatcatcactggtcaccagagaaatgcaaatcaaaaccacaatgggataccatctcatgccagttagaacggtgatcattaaaaagtcaggaaacaacagatgctggagaggatatggagaaatacgaaagcttttacactgttggtgggagtgtaaactagttcaaccattctggaagacagtgtggcgattcctcagggatttagagctagaaataccatttgacccagtgatccccttactgggtatatacccaaaggattgtaaatcatgctactataaagacacatgcacacgtaagtttattgaggcactattcacaatagcaaagacttggaaccaacccaaatgtccatcaatgatagactggattaagaaaatgtggcacatatacactatggaatactatgcagccataaaaaggatgacttcatgtcctttgcagggacatggatgaagctggaaacaatcattctgagcaaactatcacaaggacagaaaaccaaacaccgcatgttctcactcttaggtgggaattgaacaatgagaacacttggtcacagggtggggaacatcacacaccggggcctgtcatggggtgggtgggggagggatagcactgggagaaatacctgatgtaaatgatgagttgatgggtgcagcaggccagcatggcacatgtatacctatgtaacgagtctgcatgttgtgcacatgtaccctagaacttaaagcatattaaaaaaaatttaaaaagtagcaggcaacatggtgttggccaggtagagaacccacctgcataataaaagattagggttggtgggggcagcttcttcacatgctatgcaaacagcacacctagtcctagccagttctttctgtgctatgcaaatggcacacctggcctgaccaatctttcacgccctatgtaaatcagataccgcctcctcaagctcatctaaaaaatttcctacacttcactgcagactggaaaacttgctccggaccccctctctcttcaggagagagcttttctctttcttttgcctgttaagcctctgttcttaacctcactgcttgtgtatccacatccttgatttccttggtgtgaggcaacaaatctcaggtattaccccagatgaacgatgctgcttcactgggactcaaatcatttcatccaaagctcataggttaggagtttttcaaaggcagtttgggggaaggggtcggggtggctaggtttgctgctaattggttgggctggagatgaaatcataggcgttaaagctgtactcctgcaggctggatagcttgtaggtggggccacagcagtgggattggtgggtccaggtggagccatgggtgttagacatgcaaaaaaacctgaaaggatgtctcaaagggtcagtctacaaaagtggtgtcatctgcaggaataattggagaagttgcctatcttataacctcaagaatagtggcaaacaatcattcatgtctgagtcttagccagactcagcctcctctccttccccaagcctcatggcctcccattagctttacaaagcctgttaagttttaggcctgctatcatttaaactatagtctaaatgtcttccaaaagtattagattggttcaaagctaactgcagttttgccattaaaagtaatggcaaaaactgcaattacttttgcaccaaactatagcttagggcgaggcacagtggttcatgcctgtaatcctagcactttgggaggctgaggtgggtggatcacttgaggccgggagtttgagatcagcctggccaacatgggaaaacacctaatctactaaaaataaaaaaattagccaggcattgtggcgcactcctgtaatcccagctacttgggtgactgaggcacgaaaacaacttgaaccctggagacagaggttgcaatgagctgagatagtgccactgcactccaacctgtgtgatggagcaagacattgtctcaaaaaaaaaaaaaagaaaaagaaaaagttagcttagccctatcgcccaggaataaaggaaacagcaagatggggcagtggggtagttagctcaacttactgttatattactcattgatacaatttttgcaaaggtggttttagtatgactctacaccttttgggtcacccatttgtaatccattctactgaaggaagccaaaatattaccctctaaaacacttaggattgttgagctaaacacagctaaaaggcagggagattctctgcccttcttttgtttgcctaaagcgaggacataaatcctcccttactggagacagctgcttattagcccactaatgggccaggggaatctgtgagcagactttacctctataaatttgccttcctatatttgcccaccttttggcactacccctatgggcagattttgtcttcctgcttcattaaatatctctttaaatttttcatctgaactctctgtgtagccagtcaactgagaagctgagaccctagagaatatggccagagtgatatgggttgtacacccatttgtagctagcaaaacttttctctctttgaactttctttggcatgaatctggaatcttgtgagaactgtcctgcatctctttggagaaggctcgttgatcaatgtattgattacatcataacattggttaaagcttattggttttggtgagtcacttgcaaagatacctttggtttaaaagaggggggaaatggtacaaaagcaggaatattgactgttctggctgaaatatgataagagacttgaagttttttttttaagatctctatagtcaaaagtcgatttaattaaaagctgatatttaagatacatatgcatatatactttttaattgggcctctgttctctataaaaacttgtcagttgactaaatttctttcttcttaacccttttgtcaagaaaaacagtaaaatatttgaagagatttattctgagcccaataagaatgaccaatgacccatgacacagctctcaggagatcctgagaacatgtgcccaaagtggttgaactacaacttggttttatatattttagggagacataagacgtcaatcaattaatgtaagatgtatattggtttaatccagaaaaatgggacaataggaagtgggggccccagatcataggcagattctaagattttctgattggcaattggttgaaagagttattgtctaaagacctgaaatcaatacaaagaaatttctgtgttaagataagggattttagagaccaaggttttatcacactgatgaagcctccaggtagcgggcctcagagagaatagattgtaaacgtttcctatcagacttaaagattctattagtattttttttgacagagtctcactctgttgtccaggctagagtgcagtggcgcaatctcagctcactggaacctccacctcctgagttcaagtgattctcctgcctcagcttcctaagtagctgggactacaggcatgggccaccatacccagctaatttttgtatttttagtagagacagggtttcaccatgttggccatgctcctgacttcatgtgatccacctgcctctgccttccaaagtgctgggattacaggagcgagccaccacatccagcctgctctattagtcttaaggtctttgtgttgatgttaacactggtcagctgcgaggcatgtccagtggcaccccacttcccatcatggcctgaactaatttttcagattaactttggaatgtccttggcagaggggagggcccatcagtcagttagggggcttagaattttatttcttttttataccttactaactgtatgcactcccttagtttgcttctgttttgttgacatgatttgtgccaagaatgatgtaaaacttcactggccttttgaaagcttaaactctttctctgtactatgaaacataaatttcctaccttgttttgtaaatcagtaagggcttcagcctgtgagacagataaactttaactcgttccatttacaaagccacagtttgattccaactgtctttttaaactactgagttttgcctgactcatgggtaaaatattaaaatctgtgaaccctaaataactgagacaggtctcagtcaaattagaaagtttgttttgccaaagctaagaaagcacccatgacacagcctcaggacatcctgacaacatgtgcccaaggtggtcagggtacagcttgctttattttagggagatatgaggcatcaatcaaatgtgtaaaatgtacattggttcgttccagtaaggcaggacaactcaaagtgggggtttccatgttagaagtagataaaagacaaaaggctgcattattttaagtacttgatcagtcttccactgaatacacaatttaatctgtctcagtgaatctgcatttttacataaacaataggtcagaggaagtaattagatatgcatctgtctcaggcaagcctcagagggacaattttgagttctgtctgttctttgtccacaaagaatttccttgtgggaaaattgtgagggaggtatgtggcttcttatctctgtagctatcttatttagggataataaaatgggaggcaggtttgccctaagcagtccccggcttgccttttccctttggcttagtgattttgtggtgccaagatttattttcctttcacaaatcaaaactataaaatctttgtctgtatttttatacttgtgtaaatgtttgtgtttgtatatagtatacaagtgacaaaactgacttttaaaaaggcccaaatgaacctttaagtttcttgcctttaggatacttgcctaacatatagtaatataaaaatagttaatagaaaatttaacttgagatgatggccaaatgtgtcctatgtcttataaacttttccaaacataattgttaagagtgaataaattaaatagatgtaaatgggatgagttcataaatgaactattaatacctattaagttttataatatgcttacttaaaaaggttgtgatggttaattctgagtgtcaacttgataggactgaaaaatgcaaattattgatcctgggtgtgtctttgagggtgttgccaaaggagactaacatttgagtcagtgggctgggaaaggcagacccacccttaatctgggtgagcaccatcaaaatcagctgctagaatataaagcagacaggaaaacgtaaaatgacaagactgggaccaggtgcagtggttcacgcctgtaaccccagcactttgggaggtcaaggcaggtggaacacctgaggtcaggagttcgagaccagcctagccaacatggtgaaaccttgtctctactaaaaataccaaaattagccagatgtggtggcaggcacctgtaatcccagctactcaggaggctgaggcaggagaatcacttgaacccgggaggtggagattgctgtgagccgagatcgcaccactgcactccagcctgggtgacaagagtgagactccacctcaaaaaaaaagaaaacaaaacaaaacactgcactggcctagcctcccagcctacatgtttctcccaagctggacccttcctgccctcaaacatcagactccatattcttcagttttgggactcaggctggctttccttgctcctcagcttccagacggcctattgtgggaccttgtgatcctgtgagttaatacttaataaactcatgtatcctattagttctgtccctctagagaaccctgactaatacaaacatttttaaaggtttttaaaatctttttgttaactataccctcaaaatttgctatgctaaattaaaggatggatattcattgaatatctaaattatctctaaataagatacaattctaagacattaatgactatgagttgaagcttaaatacttttgacttcttatttcagagaaacaaaagatatttatatttcttagtaaaaatgtcctgttttacatttttatcgggggaaccagcccccaatatttcaacataggtcctttctattttccctaactgtcggccagtctgagaaataaagagaaagagtacaaaggaggaattttacagctgggcctctgggggtgacctcacatatcggtaggtccatgatgtcccctgagccacaaaaccagcaggtttttattaaggactttaaaaggggagggggtgtatgaacagggagtaggtcacaaagatcacatgctttaaagggcaataaagatcacaaggcaaaggtcaaagcaaagatcacaaggcaaagggcaaaattagaattactgggccgggtgtggtggcacacgcctgtaatcctaccactttgggaggccaaggcaggtgtatcacgaggtcaggagatcaagaccatcctggttaacacagtgaaaccccgtctctactaaaaatacaaaaaaaattagccaggcatggtggtgggcgcctgtagtcccagctactcgggaggctgaggcaggagaatggcgtgaacccgggaggcggagcttgcagtgagccaagatcacaccactgcactccagcctgggtgacagagcgagaccatgtctcaaaaaaaaaaaaaaaaaaagaattactgaggagggtctacgttcggctgtgcacgtattgtcttgataaacatcttaaacaacaaaaaacagggatcaagagcagagaaacagtctgacctcaaatttaccagggcaggatcttttccccaccctaataagcctgagggtactgcaggagaccagggcgtatttcagcccttatcccaaccacataagacagacactcccagagcagccgtttatagacctcccccaggaatgcattccttccccattgtattaattattaatattccttgctgggaaaagaattcagcgatatctctcctactcgcacgtccatttataggctctctgcaagaagaaaaatatggctctattctgcccgaccctgcaggcagtcagatctttggttgtcttcccttgttccctaaaatcactgttatctgttcgttttcaaggtgcactgatttcatattgttcaaacacacatgttttacaatcaatttgtacaacagcggtcctgaggtgacatacattctcagcttatgaagataacaggattaagagattaaagtaaagacaggcataagaaattttaagagtattaattttgggaactgataaatgtccatgaaatcttcacagtttatgttcctctgccgtggctccagccagtccctctgtttggagtccctgacttcccacaacatttttttttttttgagatggagtctagctctgtcgcccaggctggagtacagtggtgcaatctcgactcactgcaagctctgcctcctgggttcatgccattctcctgcctcagcatcccgagtagctgggactacaggtgtccgccacaatgcccggctaattttttgtatttttagtagagacggggtttcaccatgttagccaggagggtcttgatttcctgaactcatgatcatcctgcctcagcctcccaaagtgctgggattacaggcacgagccaccgcgcctggccctgttctacatttttaaagaatgttccattagaaagcctatgtttctaaatattataaaaattcatattcataaaccgttggtatgtgactgacacttaaaaattgcttacttcttaggttttcactatgaattaaggttactaggagttaaaattctaattaatacatggtaactagaattagggataagaaggataacaattctatacacagaatgtacaaaaaacacataagatttttttttggtgaggatggttataagatggatatgaggatatgttttttgttaaaggaaaagcgattttgcctaggttagaggttatttaaaagttgtactaaattgaagaaataaaagaagaacaatgagataaagtgaatggatataggaattcaggaaaagaaagagaatggaaaaaattataagaggtttaaaatgtttatgaaagtcatcttctgtggtcaaaagtgattgagattacaggcataagccatcgtgcctggcccaagtgctcttgaatacaggtttctgataactttggagatcataccattggactaggtaaaaaatacttccagaactctcataaaaacaactgatgtatttatgaagattgctaggccaatatcgagcagaaaaagaattaattccatggaactgaactaaggaaggactgaaataatttttacttctttttgcttaaaacattgtaaaatctttttgttttgttttccaaagtcctaaaaacttttttttcttttgagctcttcatggcttatagcaataggtaaagtaaactttcgtgagcaaattgagacatttacctttctctctacctgatttctccagaatttagaagctattcaagaacattattatttcatggcaatattgttattttcatgagttcaataagaatctgtttttctttgtagcaggacacaattggagacactgcctattcaaggctttcactggaatggcatattttcagatacaacaaggagaatttctgaaactaactttgggagaaacttagtttatagtttaaaacacagacagccctttcccaaagcagaccttcttgctgggggacaagattgcctttgtaggactaacattagccacaagataagaaattatcttgtgagactgatttgagtaataataaaactccagtctcccatacagcctgctctgcatgaattactctttctctattgcaagtcctgtcttgatgaattggcactttgtctaggcagcaggcaaggtgaaccccttgggtgtttacaaggacagcttcaacccatatgatttcacctccaacccaaccaatcatcagcaagcatccattacctggccactgccaccctttccctaaactggctttgaaaaaatcctcttaactatgagcttggaggagattgatttgagtactacttccatgtcccacgtggtgtggccagtctcaggtctattaaactttctttactgcaatgccatggtctttctttgtgcagcaggcagaaagaacctctcaggcagttacaattgaaaaacaagcaaaggcttgaataggcacctcacaaaagagaatatataatatccagatgacatataaaaaggctaaataccactaataatcacaaacattcaaagtaaatcacaacaagctccactacatatccaccagaaaagccaagattaaaagtattgacaatattaaatattgggaaactgttgtgcagtgtataaaatggcaccacaactttggaaaacattttgatatttttgtgaaaatgaataaaatttaaaatctgttagaacactgcaaactccttaaactttgagagagctgctactgtgatctgagtcatgtagcatgttttgcaattctgcttcttagattacagcttaaccgtcttcctcattgttctggttctgtaaatgactaagaaagaccagagaacagacttcctccttccaatcactgatatttattctagattaactgcttcctctattgttctgtacctaactcagaccagattgcatcctcaaaacagaccccctgagggttacatcttcagtgtggaatgttagagatatctttccagaaagaaaaaaaacacctcaactaatcagatcattgtaactatgcattaagccttccatagaaaggtgttgaaattctgctaaacttccctgaactttatctgtataaatgatctgaaacttttatactttggaacactgacttccattctttggaatctgtgcttgctggtgggtacatcctcaagcactgtgcttgaataaactctctttcaactacactctgatgtttttgattattttaggatgacattctctataaaaaacacagatacacataccacatatgtaaaggaacacagcaacttaccaaatctgtttccctttcctcctaagcatacaggtatgctaaatttcccaatctctcctgcagtttgatttggctacaggactaagctgtggcaacggggacaaagaatgaatgacattctatgatttggaagccacttccaaatcttgcccattaaaaaaaaaataaaacactccataattctccattctctctttcacctcttaaaagctgaatactaatacctgaagaaaacaaaactatttcacccaaaaatatactcctttgacatactttgagatggctgttagaggatctgcaaacagaagcagtgctgcaaagctgtcttttgtggggagatttgtgtctctagagaatctgcattgatgcaacaggcttttcctgaggtcctcccttgcagatctaggaaagattaactgagagtctgatacctttaaaggtctgaaagaaacatttacctattctctctgagggctactatctgtgagatttcacctgcatagtgaggactaagctctgtttttgtgtgtgtgtatttgtttgttttaatcttggccaaattcctatctaaggggtctggagaccataaatgctcatcagatgggttttattttaaccctgtatatggtgacttactttccaatctgactctggcataacaaggaagaaaatcaaaatgttttacccccaaatacatttccttgccatgccttgaaattgccctgcaaagtctcttgtgggaaaaatccacattctatagagaatccccttactcctttcttttccttccttcctttccagatccaggagataatcacctatgagccaggcacccttttaagtccgataagaaacattttaccacctgctatctctgaagtctgctatctgagagcttcttctgcacagtaaaacttgatctccacaatcctttatcttaacctgaacattttctttctattgaccccaggtcttcagataaactcaactaattgtcaaacagaaaatgtttaaatttacctatagcctagacccctccccccgcccctgccctttgagttgtcccacctttctgaaccaaaccaatgtctttcttaaatgtatttgatggatgtctcatgcctcacttaaaatatataaaccaagctgtacccccacctccttgggcacatgttctcaggacctcctgagggctgtgtcacaggccatgatcactcatatatggcttagaataaatctcctaaaatattttacagagtttaactcttttggtcgacaatagcaagaccacctttgctagccaggcttcctcttttcccctcccataacctgtagcaccactgtaacctgatttactaccataacctggttttggccatgctccaagacctcattcttttgtaacctcaagatggtacatgagcttctgtactcccactgaggagttggaggtcatcattctctcccatgcacgttaataaacttgtatgccatttctcctattaatctactttttgtcagtttatttctcagtgaaacttcagaaggcagaaaaaaagttttcccttggcccctacatcaccagggtgaccttagaaatgacactaaaggccaggcattgtggctcacgcctgtaatcccagccctttgggaggccaagggggggtggatcacctgaggtcaggagtttgagaccagcctggacaacatggtgaaaccccgtctctactaaaaataaaaataattagctgggtgtggtggcaggcacctgtaatcccagttactcaggaggctgagacaggagaatcacttgaacttaagaggtggaggttgcggtgagccgagattgcgccactgcactccagcctgagtgacaagagtgcaactccaccaaaaaaaaaaaaaaaaaaaaaggaagaaagaaagaaatgacactaaagatgacagagtttctaagaaaagagtcacactccagcttctctcacctctgagagattttgcttggatataacctcctctaagaaacaactcattacatcttacatcttcagtatgcattagatgcccttctacaagtcttgtgccaattatgcttttattaagtaagaggaaatatagagtagtcactctaagtgccaactccggattcacttctatctgggttccaatggtttggcttagtcatatggccaagccaaacttcaatacctttgttatttgttggctctgtgacttgaacaacttattaaaacctctgtgagtttccttttctcaactttaaactgttgctacatcaataaatagactagacaagtgtttaaggacataaactctggtatcagactacttgattttgaacccctaactctgccagttactaactttgcaacttgttctcgccagtaggcagtgcagtggttaaagggtcatgttccagggccagactgccagcgtggaaattctggccccacccaaaggtgtattcgccattaagttaatggcatgaagcctcagggcttcctacttatgggtgcctcctccaagatcctgtacctgtagtttacatttgtaagtttggattctatttcaaaaagaggttctcagatactgtaaatcaaaactcagattccacaaaacctgcttgcaaagttgactctgccatatactggctatatggtctgggttagatatttatctcctgggtctctgtttctcctcttgtaaaatggaataaaaatggcaaccaccttcacagggttgtaataaagattgagctaatatatgttaaaatgtttagagcagtgtaatgcacacagcatatgcttcatgtgtgttggtgtctataactccctctctgtccactccttatcttcttctcatgagccctgtcaggactaagattatctttctctttgtaaacttagcctgtggcaagcctcacctatattctaactctttccctatgggactatacacattctcttctgtaagcttcctgagttgtttacaatctgattttatcaacctttatctgatttcttaaacctagacttgttcattctttatggcataataattatggtttctttttctccctaatcttcttcctcaagggacctcaagcttttctcttaagactttcaactgatccaatgagtctgacccatattatggaggtaatctgttttactcaaattttactgatttaaatgttaatcacatttaaaacaaacaaacaaacaacaacttcacagcaacttctaaactgttgtttttccaaaaagtgggcaccatgcctagctaagctaacaaataaaagtaaccatcacagcagtcatggcctgaataagacttgtcctaggccaggcacagtggctcacacctgtaatcccagcaatttgggaggccgaggcaggtggatcacttgaggtcaggaatgtaagatcagcttggccaacatggtgaaaccccatctctaccaaaaatacaaaaattagccgggtatggtggcacctgcctataatccccactactcgggtggctgaggcatgagaatttcctgaacccgggaggtggaggctgcagtgagctgagatcatgccactgcactccagcctggatgagtgagattctgtctcaaaaaaaaaagattgtcctgtacattgtaggtattgcagtttcctgctagctcacagaagaacagcctcattaccttcaatagatgctcttaacccatcgtcatctgccttcctctggacactgccttttgggagtgctggagttgcatcctcaaggacagggctatgccttcaaagagccaagcaaagaacttttcctgcattttcccacacagacacttcctagattcttctgccttatgcctgccttggtcagtgtagctaggatgtgcttcaaatggaaattatgcaagtgagaaggaccaggtgtaaagacaatttaattgtgggaaaaggcttacaaaggaaggtcattgtgaccctcacaagcagtgttcttgagtggataggacataaacagggaagaaagcatgtgatcatgagaacagctgaagttctgagtgagcaatgacatgaatggtgtccaattcaaagaaaagagaaggtagatccaggagctgaataaacagacagagcaattttgagagatacatccagaaagcagaagcacacacttacactttagctctgaatcctggctaaagcaacatacagaggcggtaactcctagaactctgattttcactctgttgccagagaggctcttcctgggcagctgtgtgccatgcaaatgatagaaacaaatcccatagtattgtaagtcataggttaaggagcagatttaatttcataaggagaaataacacaatgccagtgtcagcaagagcaagtctccccatcatcccaaggagaggaattctacaacctgggtatctactggacataatgtgggctccattctcacagaaggaatcctttccactgtggttcttcctgtgtggcttacgcatgagacaagtgtaagaaagtggccatgtcaataagaaaataagccagctctttggtgccaagaagtctgatttgggggtgccagctatttataggaattgtctagaattaaaatatcaccctgccttggggattgtggggcagctggggatcttggacatctgcagtatattgcaaccacacctgaaattaagaaggactcaatgacaataaacatctttacatcacccagtgtcttgaactcacttccccatcatgtagagcagctcaggtcttctctagctcttccacctcatgatgggtagtgactgctagggaagtcctgatcatcctagccctccaagaaatgttttgaatagcattgcatcttgaactcactataatttgatcaagcaaagatgttctatgtctctggtctgaaacctgccaccacagctgtgttctctgctttcagagaccaggggagcagtgactgaagctaagactacacatagcacttcagacaggcaaattaggagggaaaagaaaactgaatctgtaaactcgggaaaaactggtgtatcttttgaggtcccagccattttgagaaactctgatgctgaaaaaataaggaagaacaatctgactcctctctcaaacgctgacattctagctgagtgttgattttttcttagaaaaacaaactttgggtcaacaaggaaagatcacgagtggggagggtgaatgggtgattcacctcatggatctccctggcagctcttgcacttccttgatcaatctgtatataagaaatgtgctgggcacctgggacaccacttctctgggacacattgccttctgttttctccagcatgcgcttgctccagctcctgttcagggccagccctgccaccctgctcctggttctctgcctgcagttgggggccaacaaagctcaggacaacacgtgagccatgcccttctcctccccacaaaaaaaattgcagggagggctcctctcccagtctggaaattacatatctctttctgagaatttctttcaacttcccagaactctagtcccaggagctcccatggatctcctgccaggttccacttcttgtcctcttaggaagccccaccaactcctctcacatttttgctgggtgtttctgcattgccagtggaaataaagctccaaatgtacctacaggctgtaattagtagttagtcttcatctaacatgctgatccacatcttgttcataatttatacctttgttcagatttctgctcagtaaactttaccttctcacaccttgcctcctagaagagaagcataacaggtctgtgaattccaatggcagcttagggcagctttggcaggactggctaaaggaccagaggccctggccactgccctgtggtctgagattgagctagactggcagcttagacattcttcctaacctgaagtctgaagatgaatatgatgacctcttgctctcacgtatactgggacctgagagcacaggttcagaagtcaacttattgagaacacatgtgtgaaggaagcagaaaaattggagcaagtaaaataaagtagaaaatggagccaagggtctgggagaaagcagcgatacccaatctagggagttttctctatagcagtagggtttataatgctgggtttctgggttgtgatcttggaggtactctctatggcatggtcagatatcctgtcctggaggaaactgttcagggttttgacaagctaatgtaatggaggcaagtgtcccaagaaaccctgcatggggacaggttcagatcccaccccattcccgccagatgacagtccacttagccctgaagggcagcaaggtattcaaataagctatgctaattaggttatcaaccatccatcctgatttgcccagaactttcctggttgtagcactgcaactctgccctcccccgccacctccacaacccattctggaaaagacctcagtcctgggtaaactgagatggttagtcactcgaactaagctggtcatcctatcaatctgaaactcatatacaaatgggagagattttgaagttgcttaggtatttatacccttttcctgtgcactgggcactacagcagttggcaccaaaaaatagaatctctctaagatgctttgccccaagaaaatggggctgtgagacactgtgggctaagaatctcaattcccttctgtcccacacaataacaaaggtccgtagccgggagtttctagggacgagaaaataactctcctggccccgaacccagtcctcattgactgaagaagaacatttgaccattttatttgtctccatttcctttccttttcagattgcagtgtatggtctaaatgtagagtagtatctaaagttcccaaacatggccatatgtccaaatttcctaaggagctaaataaatacaaattcctaaaccctacctggggaccacagaaggaggatcttcaaagatgctcctacaaatacctccagtgcattgagatgtttgctgggtttttaaaattttttattattttattttatttttccataagttactggggtacaagtggtatttggttacatgagtaagttctttagtggtgatgagattttggtgcacccatcacccgagcagtatacactgcaccatatttgtagtcttttagccctcacccctctcccactcttccccgcaagtccccaaagtccattgtatcattcttatgcttttgagtcctcaaagcttagctcccacatatcagtgagaacatacgatgtttggttttccattactgagttacttcacttagaataatagtctccaatctcatacaggtcactgcaaatgctgttaattcattccttattatggctgagtagtagtattccatcatatatatatatatatatatatatatatatatatatatatatatatatataccacagtttctttatccactcgttgattgatgggcatttgggttggttccacagttttataattgtgaattgtgctgctataaacatgtgtgtgcaagtatcttttttgaataatgacttcttttcctctgggtagatacccagtagtgggattgctggatcaaatggtggttctatttttagttctttaaggaatctccacactgttttacatagtggttgtagcagtttacattcccgtcagcagtatagaagtgtcccctgatcactgcatccacgccaacatctactgttttatgattttttgattacggccattcttgcaggagtaaggtggtatcgcattgtggttttgatttgcatttccctgatcaagaggtttgctggtttaatgtgattctgttgctagaaaattttctcctaataatgacttgagccctcctactcagtagacaaccaccagagcctgtaggatgttatcaggaagtggcatgtggtattgtacattttttctttttaaaaacttgtttttggtcaatggaagggaagaagatgctcgttcattgatgggcatttgggttggttccatgattttgcaattgtgaattgtgctactataaacatgcatgtgcaagtatcttttctaaataatgacttcttttcctctgggtagatacccagtagtgggattgctggatcaaatggtagttctacttttagttctttaaggaatcttaaagtgtcctagttgttttattaaacaaaattaaatctgtgtgaagttaccaatccaatcaacacatgaaaattccaggggattccaatgctgaacaattgatccaagccccataatttccctcccttgcccatcctgtgccccttgccctgttcatggctcccccctcactcaaagattggtctctgatcctggtgttctgattctctcttcccacaatcagtcggaagatcataataaagaattttgacattcccaagtcagtacgtccaaatgacgaagtcactgcagtgcttgcagttcaaacagaattgaaagaatgcatggtggtaagtagaggactgggggcgtgacttcaaaagataattcaactccttgattataaacataatttaatctctcactttaataatgtacagtgtacttaatgaaacattctcacttatgttatgctacttgagactcagaacaactgtgggagcttgggacagatgacttctcattttccagatgaagaagttcgaatccagagaagtctaggataaataagaaggaaaggaagaaggaataggaagtgagaaagagggaaaaagaaaaaagtgtaagagctagtagagaagcagttagagtccttccaaggtcctgagcatgtttagtttaggatggagggaggggagttctcagaagagaaagcagcaactccacaccataggttgaggtgggtgggcagaagaggacatgcaggatatgactcctcctctccagtaagcactgagcgactctactgtcctcttgccttcttctgctcctttgctctgggtcaccagaagtggactcttgttccagcctccccaccctgacaaggagctcgtaatcatctcctccttttccccacgttcagaagtccaatctctgaacaaggtcagaggttttcaaatggtaatgtgtctaaaactcactcggggatcttgttaaaattcagagtttcattcagcaggtctggggagagattagaacttctggattttaacagacgcccaaggtacaccaaggctgtgcccaaaggatcacatttttgagcagcttgggattagagcattatccctcctgtctagctgccaagggccagaagtcaaatagacttatgcagttattaatccacagtgactcttccctgggacactggttgtgtgtccttttcctagtcattgatctcagatgtcacaagcatgcaaactgcccccactacctttgttctagggccaagacccatgcatctcccatctcccctactccctccccagacccttcatgaaggacaccttctatcaggcagcacaagtatttccttacaacataagtttcctaattcaaatgagacttaaggacaatgattacatgtaaaacaacattgagaacatgaagattgctattcagtcaactgcattctagaaatatccccacacctgtaaagaaaaattcctggtcaatgagcaaagaatatcacagctgctttgtcaaatttttctattttcagtccaagaatctgagacatgtacactaatttggggtaggagcaaggctgaatcataatttttcaactctgtattttgtttatcacaaacacaggtgagaatgagaataagaacatgtacataatgtgtacataaaatttttgtgaaaatggtggtttctggtggtaatagttaatggtagtggtaggtataataagatatgtttgaatcaataaaattacatgtgacataattttgtgcttttgtgattaataaaagtatgcttttaagaatcatgctagtactctaaaataaagcaatcttttcaaaacccacctaagcacaactaaaagaataagaaatctttagactaactgactttgcaaactagaaataatttacaggaaaggaaattttgttaattctagtcaacaaatttttatttgtggcttcatttttcaaagtataactatttttaaatttttattaaaatatatttatataactataaaattcttaccatctaatcctcattttttatcatttataatgttttctgtaactgaatttttgaaaaagtgaggtttagactcatatttatttattttagaattagaatagaatatacctacaatcgtatatttgaatataaagattgcataatcctttaaagctgaaggaaacttgtggcaaaaacaatgcttaaacatttttgtgctacaggccatttcgttggtttcatgaagtttatgaaacatttatcagaaaattgcttctaaatgtataaagtgcattggattacagagagaaactaccacattgagtaacagtgactaacttgtaaaaaataaatttgtgatgcagtaaggtatgtgtttctttatgcacacattagctgggaaagcaatacatttaaaatatagaagagttgaattttattctatgaacacattatctgtgtgatggatgttgttacttagcttgaagaagtacattaaactgcactggtctttggcaacacgtcccacgtgccatgctaggcatgcaacggattctgatcttttattgtacaagtggtgtaaattctgattcatgacgatatgttgttgctaatgtaacagaaaggtaaacaaggccgggcacagtggcttgtgcctgtaatcccagcactttgggaggccaaagtgggcagatcacctgaggtcaggagttcgagaccagcttggccaacatggtgaaaccctgtctctactaaaaatacaaaaattagccagggctggtagcacgcacctgtaatcccagctactcaggaggctgaggcagaagaatcacttgaacctgggaggcggaggttgcagtgagccacgttcgcaccattgcactccagcctgggcaacagagtgagactctgtctcttagaaaaaaaaaaaaaagggaaacaaggcacaggtagtcttctccaaagaaacgccaggattctccaaggcattctgagtaaaactccaagggtgagaacacctgaatttactgtttaggtctgaacggctacttgatgctgagttgccaggtagctgagcaagctgcaggaggtgggcagaatggcactgggcctcagtcgtgaccatgagccagtctgataactgccatacattcaaggtagtacattcaggctgtatttcggacctctggatccgtgcaatgatatgtacatatctacttttctccttgtgataaaatcacacatactgctaatggcactgtggttccttgatgacattcataacagaaggaatgctgaatttcaattagaggttagtaataaagatgcatatttttcccctgcctgagtccacagactcactgaatgctatccacagatccctctgggtctatggaccccaggataaaactgctgtgttaaacgttaactggacaaaatcctctgactccactgaaatttatatatacaataatctgggatcttgaattgcaaagcactcaagttaaaaagaaatttacattcaagatgttatttgcttatctaacagccaggtttggtagttaattgtttccacctcatacctgaggaaagtgagagtgagaggcctctcatcaccaaaggtcaccaagtcagagaggagcacagatggggcttggtcacagctctgacaacaaggcctgacattggctcctacacgcaagtggccaggctgctgtctcaccaggtctcagagtaaacgtgattgcaggtcgattcctgaaacctctggctggtgactaaggcaagcctgctcctcagctggacagctgccctggatgagctctccttgccctgtggattcacttgcatccctatctcctcctgagcttctccacactgctaaggcaggagtttgagggcattggaagggaaaaccttctgacctagactttggctcctgaaatgatactacaacagtagactcccccttgccctaggcccacctccacccccactcttctcctccggcttttccctctcctatttttccctcccttacccattccccaaaataacaatgaattccccctcccaccttctcctcaccaggttaaaacttacctcattagcagcatccctctacaaggtgcatttaactataagtatactgcctgcctatgtgacgacaatccaaaaaccttctactgggacttttacaccaacagtaagtacagaagttgtccaaggagggaactacccaccagccaccagggaggagaaactataaacagaaacatggctgcgaaccgagcaggaccaggacctcagggcagaaggacagaagggagggagggaagagcatggggagagcagatggggaaagcacccaggttctaagacagaggcattgagtgcaaaaagttgatacaggagacaaatttgcaaaggatttggggaaactgaaccccagggggcagatgcctgatatgagtagaaaagacaggacatggccggggtgtctgagagatgatctccgtccctgtctttttcaggaactgtgcaaattgcagccgtcgttgatgttattcgggaattaggcatctgccctgatgatgctgctgtaatccccatcaaaaacaaccggttttatactattgaaatcctaaaggtagaataatggaagccctgtctgtttgccacacccaggtgatttcctctaaagaaacttggctggaatttctgctgtggtctataaaataaacttcttaacatgcttctccatgttctgttgtatctccaaaatctgctcctgaagaaccccagattacctgaaatttctagaacatttgtctttcaaagaacctttactgaggagattgtacgggttctcactgcccattggtatgaagagggagagaagaagaaactgggaagaggagctatgctcacagagaggaaaagcagtggccctaaagttcacggcacaggagtggcagagccagggcaggcaccaagcctccctgttgcttgacctctctccatcccactgccctccagcaacagctcagatcccagaagacaggagtcctgttgcatgcagcagagtcagggatggagtccatggccccctaaatgagcagtagcattctatgctattctgttgcttgttttcaatggattgtgacactcagggatatcagggtcctgtgcagctctgcctgaggagctcaggcataatagaggagtaaaggggcagagggagccctgaggggcttcatcccagagggccagcccatagaagtggaatatgagcaaggatcaggtgcacgaagtgggcagagggcattctagtagataggacgcaggcaccaagagcccaaagcatgaaatagtggcttgctcagggcaggtaaacactttcatattgggcaggattaagtatacatggaagagttagaagcagatctggcaagaggacaggagcaaaatcaggagaggccgagtgaatctgggcaagaaagtgggaccatatcccctaggccagtgatcctaaatgagaatcaaaatccagggcggaaaatacagtcattggaaaagatcattttttatattaattaggattgtaacattgtgaaacaggagagttacctgacctccctcgcagaacatgcaacaggggtgtcactcatctgttcagctgctcaaaccccttagaggaggaggagcacgcagacggacaggtgcaggagggcaagtgggagtgtgttaaaatgcgctcttttagccttgctgtctacggacagtttaagtgttaaccagctcagtggaccctctgcctttttgcaaaggcagagggctactgtgacagctttctgcatcccaagttcttgtccagcatcccggaagaattgggtcacacatgaactggaaggatggtgaatgcagggttttattgggtggtggaggtggctctcagtgggatggatggggagccggccagggaatggagtaggaagatgatcttcccctggagtttggctgtccagtggctgattctccgtccatccccagccgaactcctccttacattcagacactccttcccttctctccttctctgctgcgctattctgccatttgtctcctcatctgctcatctccttctggagcctggggttcagggtttatatggataccagatgggggcatggcgggccaaaaggcaattttttaggcgcaaaaacaggaatgcctgttctcatttagggccgcaggtttccaggtttgagggtggggcctttgccagggaacagccctcttctacccagtatttctctgtctcctgtccatatcaattgattatatgcttaacaggtaccaaaaatgtgaataattttatttacatgctttatcacatgccctatttaaaacaataacagacattaaatatttattcactcaataaatatttatcaagtacctacatgtgccattacctgctttcagcacttggttttacataagtaaatcaggaattttttatcctgttcttaaaatgcttatattgttcccaggcaatagaaaataaacatgtacatgttattcttacctttatttatgggaaaactgagataagagaaggtaattaatttgcacatagccagcaagtgacagagccaagattcgaaccacacaggtagcctggagagacatgctcctaacttctttttatttttgtttttttttttttttttgagacggagtcttgcactgtcacccagactggagtgcagtggcgcgatctcggctcactgcaagctccgcctcccaggttcacgccattctcctgcctcagcctcccgagtagctgggactacaggcgcctgccactacacctggctaattttttgtatttttagtagagacggggtttcaccgtgttagccaggttggtctcgatctcctgacctcgtgatccatccacctcggcctcccaaagagctgggattacaggcgtgagccaccacacccagcccatgctcctaacttctatactacttgcacatacttcccaacagtctcctttaggcccctgcaaagtgtctaccaaaaagcatttcaaaattgcaaattttatttcctctatgaattatgtgaacacctatatccacctagattttgttttgttttgttttgttttttgagacagtgtctcactctttgacccaggctgcagtgcagtggtgtgataactgctcactgcagccacaacctcctgggctcaagtgatcctcacacctcagcctccagagtagctgagactacaggcaagcaccacctcacctggctaatttttttaaaaactttttgtagagattgggcagggggagcctcactatgttgcctagggtggtctcaaactcctgtcctcaagtgatcctcctgcttctacctcccaaagtgctgggattacaagcgtgagccacccatgcccagcctagaatttttgattacctagagtagactgttcagtagaaatattcattgaaggccgggcccggtggctcacgcctgtaatcccagcactttgggaggccgaggcgggcggatcacgaggtcaggagatcgagaccatcctagctaacacggtgaaaccccgtctctactagaaatacaaaaaattagccgggcgtggtggcgggcgcctgtagtcccagctactcgggaggctgaggcaggagaatggcgtgaacccgggaggcggagcttgcagtgagccgagatcgcgccactgcactccagcctgggcgacagagcaagactccgtctcaaaaaaaaaaaaaaaaaaaagaaatattcattgaaatatattttaagctacatgtgtaattttgatagccacatttaaataaaaagaaaagggaaacaggtgaaattaagttaataacatattttatttagctgaatatatcctaaattcatttataagatctaattaatattttttaaattgttaatgaaatagtttacattcgtttattcttagtaagtctttgaaatctgttgggtgctttatacttacaaaacacctaagtcaggctagcctcatttctgaaactcaatggctacatgtagccagtggctaccatattagatggggaacttatgggatgggtcaataggttcagtgaggggagagaacttagaggacacgtcaataggtgcagcaaagcaccatggcacacgcatacctatgtagcaaacctgcacgttctgcacatgcattctgggtttttttttttagaagaaataaagaaaaataaaaattaaagaaaaaactagtaaaaaaataacaaattcagccaggtatagtggcacacacttgaagttctagctactcaggaggttgtggaaaaacaacaacaacaactttgggcactttgactcttccttgttccaaataagagactatgcctgccatgattgcctggtcgatatgttttcatccttttagaataacatgtaaagccttcaaatgctccgcaaatataacagttgcccaataaatgctttgtttaattatgtgaattaattaaggctgagaaatacatcataatgagttaaattttataaggttgatagtcctgctacagaattggtaacagctagtttcaccctgtattatcatttgcttcctatagctctcagccagacattttccatttcaggggaaagtttactgagtgcgtgtgacagggaatatttatgaaagaaatcaagtttttccaaagtaactcctataataaaatgtgtttacatttgttgggagcaacattaaatagcatctgtatgtggagaggcctggaaagaagaagactgaggagtttcggataaacaaaaaacaatgtcagtgccgggcacggtggctcacacctgtagtcccagctacttgggaggctgaggcaggagaatcgcttgaacccaggaggcggaggttgcagggagccaagctcatgccactgcactccagcctgggctacagagtgatcctctgtcaaaaaaaaaacaaaaacaaacaaacaaaaaaaacccaccaaaatacaggaaaaaggaaaacaaataaaaaacctcaaatataaaacagttactaggagagagaaaaccttaatttttattcatccaagacataaaagtgatagagatgaagcaaagaatattgaatgaatcaatgactactgtagaatcataaggagagataactagtgatgacttgcatttctgggtgaatggtcaatgactcgagaaatagatatatgggaaacttctggaaggatttgtaagaaattaattactgtgatcatctgatagaattaagacatagatggcttctatttttcaagtagtagtcctctatacattatttcattattttattttataaaaaataaagttaacccaaaaattaatgagaaatgctaaaactgaaaaacacaataactgcaattaagaacccaataaacggtttttaatagcaactcagacaaagccaaggagtgaactacacagttaattacaaagaaaagaaagatgaataacacagaaaatagagttagagacatacgggataattggaagggagataaaagacttgcaataagcttctcaaaaggagaggcgacaatgattggaaaagaagtaatattggaagatataatgacttagaattttcctaaactgacaaaagacatcaaaccacaaatatagaaagaacttgaacttgaaccaggataaatgcaaagaaaattacgtttaacacatcatatcacgtgcaccattttattttcaaatggtagcaatacgagtgatagctgacctgaaaaacagaaacaatgtgagccaggaaaaaatacgatgatatcctcaaagggctgaaaaaaaaccctgctgatctggagtttatgtcagtgaaaatacagataaaaatgtctttaaatattaagaaccttcaagaaaattctgtacttaaattatttactttaactcatacaatatgtgaactcagtagttttcacatttttttcttcattccttgcataatttataagaatgtaatttatgagtatttaagactcttaaatcttacagatgttgtgaacatattaaaacaggccaaataattaataatcttatttgaaacaattaaaattgatcacttccatattagtaagctttatttaaagaatattgaaatattgctttgaatcagttatttctgtcttggaacaaatttctaaaaccaacttgagaggacacagccaaaagtctaactgaaagaaaaaaaaaatcacctgagcaaatgagaagatacttgacttcgctcttaatcagaactgtgaaaatctaaactatactgaaatgtttttcacctaattgaaaaaagacacataaaaataataatgctttctgttgctgagactgtgggaaaataggtctttcaaacatttctcataggtgtgaaaaactagtataacactgcaaagaccaatctggtaaaacccatcaaatttgcaagtatatttctccttagtccagcaattctaattctgggaatttatcctacagataaacctacgagcatgcaaaattatgtatgaaaaatgttattcattacagcttatttgcaattgtaaacgtttagaaagagtcagtgtctaccaataaaaaaaactgcttaaattaattctggttcatatacacaaccgaataaatacacatggctttaaaaagattgaaggcactctgatgtactaaattgaaatttcttcaatcacagtgtcaaatgaaactagtgagtcatagaacattatatgataaattttgtgatggaaattaaagaacataatagtatttattgtataactgtacactgatgtaaagaaatactaggtcaggcgtggtggctcacgcctgtaatcccagcactttgggaggctggggcgagtggatcaccaggtccagagtttgagaccagcctggccaagatggtgaaaccccgtctctactaaaaaaacaaatattagccaggcatggtggcaggcacagcagtgcactctagcccaggtgacagagcatgactttgtctcaaaaataataataataatatttttgaataagtaataaatgaatggaaggaagggagggaggaaaggagaagagaaattagtttaatgagtttgaaaaacatagggataaatagcagagtaatccaagtaagagaagacctgctgcatagcacctggtatttgggagctggccctctcaatgcatggtgaatcttgtagaaaattcaaaatgaatggatggaagcagccctccctggtcttgctgtcaccttaaggcatctcaaggaccttgttagtttcagcactctagttctctggaaagactctacaggggtaagagcacagctgtcccaactcatccacccttggacttcacctcgccatctgatatggttctcccacttggatgttaggtgggcaattccatgggttctctagtcgtcttagctttctaagacgttcttaagaccacatgttctcctgcagatgactagagatgatcacagggtccttcaaagatggattctgacaactgccccaacatctgaatttccagcaagaggaagcaggctgagcagtaaccaaagctagaaaaatggagacctgggacaacaggacctttcctaagaagcttcaggattgcagctcccacacatataatttaaacccaagcccccttagaggggccaatacacagaaaggtcttgcttactgacagtatcttaagaaatagataccaaaaatatctggtctaccctcttctcatctgattttttcctatttctgaggcttgaattctcatgaaacatactctatactctatagagggctatcatttcttacagaagactcattgtacctgaagatgcaaaccaggagggctgagtaggaacattagtgtcaagtcattcactcaactagagtaaaatttagagttgaagtaactggcattggtagaaagataagacaccatgtcatctagaggacaaaaagataagaatatacatttcatagatcctacagacccagagcaagtattgggaaatagaagtgaaaaagatgctgtttagaaaagttaaggcagaatccatcctgctgttccaggaacattctaatctgatattggcaaacaagggaaaacaactgaactaattctttcctcattccattccaatgtaaaattccagctgaatgttgacatttctccaagaaaaaaattcatggtggtaattagggaagtttcaaggtctgatgattttggttgagtggcctgcccaaatgtcacaatgttctcttgctgtagttatgaagaataatttgggtgcctgggtgcacagttctctgggcatcaaatttctccagcatgcatgctcttcagattctgttcaagccctgtcttgttgccctgctcctggttctctgcctgaggctggggaccagcatagctcaggaagaattgtaagccaccactttctccttgttgcagaaaatcttccaacggggacacatctcccaacccagaaatcaatatggtgcccctagggattattttaccactccaaaggggacacattctgggtattctcactaaagatgtctcttagtctcactcttttcctattcagatcctattgtgggggttactgcattcatgtcttattactacttgtattttaattcatttttctatcctaagtttatcattggcatcattttctcctaaatgaaaagcatgggcagagatgtgggcttaatcaatacctgtgggatgagctttggataagatgcctgagctgcaagagaggggccatggccctggtctttactggggttacaaggttgtgctgaccactaactcatacaattggtctcattggaaacagtgctctctatctcattaagatctgtgtcatacactggggctgggacctacaagacctgagcaggtttctctaagtaaggaaaaagtagaaacatgctcctggactccaccttttcctggatttgttcctaaatgcaacatgtccttgcataaatgcgacacagctggtctccaggtctatactgatttgccaaaacggaggaaaagaaatgacagattccagttccttaagtggaaaggagaacattgaaacgggactctgtcccttggcaagagcaaagtactaagatccagaatgaagccagcaggtccttaggagacatggacgtgtagcagacagaatgtggagaaaggagtatctagcagatggaaatggagccatggagattttggtgaagaaggggttcttgccaagcctggatgtttctctaaggagaagagaagcaaagaggatgtgggggtggatatatggagtaacacaaaatgtgtgtgtgctgggttttggttgactaaacttctacttagtttcccctctacttagtgagttggacaaagttgaactatgttgatcattatgttaaactttaattcattggtgtgatatgtttatcagactcatagaatttcttatccttctactagttataccagtataagaaaatgaactttcatggatttggggatgattccataagaaaaatcaaaaggagaatctcaggctaaagtagaccatgcaaccaaatcacttcctgcttcaaacaacatggtggagattcaactgagtatccatgatgaaggaaaagcagtccctcagtctggctccctgccctcatcagtccaccaggaatatgacctcttttcctctggcctccatttccccttcctatcagataggggcatcttggctggacacacagagcccacaggcacaagtcatgcacagaggatccttatgagtgacagcattgacttatgtgcttcctcactccctgcacccctctgttcactctgtcctcctgcttccattctccctcctgggacacccctgtcctacactttccctgactttgggtttctccttcttttggcatatacagacagaacataatttttctgagcatgacaatccctgaatctgtaaagccagaggaaatatttttgctaacactcatggttacaaataacaataggtataaatatgtggaggtaactgaagaattggagggaaggttggtgggaaagagaagagaaatatcacaataaagaacattggtcgtcattactgattgtatgtgaaacagtttaacatcttgccaaatgcttcacctacacatgattttgtgtacattagccttgaacctcagaacaactctgttaggaatgtacatgttatcaattccattttgaagttgaagaaattgtgttatgaaaaagatgaatgagtggaggcttttaaccatagggtcaggactctaattcatgaggggagggtagcagtggggagattaggaagaggaaaaaaaagaaatgagaggaaagcaatccaaatgcagatgaaaagaaagatggacagagaaacacaaatcaaaaccacaatgagataccatcttacaccagtaagaatggctactactaaaaagtcaaaaaataacagaagctagtgaagctgcagagaaaagggaatgtttacacacttttcatgggaatgtaaattggttcagccactttgaaaagcagtttgaagatttctcaaagaacttaaaattgagccaccattcaacccagcaatcccattactgggtacataccgaaaggaaaatagaccattacaccaaatggccacttgatatgttcaccaccatgctattcacaatattaaagacatggaatcaactaagcgcccattgatggtggattggataaagaaaatgtggcacatagacaccatggaatactatgcagccataaaaaataaaatcattttctttgctgcagtgtggatggaactggagaccataattctaagcaaattaatgaaagaacagaaaaccaaatattgcctgttctcacttataagtagtagctaaacattgagcacccatggacataaacaagaaaacagacaatgcagactgctagagggagggagggcaaaagggaggaatgggtcaaaaaactacctattgggtactatgctcactacctggatgcaaaatacccatgtaacaaatctgctcatatacccctgtatctaaaatgaaagctaaaaaaaaaaaaaaaaaaaaaaaaaaaaaaaaaaagatggattagactgagtgacaatgctcagagacttctattggaaccatgttcccacccacccctactcgccccaaccagcccatgcagcgatgaggatgaacctaggagacccagctcaacaggctgtggcagatgtaacagaagcttcagggatgtggtcattgtgatctctctcaaaattgagagacttaccatcacacaagaactggctatatatatacatacacatacacacacacacacacacacacacatacacatatatatatatatactttatgttctggggtacatatgcagaatgtgcagttttgttacatagttacacacatgccatggtggtttgctgcacccatcaacctgtcacctacattaggtatttctcctcatgctatctgtcccttagcccccctccccctgacagggcctggtgtgtgatgttcccctccctgtgtccatgtgttctcattgttgaactcccacttatgagtgagaacatgcggtgtttggttttctgttcttctgttagtttgctgagaatgatggtttccagcttcatcgatgttcctgcaaaggacatgaactcatccttttttatggctgcatagtattccatggtgtatgtgtgccacattttctttaaccagtctatcattgatttgcgttggctccaagtctattgtgaatatcattcatttgcattggctccaagtctattgtgaatagacatacgtgtacatgtgtctttatagtagaacgatttatacttctttgggcatataccgagtaatgggattgctgggccaaatggtatttctagttttagatccttgaggaattaccacactgccttccacaatggttgaactaatttacactcccaccaacactgtacaaccattcctatttttccacatcccctccagcatctgttgtttcctgaccttttaatgatcaccattctaactggtgagagatggtatctcattgcggttttgatttgcatttccttaatgaccagtgatgatgagctttttttcatgtttgttggctgcataattgtcttcttttgagaagtgtctgttcatctcctttgcccacttttttatggggtttcttgtttttttcttgtaaagttgtttaagttctttgtagattctggatatcagtcctttgtcagacggatagatggcaaaacttttctcccattctgtaggttgcctaagaactggcttttttgaagtcatgtcctccatttcctttccctgctctcttcactgagcattcagaacccctaaacccttctgctttgccatctttgataccagtccccagttccttcaaggtttctttaggctttttggaaagcagatgcaaacagatgggaaaattgcagagttactaagaaccctaagagaaatacaaatagtacttaacacttatgacatttatcgaaatatggtgacagtagaaatgcctctgagaagccccttctccagaggtcttctttggtactgtctcaggaagacatcggatattttttcttccctagtctggcctcagcagatttcttcttccgtcttcagaaactcagtcagtgtttaactaaaagttttataatttgattggcagaagaaaaataagtgctaaatactactcagtcaaatgctttcagaatccaagtgtgtttatttgcacaataaacatggtactttacattctgaaagctctaacattcgcaaagcactcatgagctcatacgaaggagacaggtgagtatccatgcttccatctcgcaaatgtcatgttacaaagcaggaaagcaggacaggtgagatgataaactctgtttttgtttgtttggtgggttgtttttgtttctgtttattcaccacaccagagtagacaaactaatgtctccaatctccatataacttcctcttggttcagtgagcagttaattaaaataatttcctactaactccaatttggagaacctcagctctaggctggatgaaaggcaactgatgcctaaatgcagtccaacactggtgcccttttactccttcaagtactgaaataaagagtccatttcactaataagctgatgagttaaatgctagctggacccagacaggtgtgtttacccctgcttcttgaaacagaaacaaatgtgacatgtgacttccctaaaccaaacgtttaaatttgagttgtttgccatgccaaagaaaacattgttggctgggtgtggtggctcacacctataatcccagcactttggaaggccgaggcaggaggattgcttgagcccaggaattcaagaccagcctgggcaacatgacaaaactctatctctacaaaagaaaatttaaaaatggctgggtgtaatggcgtgcgcctatagtcccaactacagtgggggccgaggtgggaggattgcttgagccctggaggtcaaggctgcagtaaggagtaatcatgccactgtactctagcctaggtgacagagggagacccaggctcaaaaaaaaaaaaaaaggaaaagattgtttttaacaatgcagttaggccaggcgtggtatcttatgcctgtaatcccagcactttgggaggccaaggcaggaggacccgcctggccaacttggagaaaccctatctttactaaaaaaaaaatacaaaaattaactggacgtggtggtgggcacctgtaatcccagctacttgggaggctgaggcaggagaatcgcttgaaccaggaagtggagcttgcagtgagccgagatcgtgacattgcactccagcctgggcaacaagagtgaaacccatctcaaaaaaaaggaaaaacaaacaaacaaacaaaataaaaaaacaacaatgcagataaagttgagcgtggtatataatgacaattttttttaagttgcctatgatcaagtgtagcagtgaatgtataaagagtataacagctggagaatagtccctgagtgtccccttcacctgggcctaatgcttaacccagggctgcctcagccagatctacactctctctaacccttctccccattcctctcctcagattaaaaccagtattgaggccaatccaagcattagctgctcttacagtcgttttatttacactgtgtgtgtggtagacaaaagttctactgggaactaacaactccgtccagtaagtgaggacacttcctgcctgaacataagtatccagattagggggagtgctaggagaggtcacagtaaaaagggaaaagcaggaggtggcagaaagcaaaggagcagagtattgcaataagagcgagacacaagacaggcaggcagtgtgggcaggggctcaacgtgagagcagggagattgggcaacaactgctgtgccttgtgtataagactaagcagtgggagctgagttccagaggcagtgaaaggggggataaggtgtgcggtgggtggagcttaagtgagaagaccagaagtgaagtggtgtggagcccagtggtctatcactcttctgattcctctccccggaagatataaacaatagaagagatgctgaagttatgtcagatgaagatatgggccatcctaatgaggaactggacaagacaaccggttactacacattcgtggagagcactgtcatcctaaccctgcactggaaagtcggctctgacttcccacccctagaaggtctcctttttaggagaaccatccctgagtttgagggtatctgggtggatggtaacataaacttcctgcaacttctcagcatcccctctatgtcttttccccaaaaacttacttccgtaactgcccagatatcccaagaattc

SEQ ID NO: 91 - DNA, 179597 bp, Homo sapiens
gaattcactacttggaaagtaagatgttctgtttctcattacatacaaaaaaaaaaagttgataaaatcacagaattcagtttgagagagaggaagatactaaatgtcatttgtcattctgaccttgaagtcacattgagtccaattcaatcagaaaagtgcaagtgaaaatttggatttttaatgagacaccaggactagaaatactgacttcaggggtcatccgcagagagaaaatagttgaaatgtttggaatggatgagatctccaaagcaacaagtgaagaaaaaggaacaaaggtccaaaaataaaaactgttgaacatccacacttataggtaaaaggaggggaaaagtaagcttaagaaattaagaaagtagttctagagggaagacaagaaatgggatggtatcttggaagttcagaggagactgtgggtacaaagaggtggcagcaggatttaaaagaactttaaaaattcagtaaaattaggactgaatgacttcaccgatgttgttgactagaggaggagaaagtagcagattcagagcactcatttgacaagtttaggggcagagcgagtaagggagaggttaaagggaatggtagagttgaatacagtcttttattccaacgtatttatagtctgattatatagaaagccaagaggaagaactatataaagacaggaaaattgaagatgctaaagaaagaagatatttgagaaacaaagaggcatgtggattaattattggacatcaagaagggggaacttttttcctctgaaataggaaaagaagagaaaatgcgtaaaagatagacctgcactgaggaaggccaacatacatacagaaagaggctagatctaatgatcggttgaatgtaatgtttttaaaaacccaccatttcacccatcagattggcataattaaaagaatcaatagtatctgatgttggcaagcatgtagggaaataacatgctctcatgcacagctggaaagtaaactgcaacagtctttatggagggtaatttggcagtgtttattgaaactccacatggccgggcgcaggggctcacgcctgtaatcccagcattttaggaggccaaggcgggtggatcacaaggtcaagagatcgagacgatcctggccaacatggtgaaaccccgtctctattaaaaaaaaaacacaaacattagctgggcattgtggcacgtgcctgtcgtcccagctactcgggaggctgaggcaggagaattgcttgaacccgtgaggtggaggttgcagtgagacgagatcatgccactgcactccagcccggcgacagtgcaagactccgtatcgaaaaacaaacaaacaaaaaaacacaaaaaaaaacaaaaactgcacataacatttgactcaacaacttacttctcagaaacaattccataaaaatacatgcataggtgggcagaaaattttgccaggacttctgttatagccttataaagggcaaagtataggcaatatgtaaatatccatcagtagagaattggacagataaatatccataacatacattttaacaacagttaaaatgaacgaaatagaacaagatgtggtaacatggaaatatccccaaggtatgttgttcagtgaaaaaagtaagttgccaagtaatatgtacaaagcaatatggtttatatcaaaacacattcaaaacatacacaaagcagttagcatacacgtgtgtgtatatatgtgtgtgtgtgtgtgtatatatatatatgtatatgcccacacacacacatatatatgtatgtgcccacacacacatatatatatgtatgtgcccacacacacacatatatatatgtatgtgcccacacacacatatatatatatgtatgtgcccacacacacatatatatatgtatgtgcccacacacacacatatatatatatgtatgtgcccacacacacatacacacagatacacattcattcatttaaccaagagtaatggggtgccaactatccatttccatgaagtttattttagtagagaatgcaaatacgtagagagaaaaaggaccggaaaatgcacacaagattgataataatggttatttctggaaaagacagcaagaaagagaagtgtcaagataatctttgatctgcagtgtttatatttttgaggtacatgtatttttagactatgtattgagaaccaccaattatgagtccaacttgcactccattttacttatttgagaaggtaaataagagaattcagaacattaggctcaaactccaattcctttgcttcagtctatagtaaatacctattgagaatagcaccaaaaagcagtcagaatgagaggaaagaaaaagaagcaatgatgtgaatggatgatcccagaaagagtgatactatgtggattgaatatgctggaaattttttttaaatgtcaagaaagacctgtcttgtgagacaaaggcatgcagtttttgtcccatgtggtgtaagatttaagatctaaagggttactcaatagataggctgtcctcataaataaaggccagagagagagaaacgagaaaagaacattaatcagttactgcatcatctttggatgtgaaaataggtcaacagagaatgttaagtcatagatttcaaggggtctgtagacattaaaggcaaagacctcaaagaatgacaagcagagatagggtggtagagatggccaaaagcatatgagtcccccaccacccaccagggcctgtcctgcagtgttggttttggagagcccattggtagagaaaagtagaaattttagtatccaaagagaaaaatcatggtttagatagggcaaggatgtgaatctagaaagacactgaggaaacaagagaacagcgtatacaacatagcagacattaactgcataatgtgattcacaatagggatgagactggatgtgaccaacaggatggctcaaaggaaccaagtcaaaacagccaggatgggggtccagtgcactgcctctgggagtggttaattgggataatggaaacattggggcagcgaaaagaggaaccattcagaggaaagtcagaatgaggactgaggtgtctggttgctctcactcccagagcaagatacatcaaagaaggaaaatcaaattcaaggagcaagaggtcagcatacgtgtgcacaaacacaaacacacacacccctacatacacacacatacacacatgcacacacatgcacactttcatacatgcaccctaagattccaaatgtaaggattgcactgagtcataccagcagcaacaatcacttgacctgtcagggatgtttatttgtgactatattatgaagagaagtgaggatgtgagaaagttttacttcatatctctgcttaaaatcctgctgtgctctgttaaaagtaatgtgctatattataattgaatggtcactgactaagggatgttgagacaaaagaaatgtggaaaaaaatttaggaaagtaaggagttacgaaagaggtgttttatgaaaaacaacaaagtttatgtgcaaattgaaaataaatgacaaagaaagtcccaaatcagttttgaaattagtagaccagcctggccatcatagtgaaaccccatctctactaaaaatacaaaaattagctgggcatggtggtgcgtgcctgtaatcccagctactcggaaggctgaggcaggagaatcccttgaacccgggaggtggaggttgccgtgagccaagatcgcaccactgcactccagcctggcaacagagagactccctctcaaaaaataaataaataaataaatacataaagaaaaaagaaaaaattagtagactaaagagacataaaggatggataatttcttttattcttaacagataacatattatattatgaatatttgctgtgtccaggtgccatctagttgtttttaacattatcacccttaaaataaagctacataatcctgagaggcagttgttatttgtcccacttaacaaatgaaggcattgaagcttggagagactaaattacttgcccagagtcacactgcacaggcagcatctgggtccaatctaatgctgactgactatgaagctcacgtgtttaatctacacactgtattatttcccatcatacagcaagagcagcagggatttgtgtcgcaactgtgcagacactgcagtttctctgaaatctattagttcttcttgttccccaggcactgttcttagtgttgtgtgtgtttaattcaactttatcctgataaagtccctatgctgtaggtgcttatgttgtcacctctaccccacagataagaaagctgagtcagagatgagtttgaggattctgcccatggtcaacaagattagtatttgagccaagctaccaagccaggagtctgactccaaagctttcagtggtagagaaaagtagaaattttagtatccaaaaagaaaaatcatggtttagataaggcaaggatgtgaatctagaaaaacactgagaaaacaagagaatactgtgtgcaacacagcagacattaactgcataatgggatccacaatacggatgagactgggtgcaaccaacaggatggctcaaaagaaccaagtcaaaacagccaggatgggggtccagtgcactgcctctgggtgcggttaactgggataatggaagaagtgaaggatcagaagataaggattaaggaaagagaaaagaacatgtatcagttactgaatcatctctggatgccaaaataggtcgacagagactgttaagtcatagatttcaaggggtctgtagacattaaaggcaaagacctcaaagaatgacaagcagagacagggtggtagcgatggccaaaagcacgtcagtcccctaacacccaccagggcccgtcctgcggtgttagaatctgttacagagataagaaagcaaataaggagggtaaagaaacaagtgcagaggcaaatagcttgtgagacacgggcagaattcatgagatgtgctaaggatagataagtaagtttgtaaactctgggacacatatgaccagataaaatgtcatctgaatgtgccaaacatagaaaagaataaaaaaagcaaaacaaaaaaaaaaggaacagaaagaaagcagttggtacaagtgagactgaccacataggcaaagggagagaacctttggagcaggctccaactgaaggcagagtggtagacacagggaggatgagtcatgatgagaatctcattaaaggagtggcactcatcaacagggcctacaggcgggaggacacttggctcttaacacaggacattattacaaagcattagccactgtttttctagaccgaataagtaaaacaattatcatctgggagcccttgaattatatttacataaaaaataaaatcatctctttggttgattatattaggaagcattggtctaggtaaatcgttccagttcaccatgagtccatagattcattcattcccacaatgaaaggtattcatagttcattaaggtcaactcattacatttgtgggtgaaaataatgagcactaaagttgttaagcaattttcctcacttgatcagtttctcatggtctgttcaagctcaaagaaaaggttgctgtataaactagactgtcaatttataaatttaaaattccataatgaaaaatattatttccactgattctggggatggactcttcagccagcacattattttcctggagtggagacgtgtagggagacaattgataattggaggtcattttgtaagttcgggtggttcagatgatttgttacattagcctggcttaatccgctatgaatacttgaacaaaaggaattctcctgcattaaatactacttatttattcatctgtttatctatacctctatagtacaccttttatattatctaattagatcacaatgacatcctcttaactatctagaggatgaatgtaaaatttaaaaattaggcccaaaaattatagaataatggagaacttgagttgaataagtggattgattttccagatgtgcccctgctttgaccttttgtgtgaccttaagatctttgggataaaatattgactacaaggaagattttatattaagagccttattctttttcctcttctcttctttctccctctgattttcatgtcctgcagttcaccctagccagttaaataaagccatcaccaatccacagaactatcctcttcactcccatattgaacaatggggtgtcacctcccctgggaagggggacagagtttgttgggatagccataatagataattatttcgtttacttatcccttctaactaagcctcaatgctcccacataattatatcactattcatcagattcactcttaattggctgtgtacctctaagcaatattcacacttcatatatccttacatctttattctttgatcctttaaaaatccatagtatctcttgactcttcacttcacaatatgatgatattggtatcctcaaactttcctttgtttcttttatttccttccatgcaataaatttgtcatctgcacttttactttcacattgtcaaggctgataatatttacattctattaagtagcataatcaagtattttcatgccttgtctataagttgattctaaaagttgaaacaaattgtgtttacattattaggacttcataaataactgttcagcacaaggccatacagatataattacagttactctcttttataatttgatttttttcccctggaataaagttctgcttttcttaaaacagttgactttatcatatcctcaatttactttttacgctatctaccaagtaaaatattctgccgtggcaaaaacctgctatttgtccctccagtatctgttctccaatttctgctctaataaaccaaaattaaatttagcttggagagggacattcgggataaaaaaatgataaaactttttttcagatttgcttatattcaggtgcagtcattgacttagttctgatgaaggaatgtaaggttcagtgttgtgtgcaactttcactaagagtcctaaaaagaatcttttagtactgtgtgtccattctttttcccttcctctattctgctttctggtatcttagagggatagcttgcactcaaccttgggctgctattagtacttcaaggggagcaaagcagaccattgttctgggtcctagattttgatgtagctgctgcagctacttgaagtacttacactcaggcttttatgtgaacggaaaataaacttccaccttgccaaaactgccctgcagccttcgtaatggctcaagactgcctcactctgggcttctttcatgagaaaaaagaaaagaaaagaaaagaaaacaaaacaaagaaaacttttttagggggaggttgtttgagctacagttatttaacatctcttcctagcagaaaaattataacctaactgacataaactcagaaagaatatcattgttttgaacaagtgcttgactcatttacttcataaagcaatacatggaggatgttcagagtttattctgggtcacagatgtaggaaactaagtaagacacaaggacagctggagtgagtctagtgaaacatattcctaatcaaatgaattttagactggacgtcaatggaaaactatggcttcatttaactggctagggtggacttcaggacacaaaaatcagagggagaaagaagaaaggaggaaaaaaataaggcttttaatataaaattatccatgtagtcaatattttatcccaaagatcttgaggtcacagaaaaggtcaaaatggaggcacagctgaatcaatccacttattcaacccaagttctccattttcctccaatttctggacctaattttttaattttactttcacctttccatatccaagattatccctttacccacaatatcaccctacttctgctcactttattattttcaaagctctgtccttcctccctgccagcttgagatcaaaatcctcagagctcttgagtagaccagaaatctggcctctgtgtacctttgtcatattcatatatagacacagtgggagtggggggtgagtagaaaatcacttagccacagcgatggtgtacaggaaagagaggacagcagtcttatggataaattgcttacacgcagatgctcagctgaatctgtaatgaaaaggaaatctgaatgcttggccaaggagaagtaaattccctgaggtcaatcctttgttgttctctttgatcttcagtaatgggtcaatcagaccacctgccccgaagcttagatgctgtccacatgatttgcttgctgtcactgtgtcctagccagagtcttgggatttaggttactctcgcatttaagaggcctttattgggagaaaggataataatacttaacaattatactctacttatatgccacttctgtgtatttttacatatattatctaatataatcctcccaaccaacctgagatacaggcaggtggttcattttaaaaataatttatcattttaaaaataaaatacactgtatatttagtttatgataggcatgtatgaagtatatgtttaatctttacaacagcccaagacctagaccatgttttacagttgagtcaaccagggcacccagttagtaagtgctactggtatataaataaattgttaatgattttttaaaatgctaatgcctactgctgatggcctgtgagacagtagggtgtgtatttctgtagagcaatttgctatacgtacatgaagtcataaaaaagcaaatattttctgacttggcaaatttgcttcaaagaatttgatccaagaaaataattagacatctaacacctcaagtacaagaatatccactgcagagttttttaattgtgaaaaacaatactggctgggcgtgatggctcacgcctgtaatccagcaccttgggaggccgaggcaggtggatcacctgaggtcaggggttcaagaccagtctggccaacatggtgaaaccctgtctctactaaaaatataaaaattagctggacgtgatggcgcatgcctgtaatcccagctacttgggaggctgaggcaggagaatcacttgaacccaggaggcagaggttgcagtgagccgtgatcacaccactacactccagcctgggtgacagagcaagactccttcaaaaaaaaaaaagaaaaagaaagaaagaaagaaagaaagaaagaaagaaagaaagaaagaaagaaagagaaagaaagagagagagagaagaaggaaggaaggaaggaaggaaggaaggaaggaaggaaggaagaaagaaagaaagaaagaaaggaagaaagaaagaaagaaagaaagaaaaagaaagaaaatactgaaataacttaaatattcaatcagaggaaatgagtaggtaaattatagtaaattataaaatggaatatcttttatatttcaaaacttactttacaatattatttaatgatatgcaaaatagttttattggcatgaaacatcatattatgctaagtgaaaaatttaagttcaaagtcatagattgagaaaaactcatttatctcccctcactccaaaataaaagcaataaagtatagaaatatgttataggaaaaagtataaaagagaagaaaagaacataattgtcaaatactggatggagaatattaacaaaataagattttaaggccgaggcaggcagatcatgaggtcaggagattgagaccatcctggctaacacagtgaaaccctgtctctaataaaaatacaaaaaaattaaccagtcgtggtggtgggcacctgtagtcccagctactcgggaggctgagtcaggagaatcccttgaacccaggaggcggagcttgccatgagccgagattgcgccactgcactccagcctgggtgacagagcgagaatccgtctcaaaaaaataataataaataaataaataagattttatgagtttctgaaagaccggagatggctatggccaaggtgatttaatgtaaatcagagcgaaaagagactagctcaatagaggtagaagagaaagcagcaggtgaggcagggtcatttttatagcattctataagcccttagagatgtagtcaaagcatgagaaagtgcttaaagtaagacaactgattgaagaactgtatgtccaatggctgctgagtcacacatcgcacacatgagtatgtgtaaggaaagtgcctataaagtgaagctgaatgaactatcagcctaggatgggcaatggctttcagagtacaggctgccagcttgcttatcttagagtacagcctgcctgtccacataccacacccacaaacagaaatcttgcagtctttgtatgcagggaaaaggaaactactatcagaagaaatgttagtcagttacaggtaataatcaacatttctaaattcataatcatctcggacaactgagtatccgcagacatttgattaaaaagaaaagcaaaaggctctggcaaagacaattctatagatttatcaagccattttatcatcctctggggagtacagaaaaactacatttcccagtatccttacatctagattgggcctgatgaccaattctaaacaggggaatgcagtagaaacataagccacccaggtttggccagaaacacaaaatctcctacatgtgatactcctctctcactttttgcagcaataatgggaatcctagagtagtggtgctctgcatctctgagtcatcccttataggaaagttgccccggagaactctctgaccaggatgatatgcattggcctttatgtgaggtgaaagcaaaacaagaaaacttacattggattaaggcactaagaattttgagattatttgtaatagcaggtagcattaattattcttactaatatagcaaaataaaagagaaacaccaagataattaaacagaatattgaccccagaggaaacatatataattttaggaaaagacaaaaactttaattgaattataagtctaatttttcttttttaaaattttgaggctgggtgaagtggctcacacctataatctcagcactttgggaggcggagtcagggggatcacctaaggtcaggagtttaaaatcagcctgatcaacatggtgaaaccccatctctactaaatacaaaaaaaaaaaaaaattagccaggcttggtggcgcatgcctgcaatcccagctacttgggaggctgaggtaggagaattactggaacccaggaggtggaggttgccatgaactgaggtcgtgccactgcactccagcctgggcaacagagcaaaattccaactcaaaaaaaaaaaaattgagaaaacgttatatttatttatttaaaaaaagagtaaaatgaaaaagaaaaagaataaggaacagttgacataagttaaaaattattgcttaaatgataatttcaggagaaaagctattaatagaaaacatataaatcacaaacaaaaaaaaaggatgaaaagcagtcaggggaaaggtaagcacagtagataaatattttttacatattcttatacaacttcagaatagaaatgataaaaagaaaaccctaaaaactgcagaaaaaataaataaaacaaattatcatgggcagaattgaatcagattggcagctgacttcataccagcaacattaagtactagaagtaaatgaagtcaggacttcagtcagactataaaagaaaatgttttacatctcaaatactataactaaccaaaatattaataaagcattaagatagaataaagtcatttaatacagacagagatgaaagtttttctataaagtgtattaaaatatgaattccagcatacacaaaaaatgtagtcctaaggaaaaaaaagctgaagataagaaatcaaagtacagtgaaacaaactccaaaattcagtaaaattaaatctcaggatggccaggatgttggttctgtggtaaaaccagggaataagaagttcatattagaacaagaagtaagagcattctgctagaatatcttaaggaagaaaataaaattttttaggaagaaatagcatgctaaggaggatgaatgatcttagtgagaaagtgaatggatgctccatcccgggactttctccatgagcccatgtgcaaggccgctccaaagacatcaatggaagtgctacatgggctcagtgacatggacttcctttgcaaggctaataggaggttatcagcaccagcaaaaggagatactaaagtttagtccccatcatagcaccattcctcaggtgtttaaggagatctcccagaagcctgattactttgaatcccttctatctatctatcattagggagacataacttaatttcacaggagtatgtacatattctcaagaagaattttccttccttacccacaatgtttctgtcagcaccatcattcttggacttattgaatgacttattcatcattttgacatcatctctgaccaaagaacatattttatggtgttgtaagtgtagacgtagacttacgcccatagaattatctggttttatcatgtgccacaccacctagaagcagcttgattggtagaaagacagaatggcctgccaatgggtcagtgaggagaccaccctctgagaggttggggcactgttctatagtagtgttatatgccctaacctagtggacaatatattgctttatcgctcattgccagaacactcaggcccaggaaacaaagagtggagatagggatagattcttcctatcacaccttaagtggaccacttaaggaattttgcttcctttcccataccttgtactaatttctatccaagggagaaatttttcctctaagaaataaagtcattgttctattaaatgggaagctgagattgccttctggcatttggagctcctcatgctactaaataacaggcagcaaaggtggtcactggcttgaatggatgatccccatgaccattcatgggaaattcagtggctgttccataatagtgacaagcagaacaatgcctggaacccagagaattccctggggtgccttttagcatcccttgtccaatatatctagataggaaacacagcagcaactcaatgaagccaggatcccaaggaccaaggactcagatcctctgggaatgaagatatgactcaccctactagaaaagaactctggcctgctaaggtgctggtggaggacacagggcataggaggtggaataaggtcgttttgattattaatttagtactcatgatcagctacagaagcagggactggggcagccatgttttgtgtcatttcaaggactggggcggccatgttttgtgtcatttaatgctttcttttcctcccctccttacaaggcacacattatgggacgagtcctggaatagtggctaaagctttaggtttcaggaggatccaactcaagcctctgttcaatctcctggcttcttaaggcaactcagacatctgctttccttgatccctatactcctgaatccacatttacagtttctgtttcctccatacatcagtttgcacatagggtatattcgtgagggtaacattagctgctgtaataagcgaactccaagctacatagtggcacgatcatgatggaagtttatttcttgctcatgtagagtgctaaatggttgttcctggttgacgggagttgcctctccaaggagtaattcatagactaaggagttgtaatggttgttcccatctgtcattttaaaaatgtaacttctgagatccttctgctcatctgtatcaagtgagtaaaaagaaaagaaaacaaagataaagcacacctgtctattgagctgtttggtctggaagtgacacaggttatctgtgactgcaaacaccagggaaaactagtcacctgcacccctggagatctctctctctctctctctctttttctcctccctcatcttccagctttactgcgtcttttgtactgccccagatcctccttcctctatctcagagcccatatgaaaacttccaagtggccctccaggcaaagccatattgtgattttgctatcttaggaaaaatgaacagaggtacatgattatgactgattatgactaattatggcagatcatgaccattatccaaacaaagataacccagggttatctgaaccttttccttaaaaatgcatgcctgtctgtactgataaaaaaaagtgagccttacccaccaatactttgttcaggaatcttgtttgcttatacttttgcttccttaattgattacaaggaaagttgccttttaatatctcaaggcaaaagtaattgctaatggattttccttcaagacacctgaggaagcacacctcagggttctacttcagaaagagtgacattaatgaccataatacaccctcttcgttggtagaataagagcctgcagaaacccagcttaaggccaccaatgactctcctgttgtcagcactcactctgtccccaccagaattactgatgaagcacggagacctgaagtagcatagctgatagctggatctcctttgatcagtaaattttattgagaaaaaagagtgatcccctttgactgccctcacttttttgatataatgaaatacacatctaattgctatttaaaaaataattaaacacaaaaccttaaaataattaaacacaaaaccttaaagactcaccccattattacataaagcaattcagctctgcctaagcaattatacccacatttatatatgcaggacacacacacacacacacacacacacacaaaggtgagtcaacctaatgtagtccctggatttaaagggcaatttcagagcactttgcagtacttaagcatgcacactggaatctcccttgccccaaatgttttaccaacacatttcctccaaataaaacaaaatgaaataaaacaacactccccaaggagaactttcaaaccagctgctaagaggaaaaaaccaacaacgttctttatcactttacacaaacttctacttagaatcttgaatgtctcacaaactagcttgtctctctgccaactagtttcttagcagcctttttattattattattattcagtggcatttagcagacggaaaaaccctagatcacagagaaaagctcaaattataatcatacacaaacttatctgagttccaacaaaaagtcttaaaggccctagtcacttatttataaacacatgaaattatttgtttccatttggaaaaatagactgacataactggagaacacacttattactcataaagcagacgaagcaaaagtagacatttgacatataataaaacaacttcaatataattaatgtaaattacagaaagttcccatttttaggagtgttggatccaccatcccgaccaccaccaccaccattaccactaccactaacattaaaaaaagaaaaaggtgtttaactggaagcagaattgttttataaaaatgcttacagaataaaattttgtcaatatacttctgagtgttcagagtttaaagcattcaccaaggaagctattctagaatctcaaattgtctagttttaaataagaaaagaaaactaaaaatagaagcagacctcatcctttttttcttgttgacctcttagaaccgtcagttgcatataaagttatttctaattataagatataaaagttcataatacttcccactcacttggcttatttgaagtctattacaagatatgtatagattctcgtaggaaactttgttaacttaccatcgctattagtcttcagaatgaattacataaaatcagaatgcattgctatgcccctttgtaatcagctgctttgctcaattgctaccaaattcaaattaaagcaaatgatggcttttggagaccattaggaataattatcctttctacaatccataatttgatcgtggataattatgtgatgtaacaatagaataattagacttatttctctatctgtgtttgtgtgtggcctagtcatgccacatttgccaaattatatttttaaatgacctattaaaattattcatctctataaatgtaactgctagaaaagatttagataattgcaatggatgtgttactcaagattgtattttattttcctttcttattactaaaaatattaatttcagtaaaaatgttttatactgaattatttcaatgggctagatactattagtagataagtaagcaaatctgacttggaaatcattatggaacatcagtcctggggaggagaaagacaatcgtcaaaaaccacacaaataaatacagatttacaattggaaacatgatgaaagaaaaaacagtcttctgtgagtgagtgtgattgaaacagcaacctgtgaactaagatttttttattgtggtaaaatatacatgacttcatatttatcattttaaccacaattcactgccattaaatatattcacaatgttgtacaaccattgccaccgtctacacccaaaatgttttcagcatcctcaacaaaaattctctacagataaaaccataactcctccttctgcccctggtatcttctatctattttctgtcgctacagatttgcctactcttgctacctgatcactacagtctgaatgtttgggtcccctgaagttttgtatgttgaaattctagcccccaagcggatgctaataggaggtggggcctttgggaggtaattaggtcatgtagtcagcgacttcataaattagactaatggccttataaaagaggcccaagaaagacctcttacccttctgccacgtgaggatgcagcaaaaagatgaccatctgtgaaccaggaagcgagcccttatcagacactgaagctgttggtgtcttcatcttagacttcccgtcctccagaactgtgagaaataaatttttgttgttaataaatttctgttgttaataccagtttatggtattttgttctaggagcctaaacagactaagacactgatacaactggaatcacacagtatttgtccttctgtctctgacttatttcactaagtatgttttcaagatccatccatcttgtagcatgatatagtttggatgctttttcccctccaaatctcatttggaaatgtaatccttcaatgctggaggtgggcctagtggggagtgtttgggtcatggaggcaaatctctcatgaatggcttcatgctgtccttgcagtaatgagtgagttctcagtctgtcagttcatgcgagatctggttgttgaaaaaacctggcatttcctcccattctctctgctggctcctattcatcttccaccatgactggaagcttcttgtggccctcaccagaagcagatgtggacactatgctcacgtacagcctgcagagctgtgagccaaataaacctcttttctttataaattacccagcctcaggtattcctttatagtgacacagaacagactaatacagaacacataccattctggctaacacggtgaaaccccgtccctactaaaaatacaaaaataaaattagctgggcttggtggcgggctcttatagtcccagctactcgggaggctgtggccagagaatggcatgaacccgggaggcggagcttgcagtgagctgagatcatgccacctgcgctccagtctgggtgacagagcgagactccatctcaaaaataaataaataaacataaataaataaataaattacattctttttatgagtgaatagtattccattgtgcttgtatacaacattttgcttatctatttatctgttgatgggcacggattgtttccacctctaggccattgtgaataatgctgccatgatgatgggtgtacgaatatctgttctagtccttattttcaattcctttgggtatacacctagaaatagaattgctagatcatatagcaattctgcattcaattttttgtggaactgccatactgttctccacagtggctgcatcattttacatttccctccagtgatgtacaaaagttccaatttctccacatcctcaccaacactttttacttgctgtttttttaaatataatggctattatattttaaaacattttaattatattattatttttaaaaattatatgttattatatataatatattgtataatagctattatatattacatacaatataataatatatattatatatgtaatacaatagataatatatatcatatatattatataatagtcattatatattttttatatataatggctattatatcctagaaagcataaagtgataccccatgattttaattttcatttcactaatgaggctgagcatcttttcacatacttattggactgtatatctgctttgcaaaagtgtctattaaagtttttgaccacttttgaattgctttgtgttttgttgttgagtcttaggagttcattatatattctggatattaattccttagcagatatataatttgaaattattttctcctatttgttaggtcatgtttttgctttcttaataatatcctttgatgcacaaaatttttttaatcttgatgaagttcaatttatctactttttgttttgtggcctgtgcttttggtataatattcataaaagtgttgctaaatccaatctattgaggatttttcctaatgctttcttctaagagttttatagttttagctctgaagttcaggttttttttatccattttgagttcatttctgtatatgctataaaataagggtcaaactttggtcttttgcatgtggatatccagttttccctggaaaaaaattgttgaaaagattgtcctttgccactgaatagtcttggcacacttgtagaaaatcaattgaccgtgtatgtgatggctaacttctgggctgaaaactgatgttttaaggatggactggagttaaattagtctggcatttaaagtctgtttggggtaattcggagttattcaatttactctggttttccagcagcataatatagggtgacactaaatccattcttcttcctcatcctgcaaccaatgtgagtcataaatatgccagtttttattttttctagtatccaacaggtcatgatgattcagaaaagcaaaactcccaaggccacctattaattctcataaatagtacagaataaagttgcaaggaagaagaacctaattatctaacagttagtgaagcccaccttgcccacaataagattagtaatttacgctataatcaagagcagtatcagaaaaatttcttccaggcaattaaaagatttgtggcaggagaagggaaggggagttggagttgtcagtggggatttaatgacagttaacgggggaaatttctgtaatttgaactaattatattttagatttttattatctatcaaatgtctcttcttcattaatttactttgaaggaaggaatatatccagttaaggaatttactctattttccaatatgaaaataaataatttcatgtcttcacttaaagggattaaaattttatgcctatatttttgttgaatttaaatatgagtagaccatgattttaaaaatcgtgtcccactttcaaactgcatctttttaggtttctaataaataaaaagtgggctcattttcaagttatataccttttcatgattgctgctttagctacacaaagactcagatgaagtttgaaattattgcttgtaagagcctaatcaattttatagacaagtcaacatcaccttcctgtctctccttgggttgtgaaggtgcagggaagaggaggagaagagaaaaggtgggaaacagggtagggatggcaattccccccctccaattacgtgtgtgagtatgtttatttaaactccatgatttaaatatttcaaaattatacatttaattttaacagcattcatttgtactgtcactgatggttgcattgctatttgaaaagtgaaatggtcaagtgcccccaaaatattgtgtctcttttatgtaagacacaaaaaaattgtgttttcttttacataaatgtttctagaaatgcaatagacaacatttatgtgtattatgaaatgggagagaaattttttgctacatgaagaaatttcatgacgtacttattccaatgacttatcatagaattgttctggaatattatgcttattaagaccttgtacttggtttgacatctgtcactttaattatgctttctgtattttaaggctttcttgttatcttttacctattttgcttttggatgaaggaaccatgtccatttgcttgtatcttttatccatgacttgtgaggctaacaccctattttaaagataatctttcatgattatcttagaacattaaaattcttttacctaattatgtctgcaataactattgacttcctctgatggatgtcaaggaatttttcactgatgacatccctgtctttgctatttctcttttatattttgcattatgacaacctggatatttaaaatattcttttaaaaacagactttgttattatacttacatatgatattttacttttgtcgtcataattaccctcaattacttaattttcctcttactattgattcatgatttgcaagtttgtattttgttttgtgttttatttatcctacaattttagatagtttaagtgattataaccactttttctcaatcacatcttccctaatgaagaatgcaattgattattcatctcctaattgttcagagcacatttgtaatgcatcttgctggaaacagacttgagtggcaaattttctaagaattgcagatttgaaaatggcctcatcttgccttttgagaataattagcccttggctaaagatctaatgtctgcgtctgtatctattagagatgtgtgaagttgcaagtaacacaaattgcaatcacaggtgtttattttcctcatgcaacaagaagtctagaggtatatggtcgctagctttggctcagatgccaatatggtgctggaactccagccctcatgtctgtggtaggcagaatattggtcccaaagatgtctacatcctaatcattgggacctgttgatacgctcatttacatgtcaaaggaaaatgaaggttgctaatcagctaaccttgagatggggacataaccctggattatcccggggggcccgaagtaatcacacaagtccttaaaagcggaagaagaggccgggcacggtggctcacatctgtaatcccagcactttgggaggccgacgcgggcggatcacgaggtcaggagatcgagaccatgctggctaacacggtgaaaccccgtctccactaaaaatataaaaaattagccgggcgtggtagcgggcgcctatagtcccagctagtcgggaggctgaggcaggagaatggcgtgaacccgggaggcggagcttgcagtgagccgagactgctccactgcactccagatgttgctggatttgaagataaaggagaagacctcaaactaaggaatacagtggcttccaagaaccacactgggaaaagtgaggaaacagaccctccttagtgactccaaaaggaacacagccctatcaatacctggattttagcccacggaggtccacttccgacttctgatctttggaactgtaagataataattatgtgttgttttcaaccactaagattttttctggcattgatagaaaaccaatgcaatgtttatgtttatttcaaagtaagacagaggagaagaggccgtgccggggaatttgattataccgggaattctaaatttaagtttaggattccctggctaattttcatatttttagtagagacagggtttcaccatgttggccaggctggtctcaaactcctggcttcaggtgatccaccctcctcagcctcccaaagcgctgggattacaggcgtgagccaccacgccctgcctgactgttatgtttgtcttccccccgccactgtccctttttatctcaaccttttaatatagcttccacatctgcttttaactcattaagaatataaagtgaagactttttctttgaactcttacatcttcattccttttctactttgcttcagattgttaaaagatctcaagtgctgtcgttgctgtttactcattcttcatgttgactagctccactttgtcggtggtgctttaagttctgatgggatagattctcagaatccatttgaatgtagagagagacgtatactataagacaagagaatatgggaaccaggaaatgtgtcagccacatctacaagtagaaggcagatctcatagaaatgcaggccaccctttcagtttaggaaatgcaaatgttttcagagagcactatctggaggcgcagctccagaaatagactgcattctactggaagagccgaccaggggaccatctgctccacatcatagatcatcccatctcctatatgcacctgaatggaaaagatacaaaccaggaaaggagcaaagaatggtgtggagtgttgatcacttctgctctgcatatgaggactgccctgcccaaaatcttattaaaatctagaatgttttcaagtcctattgtttgtatgggtaactgcaaaggatttgttatttttcttttgagatcatgtcatggttattttagaaagaggacactcctagcatttcccttcactccactaacttcctggggaccatctttgagcattaaacctatgtaaagacagtggtctgggggaaagtaccagcaagtatatcctataaaaaggagatagagatctctgttgattgcagggaaaaatgtagattaccgtgatcattttatttcatttgtggcagaggctgctgttcccctggctaacacgctttctttcttcctctcttaggtttaacagctttaatttcattttgtgcagcatgtattttgcaggtttcaagcaggtaggggtggtcacgtgacactgtcctggccaataatacatatgaagtcactgaatggatcttccagaaaggttctttgaacagtgctaattcagctggatgtagcgttttaatcctgttcccttctttttcttgcctgaaatttgtagacctcatagctggagctctggctaaaatgttgacaatctgagaacaagtcctcatcctaaagttggagtcttgttgacttgggaccttcatcgtatttctgtgttatctaatttgtttaaaccactgttgtacaactttgctgttacatatagctgaagtcaacccctaactgagagaaaagccatcctctttctcttggaggcactaatatctctgaataccttgttattattgcatggttaaagtaatatcaaagtgtaggactatgatgggtaaactttaataccaccatgaagggtatccattacccttggtctacaaatcagttgcaatctaggtttgactttcaaacaaaccagtaacataggagaatttttgaacattctagaagtttctgaacagaaaacaataaaagctttagttgtacaaatgggcatttaacacttccattggtaaagtgtttggagactagactccagcttttaggaagtgcaactgcacctagaggccacaaagcctcaagacagttcagtgaagggcctgagccctgtgaggtcatgcattgggagctataactaatgttttggaataagagataggggactcagaagactcctttatggctttttactagaattcttatcagtgaaattatttgtaaagctctttgtttatgacaacatcagcttacattagctgttctaaggggaaataaggaagaagaaaattgcacatcctaggggagtgagcaaagcccaagaaggaggcaaaaactcagaaaaaatgaggcagaaccaatctaggagccttcctatctcacctggagttttctactcagcagttccttttggttccaaatttacataatagattgttgtgtgccagaaatgattaattctgtgagccataaactttattaggtcctgcccattagcaatactccagggttttttttttgaacaagtcaaaaaaaaaaaatatatatatatatacacacatatatatatagaaagaaacagggtctcactctgtcgcccaggctggagtgcagtaggacaatcttggctcactgcaacctccgcctcccgggttcaagcgattctcccaccttggcctcctgagtgtctgggactataggcatgcatcaccatgcctggctaatttttgtattgtttggtagagatgaggtttcaccatgttggccaggctgatctcaaactcctgacctcaagtgatcctctcacctcagcctcccaaagtgctgggattacaggcataagccactgtgcccatccacatagaaaaagtttaaatattattttttattgattcattctataacacttctaagcacctggagtgtcccaggcaccaaacaaattatagcaaaaaatttacattaaactttaaaaaggaattcattactttgctttttaatagctgcaggttgcagcatactttaacaatgcattctatgctctccacctaccattaaaacttggtttgataagacataggcaattaggatgcaaagccgactaatcacaaatttaaacctctttgcatcctgagtatgacacttcctttgaaaactagatgcctctcaaattttattaacaagacaaatataactaattacacaagccttgagcagcaaaaacttcatttcatattatagtcacctaatatgaggtatatcatgaaatagaaaagaaggcagatatttttactgttatgtcaatacaggatacgttgcaaattactacaggaatttctgggttttataaagtaacaactacggtttggttttgtccatatttttattttaacataatctagttatgtgtcttttttttaagttttcaatataaccatagatgtctagcaatcaggcatgttaatgtatgagttacgtaattccacacacaatgcaaattctgtttctttgcagaagtctttgaaagccttggagataaccagaaaatgaaggaagccctccaccactgagtttcagggcaaagggaagaaacaagataaagtagaaccgtcagtacaagtggaattattaatgacgtccaaatgcagtcattaaatactatcagacttatttattgactcctgatattaagagtgaacaaacccctggccaagtgggaacttgctcggtagcctttatctttctatcactcattcagtcaattcattaaagcctgtttgtctctcccaggtgactcttactgagtttcattgttttgtttattgtgtttgttggctcatagatctctttcacaattttcttcggcttctgaatgctctttaagtaccagttttgatcagcccatttgctttaataaacaggagagcaagatgggacagggcgatacagggagaaaagggggcaaagggaatcgcaccgggtgcttgtgctccctagaaaaaccagcaggtggtagcaacacttcgtggcaaggccccagcccagctctgtaggacccaaacaatagaccccaaatccccgtcctcggctagagaaggggttagaggtgggcggaaacacttttcctcgcggcgccccctcggttcctcaaccctgcctccaggcgccagctgagagcaccttgcaccgcccctcctcactgcagggaggttctctccggagcgcgggcgagggaggaggcacccagaggtgcagcgacttgcccaagccatgtcagagccaggcgtacagcagcgcttccccttttcaacccgactgccctgccccttggggagggtagatggagggaggttcgactcagaagccccaacgttgaccaagatccagacacgaaaagagaaaagagttcccggctagcacggcgacgctttcataccgagacgcccccctctcccgctgcctcggctccccctaccaccgcccgtactctcccagatttctcagtttgtctttccctccaccccctgcttttccttccttctctcttgctcagctcacgcccaccttagttcaaagctgagtaggagccccactgttttagttcctagagttaaagccgaagaggagggaggcgcgagggggtgtgtgcagggctctgccctgccctgaactgccacggtccgccagttgcgcttcgctccgcgggtgtccgacccaagccgagcccgagcccgagcccaggcaggagctttacagacagcctcttcccttcccacttcctgcaggcgccccacgcgtgcgatcctcccggccaagacccgcgggaggaggccgcccccttcccggcgcacaggcggggccccgggcgcgccccgcgtctcccccgcgcgccggggcggaggagcgggcgccgcgcactcaccgcctaggccgggagggcgggctcggctccccggaagaagggagtgggaaggcggccaaaggggctgaaggggcgggccgggccggcttgggaggggacgcggagggggcgggccgggctgcgttcgctccagccgcggctctacagcagcgggcggcgggacccgggacccagcttggcgacggcgatctcgacgcgggcccccaggatctcccggcgccccacctctggagcagcccctgccgccagcgtcaggtccaccccggaatcccagggactctcggcgccgaacggacccgggccgggtgcaacggggtccccggactggagaagacgcgggtggcaccgtgcgagctccaggagccccgggtccactgcgaggcctcggggggcgcagacctgcagagactgcggccaacgggaaggtgagcccgcggggttagcaggcggcgttgtgggggtcggggacagtatgcttggggacagaggaattaaggtttgcaagagtagtggggctccccagcccctaggtggcttcctgagggagtactgaggatccttcctcaaggccagagtggggttcatgaagggtgaggaaacggtcaacctggctactcccctctcactccactctgacctggcatcattgacaccgcattacccttgctgttaggatcccccagttgcgttcccagacattctcctctggctctggcttgggagtcctaatctgggagggtcctcgcagagacggagctccacgcttggaacaggattgccacccctctgactccagtggcatcactccaatccccttggagctgggaggagtcaggaggctgaccacacacctgtcccctgctccccacaaggcactgtcccccccagctccatgaccacagttaagccttggaggtggaaggaacgcttggttcctgctgcccagccatcacccccaacgtgcaaccaaattctattgcgtgctcctgccccagctccaccctcgctctgctccctccatctgggtgcttggccctgcttgccccacacccccacccaccgatcttggccgtctggcaccctctctcctcccatccctgggggagctggcatggacccagcatagcaatgttgtaatgtccctggcagcgcccatggagcggagctgctgggtctgttcccagttaacccaggccctccgcccgccaggggaacttgactgaggctctaggaggggagatgctggtcctgagctgagagaccagtgggagggagctgtgtggggctgttagtagaccacagaagctgcccaagtaaggggcattggagcattgaggcttctgagtgctgctcagtggggccacttggcttttcagagcagtgggccttttttctcaaaggaagattagcgtgggggtgtctatgtacttacctggtggcctcagaaggaggacttgtttggagtctattactccattcagggtgcaaaaagatggttggcaatgacactgagttaccagaatgctggggagcaacaggctggggtgggctgagcgtgggaaaggcaggatcctccttctgggacggctgttctgctatcactctgtcctgagcctgggccctagaccctgagttcccactctaggtagaaggaggatggcaggttctggagggtttgggaagcctcaggtttccctttctttacccactcctccccgccccccacttggctccctctcccagcccaggtgtttctgcagaagtacctcctggggccaagagcaactcacagccagactgggggtagagcaggggccgaaggtgaggaagaagggcccatggaaccactccggaaccagcactgatgtgcatcttctgccacaggaaagcaacagcccccatctacacagacagcatctgctcccgcccacctcatctcatacacattcccttacacactccaccaggtagacacacatcctcaggcactgctgacgcaggtgctactcctggcactcaggggctttcttccacaaccttccacttactcatctctcaggcacatttgcctcctgccttaacaccctcccttatgctcttttccagagccacgcatgtcccccgtcagtgcacagagtggctcattctaagtggctgtctggctagacctagacactgcctgcatcttaaaagcctcccccagctccacagcctgggagtgggaggcacatttgtctgagtcacagtgctctgggggacattctcaggggctggaggcctccagggacacaggactgtcctctgctaggtaatctacaaattggcttctccagccaaggaagcagggactagaagagccggaggacagccacctcctcactgtctgtcctggatgcctccatgaagcctgatgatgggatccttctcaaggcaggaggccagagcacgaagagatctccaaggtggagattaaaggatagaggctttggcattaaactgagcaaggattatactggaatttcctgggcatttaacagctgtggaacaggataggggacagggcctgtggtactgacccctcccacactgacctgtgtggctcacaggtgtaaggaccagcccagcaaccacaccagacataaaacctcgaaccgctttgcccttgggactgttctgtccctgctggactctgcagcctgctttgtctcactaaattgttcctgtctgggctcggtttggggccatgccctttactatgtgttcccagtggacagtcccctgggttcccctctgtcccttcatagcctcatccctttgcttgacatcgtcgaagagaagcatgcatgatgtcagcagcgggacagttggaacttcttgggagacaagcttaaagactagccagagataacaattattttggttttcttgttggcattacttcactcattcattctcagctcctactgtatttccacctctaccttcttcttatagatgaacatttcttgatattttgaaacatagaaggaaaatggcatggggagtgaataaaatgtaaacgtatgcttatttgtctaggttttacaaatatttttcttttttgtttagattttaattatgagattttacgttaattataaaaataaggtatgcttactgtaacaagaaaaataattgaattatgtgtaagacaaaattaatgcccccacctacaatccttcatttctacctcccacagtaacccattttaatggcctaatatgtcttctgcctaccttcctccaagcttatttggcttacattatttaatctttaaaaattcactttgtggattgaggtgcataaactatattaagtaagcttgatttgctcatgaaaatatcatatttagcatttaattggagcacgattaattttttaaattcttaccaatttaccaatttaatttacttttaagtcattcttttttttttttttttttttttttttttgagacagcatcttgctctgtcgccgaggctggagtgcagtggcacgatctcggctcactgcaagctctgcctcccgggttcacgccattctcctgcctcagcctccccagcagctgggactacaggcacacgccaccacgcccagctaattttttttttttttttttttgtatttttagtagaaacggggtttcaccgtgttagccaggacggtctcgatctcctgatcttgtgatccgcccaccttggcctcccaaagtgaaatatttcatttttatagcaacataactcgtaagctatgctttgtaacctatgattctacaaatctttactttttgccagtttctgaaaacaaaacacaaccttgatacctaagaaacagtcttatttttgtaaaccaaagagatgtagcaggcttgtggatctattgtctctactgtatcaaaaagatattaagtgatatatctataaaagaagctgagaacatattataaagtcatagactgcaatttttgttacctaaaactttgtctaatccgtctcgttttctccaccattgttttatgttcacatttctgctgcttctggttttatatttttaaaaccttatacacatctgaaatgtgaatatttttctaaaggagataagttcttttgcacattcttgtgttagagaatttctaaatactgaccagtttgtaagtcagaggagagaggactctcaagcaggctgtgagagaggagcaaggggcctggctttgcagaggctgcttcccatctctgtggcaggagaaatgtactggcctgtccctgggatgctctcctggaccaaatgcagaagatgctccatgcccacaaccattgaagacacctttgaaaaatcaagttctgagtcctgcttacttagcattccaggcatgtggagcagccgtgttcttgtcacttatgtttctgcctttgaaattggcttcaaaagaatctgcagtggtatgaatttgctgacagcaatttattccatatcttaataaagcttcctttttctttatttggattcctgcaacaggggtacacccatattctttttatatattaaaattaaaagtcttgaatttatctggtttgtttgataagtaagaactcacctaacttcctagtctgactcagcaacaattttttttttctgaaaaaatgtatttataaccttcagtcatctggatctgaatctaaaagaggtcctcatcaaacattagaagtatccttctgggtactttaagatcctcaaccatttctttttaatgaatatctttgttcttagtaaaatttcaaaaaattgctgaagtggtcatccacaggcagtgtctccattttcttcttttctttatgctgtttcttgatggcagaagctgagtggccttaacatccatgtttcataattgcttttgctcttttctggatcttctggagggaggccagcttcgtgttgtcattacgaggcatgctaaggctatgcaagcacgccctattgcaaccacaagtgactgtgttccttgtagttcgggtcatcaaagcaaatatcttgctattcatcttccagagtgttccatattggacagctgatactatctgcagcgcatcttttctatcttgcttggctgtctttcaaaataattcattgaaatatttccaaaatatttattgttccttcttcatgattatttgcctagttgtaagcttgagaagacacagggcttactgtttcttctttgtacagattacagaatccatccatgttctgagtgaaagaaagagactattttaaagaataacttctaggcaaatggtaaaatagccttcattgtttaaaaacctgctgctggcattttctttccctgataacagtatttctaaggactccgtgactctggtttgcttcagtgtgtcaagcacgtctccaaattaagccattgagagtttggaggggatgcacttacaacatgaattactttaggatatttattaaacagccactggtgacggtgccaaggttacagaatttaatagctatgcctgctttttacttcatgatctccccgttcctctccaaagcatttatttcatctgtgaaggatcctagtaacatttcagacatttttgcaaagaacattacttaagagcaatttgccatatggaaatgctccttacttgtctccataggctgtaaattgaactctctatttcacaaatagggttaaagatgtataaaaggtgagtttcaggggctagttggcaggtgcccactctacatcagcccacgcgtatgtagaaatggtgtatttccatgataacttcatggacagcacagcccgcagtgccagaaaaaaattagtaggaatcaaattatgattttcatatttgttgcaattaaagtttcatagtttgatttttgttttatgatagctttcaacaatcccaaggccatatatatccaggaaaaacaaatcacaacttctcttctaattggctttttttttgttttcctctcagttctatgtcttttgagcaatctgggcaacatgtctcttttttttcttcacagaaataaagggattatagtccacccaattcacagacttctgagactcagacacgaggagagatagagaaccgccaatctctagatcaacaagcaaaggaggtgccaagcctgtttgtcttcattgtgacactggaggtagctattccttctgttcatttgctcgtgagcttagtggtgtaccttctgaaggcacaggaaggttttatataagaggtagcttactacatagttctgagaagccattatgaggatatgaacactgttttgattaactttactaaacagttattatcctatagttttaaagaaaattttaatcaatgatttagttgaaagaatacacatgcaagagtttaagaatgcaaaaatttaaatggatacaattaatgagaatacaatgaaagttaagtctcccttgcactgggtctcagtccacttcctttgcctttttcacaggttttggatgctcttccatagatatccttccatacatatgtatgtgtatatatccttcttaacaaaggggagcttactttacactgttctccattgtcccactttcacttggaaatgctttttatatcagtgcatcaacagttgcccgtatttctttctaaggatgtactataattttactgtcttccaattgatggacagttagtttacagccttttctcttataaacaatttgcaattaatgtctttgttcaaacatctgtgcaaacccatacaagtatacagtacctgaaggacacattcttacaatgtagttgctggaaagatattacccaattgtcctcccaagagaatattccaatttggattcaagcagagtatgtacaagagaacctatttcccatatcttgtccaacatggtaaaaatggtgtcttaggcaactgtggctgccataacaaagtgcaatagacctagtagcttatacacaatagaaatatctttctcacagtctagatgctgggaagtccaagatcagggtgccggcatggtcagttcctggcgaagcctctcttctaggtttcagactgccctcttctttgttgtgtcctcgaatggcagaaaaagggtgagaaagccctttggggtctctttcatctgggcactaatctcatgattagtgagggctccaccctcatgacctaaaatttcctcccaaaggccccatcttctaataccatcatcttgggagttaggatttcaacatatgaatggagggggggcacaaatattccttctataacaaatggcctgttgctgtagttttaacctggtttcctttcaatgtgagcaaacaagaagcatcttttcatatgttaaagccatagggttattcttctgtaagctctaggaaaacatgcaccccttggggcacgaggatctttgttcacaaagtgtatgccagacctccatagctctgccccctccctgcactgtctcatttatcagactgaatcttcatgcctgtgttctttctgtatttattctggtcccttccctcccatcataccccacagccatcttcctgtgtccctcccgcttcactgcttcactgcccctctgaaatttctagagcatccaggtccatcgggggtggggcggtgtggtgaggattcaattcatgtgtctgtaggatgcagcagcttcttaaccagctgcctttaatgaaaatcttctaacttccaatacagggtggctgttggaggaagggaggagagtaaatgaagagaaagaactggaataaccccttgcagaaaaaaaaaaaaagggtaagattgacccagaaacaccctctgccccacttctaggaaggagagctgtgagaaatgaacacagagacagggtcacacagggagtaggcacgaacactccaagatggtcaaatgtgcaccggctcaggagaggcagtatgcaacctggcttctgtcccatggtgggtgctggggcgattggagagctgtaggaggagacacagacacggggtcagcttttggagcttgggctgtatatgaagaaacactttcttcccacctgcctcttctggtcttgtgtgtctcctcaggaagcaagcttagctgtacaccctgagtcttgcaaaagctgcagccccacccaggagcagggtggtggctggggcgatggtggacgccctgaagatgtcccatggctactgaaggggctgcccagttagggaacagagtggcgggcatggtgtgtagcctatgggtgctgctcctggtgtcttcagttctggctctggaaggtaagagggaggggagacaggagaacccagacctgccatagagacccagtgaaagggggaagtgggaaagatttagaaaaggtagataagagtgaagacatcaataaagggaaaggcatggtgaggataatgaagacccacatcagatttgtcagagaaaggaccctgacggacagctgtgctcctgctggcaaagacatgggcccgggtggggcattcttttgttcccggtgggaatagagtaggggctggcagtgctggctggaggcttggccactgtgtgcccctcttatttctgggcagaggtattgctggacaccaccggagagacatctgagattggctggctcacctacccaccagggggggtgagtgccactctaattctgaacctgaatcccttggccctgcccctccctgttccctggagagtggaattcatgaaggaaaccctgggtgaggattatgggaaaaggatccctccctctagagcaccaagatttcaaggtatcctctatctgctttgcttgtcattaattttaagtctcagtggaagagatatgtccccttccctataacctctacctcgccttgcttaagcccggagcccctaaagcttctcctggcccttcctgcagtgggacgaggtgagtgttctggacgaccagcgacgcctgactcggacctttgaggcatgtcatgtggcaggggcccctccaggcaccgggcaggacaattggttgcagacacactttgtggagcggcgcggggcccagagggcgcacattcgactccacttctctgtgcgggcatgctccagcctgggtgtgagcggcggcacctgccgggagaccttcaccctttactaccgtcaggctgaggagcccgacagccctgacagcgtttcctcctggcacctcaaacgctggaccaaggtggacacaattgcagcagacgagagctttccctcctcctcctcctcctcctcctcttcttcctctgcagcgtgggctgtgggaccccacggggctgggcagcgggctggactgcaactgaacgtcaaagagcggagctttgggcctctcacccaacgcggcttctacgtggccttccaggacacgggggcctgcctggccctggtcgctgtcaggctcttctcctacacctgccctgccgtgctccgatcctttgcttcctttccagagacgcaggccagtggggctgggggggcctccctggtggcagctgtgggcacctgtgtggctcatgcagagccagaggaggatggagtagggggccaggcaggaggcagcccccccaggctgcactgcaacggggagggcaagtggatggtagctgtcgggggctgccgctgccagcctggataccaaccagcacgaggagacaaggcctgccaaggtgagagcccactcgtcttgcacttgcccgacacctcccacccacccccagcctttgggctcctctctgaacaccccaaaattcattttatctgcaaaaggtcaggaataagccatcttaggaaaggaccctgattttccctaattttatttcttaaagcactcaaacttactatcacccactcatctgaaatttctggaatcttctggagcctttcacagcaattgccttttcctaagtcttcaggcctgagaagcgatggagaccaaaaggagtttagctccagctccagggttactatggaatagagtcctttggttcccattcgcccttctgttgggagggtccctgcctcgctgggccaggtgacagggacgcaggtagaggaaggcagtggatggcagctagggagaatgactgcagcagcaggcctccgcagagggagcttatgcaataagctgggaacacccacatctggcactgggcctgtctgtaacccccactgcacctcactttctccatccatggaaatgcaattctgtcccagcaattggcagaagaaatctctgcctgagggaagagagggtggggttcagtcttggaagaaaaggagaaccagctctggggaagagaaggctgcgaggatacctgcctgctgtgtgttgggagctcagggtgggtggacagagcgagtgtgacgcccccactctcctctgcctcctcagcctgcccacgggggctctataagtcttctgctgggaatgctccctgctcaccatgccctgcccgcagtcacgctcccaacccagcagcccccgtttgcccctgcctggagggcttctaccgggccagttccgacccaccagaggccccctgcactggtgagttcctcacccagccctgcaatgggaaagagacttggagaggggccagaagtgggggtagcaggcaacactgggggctctttgcatttggagtgacttgtttttcccctattttcttggcttcctcccctccctgtccccacccccttctctccctgacccatccttccctgggcccacatcctgcctctctgggctacccccaccccacgctcttctgtctccttccctctcggccacccaccctcccctggctccttccttcctcaatcacccccactgctgccctcttggcccttggactgccatatcctccggccccccaggtcctccatcggctccccaggagctttggtttgaggtgcaaggctcagcactcatgctacactggcgcctgcctcgggagctggggggtcgaggggacctgctcttcaatgtcgtgtgcaaggagtgtgaaggccgccaggaacctgccagcggtggtgggggcacttgtcaccgctgcagggatgaggtccacttcgaccctcgccagagaggcctgactgagagccgagtgttagtggggggactccgggcacacgtaccctacatcttagaggtgcaggctgttaatggggtgtctgagctcagccctgaccctcctcaggctgcagccatcaatgtcagcaccagccatgaaggtgagctcttttccttggccttcaggatcccctgcctccgctcctttgagcccccttccctactcctgatctccagcctggtccacccctgccgccctcccctcaaggctgatcctgctcccagggactcctatccccataataattttccttttgcactctagtgccctctgctgtccctgtggtgcaccaggtgagccgggcatccaacagcatcacggtgtcctggccgcagcccgaccagaccaatgggaacatcctggactatcagctccgctactatgaccaggtgcgcaggaggagtgggggttccgcagtagggctggtaggagctcataggcctcacagtggggcccagaggtgaccaggtgcacaggaggaatgaggggtccgcaacagggctggcaggagctcacagtccccacagtaggggccagaggctgaatgggcaaggagaggtgcccagaagtgtgcagcactgggcatgtgtctgagagccctgtcaaccagggagggtggctgggggccttaggggcagaagcaggggcaagagggggccaggcagggagtgagtggctgttacccccaggcagaagacgaatcccactccttcaccctgaccagcgagaccaacactgccaccgtgacacagctgagccctggccacatctatggtttccaggtgcgggcccggactgctgccggccacggcccctacgggggcaaagtctatttccagacacttcctcaaggtgagcgggggtcaagggccagatgggcaggtgaaggcccaagtgggtagtgaggagaggcccagggactgtccggccttgaaccctggccccgtgcttcccaaccagaagttctgtgggaaaggagagtgccttttgctcagcagctgacctaggggctactcggggaggtggggaattgtaggggtatgtatgcatgttgagtgtggatataggagggctgtggggatgtgtgtgtgtgttgtgtgtccctgggtgtggatgtgggagggctgtgggcgtgtgtgtgtgttgtgtgtccctgtgtgtggatgtggagggctgtggggatgtgtgtgtgtgttgtgtgtccctgtgtgtggatgtgggagggctgtgggcgtgtgtgtgtgttgtgtgtccctgtgcatggatgtgggaggtttggggcatgcgcgtgcatgttgtgtgtgcctgtggtgtgtgtgggtgcctgggcacatgaacaagcacctgtgagagacctggcccacctgtgaccctgtcggctggtcccccaggggagctgtcttcccagcttccggaaagactctccttggtgatcggctccatcctgggggctttggccttcctcctgctggcagccatcaccgtgctggcggtcgtcttccagcggtgagtccccacccctgcccaactctgcccagcaccattaactccacagccaaacctcaagtcctgccaagtctggagccccctgcagaaacctcacactggtgctcctcccgtcagccagcccctgccctgggccccacgtggagatgggcaggagggccaggctgtcgtcccccctccacagaccgactaaagagcagtctggagggtgacaagggggcagcaagggggtggaaatgggagcgtcatccccagtcaccgttttgttcctcaggaagcggcgtgggactggctacacggagcagctgcagcaatacagcagcccaggtggggatgaggagaggaaatgggtggggctggggaacacatgggtggggcacatggcaggcaaggctggatccccccaagattgggggagctccttggcacaaccttctggaggtaagtgggcatgtctggggtgcgcgggcagccctgcctttcacaacacgctcataacatactccacacccctccaggactcggggtgaagtattacatcgacccctccacctacgaggacccctgtcaggccatccgagaacttgcccgggaagtcgatcctgcttatatcaagattgaggaggtcattgggacaggtacagcagggccaaagcagggatcagagcgacggggctcccttgtgccctccgctggccagagtcccatccaaacacagcaggacgctgtgagccttgatccccaccccaacctacacctattttcccaggctcttttggagaagtgcgccagggccgcctgcagccacggggacggagggagcagactgtggccatccaggccctgtgggccgggggcgccgaaagcctgcagatgaccttcctgggccgggccgcagtgctgggtcagttccagcaccccaacatcctgcggctggagggcgtggtcaccaagagccgacccctcatggtgctgacggagttcatggagcttggccccctggacagcttcctcagggtcagtccagcctgggtgaaggaggagggtccttgggtccaggaaagcttccaggagacgaggtcctgtatctttgcttcttaccaccccaccttccatggtctccgtccttccttcccagccattttctgattcgacaccctccccctctcatgctgttgtctgctgtgcagtatgttgaggtctccccgtctccgatcactgacctctgccccctgccccttcccctcagcagcgggagggccagttcagcagcctgcagctggtggccatgcagcggggagtggctgctgccatgcagtacctgtccagctttgccttcgtccatcgctcgctgtctgcccacagcgtgctggtgaatagccacttggtgtgcaaggtggcccgtcttggccacagtcctcaggtgagagcacagccttggggacacagcctggggccttgtggcatgccccagcaggtgctggggtcgggggtgagctggaatctggggtaggtacctcagccggggtgtcatagtccctgaaaggagggaggctctcctgtgtgatggggagatgaaagcctaggcgacggggtttgagggatttcagggaccgagacaaaggggatgagggaggggaggagacctgcaacaatctagaactacctcctgcccttcccccattgtggagattacacagactccagagtcagcacagctgggtacaaattcttaacactctgctctccagctctgtgaccttggacaagttcactttctctaagcttcaccttctgcttctgtgaaatggagataatatcatccaccttggagggttgttatgaggattaaatgagatgcttgatgtaaaacccttaacatatctgagcacatagtagttgctccataaacgtgactattgcttctgcttctgtgaaatggagatgatatcatccaccttagagggttgttatgaggattaaatgagatgcttgatgtaaaacccttggcatatctgagcacatagtagttgctcaataaacgtgactattactatgattattactatttgcttttgactttacccctcagggcccaagttgtttgcttcgctgggcagccccagaggtcattgcacatggaaagcatacaacatccagtgatgtctggagctttgggatactcatgtgggaagtgatgagttatggagaacggccttactgggacatgagtgagcaggaggtgagcactgacctagacactgctgatttcccaccccgatccctcccaggttggaacattctaggacctccattctctactccgtttgtattctaagatctcatggctgttggattgccatatctttgagttccttctccactccaacctcatgctccaccagattccagcccaccctcttacccaacaaagtactcccctctactaacaaaacttcccatcatcatagtcttcctctgacccccaggtactaaatgcaatagagcaggagttccggctgcccccgcctccaggctgtcctcctggattacatctacttatgttggacacttggcagaaggaccgtgcccggcggcctcattttgaccagctggtggctgcatttgacaagatgatccgcaagccagataccctgcaggctggcggggacccaggggaaaggtctggagcttggggctagagcctgggaaagccagggagggtagatgcaaacctaaagaaaactgaggagaggggctaagatgaagaggagaccttgaccctgcttgcccctcccctcttaggccttcccaggcccttctgacccctgtggccctggactttccttgtctggactcaccccaggcctggctttcagccattggactggagtgctaccaggacaacttctccaagtttggcctctgtaccttcagtgatgtggctcagctcagcctagagtaagcagggagtggtggggtgggggcgaatgctccaggcccctggctgggggtcgtattggggatctcggagaagctggcccagatttgatcccttccctccccaccagagacctgcctgccctgggcatcaccctggctggccaccagaagaagctgctgcaccacatccagctccttcagcaacacctgaggcagcagggctcagtggaggtctgagaatgacgatacccgtgactcagccctggacactggtccgagaagggacatgtgggacgtgagccgggctccaacagcctctgtgagagatgccccacaccaaacccaaccctcccgatggctgcattccctggtcctccgcctctccaccagccccctcctcattaaagggaaagaagggaatttgcaagtttggtgtggtgaggcctcagtctgcaacaaagggtgagggaggcctcaacgtaggagcagaggggtggggccggcagatggcactgcagagatgcagaagggcagctgggcagggatccgaaaacgactttattgaagatggagttggcaagacctagccccacttcccacccccagagccgttcctgtctccctcactcacacgctttccacaagctctgcacttccctgcacctgcctgggtgccctgggaagggctctctccccacttatgaccctggggtggagaccgagcgcccaagcaggctggcctgtttttaaagtgctctgacatgcagtgctcctgtcggaagggtgatgagcaggccacaggagagttcctcacgccctgccagccccgtgcttgggctgggcttcctctgccccagagctgaaggagtaatgcaggcctggagcagtgattctcaacgtacattccttggcgttcatgctactcctctttctcccctggggcctgggagatgagacctctgggtgtttggtttttgttttgtttgatgcacccaggaaaatgagagcaagttccaggaagcgaagtgagaacacgcagtcagatctgatattcccagctctccccgtcctccagacccctgttgattatcccacgcaggtctctcctcagggtcccttgccgaagcctttcccaattggcactgctgcgggaggtacttcgagacactgagggcataggaagggacaggtgggggctgaagggacagcccagctctagtttttccactgagtctttgtccaaatcctcagagccccgggtgtggaaggcctgtgcgtagcgttggatccgctgccggttgagatcttgcctgtcttccaccctgtggaatgcgggaggacttgagacacagccaggacttgaagaacagatccaagaaggatgcttgtctgttatcccctggtcctcccatccccgccattgctggccttttcccttttctgcagccatggtggatgcctgggtcactggccccttggcagctaggcctcagaaagcagcaggctctgccacagactccctggatgctttgggaagtctgagctccaaacgggaccccttcctcaccagctcaatcaacaagcatagagcctagggagcacacaggcctccacagggaacccaggagccggaagctgtctgagcagggggataccctgccgatgaggcttctcaggggacacctacccccgcatatcactcaccgcaggaaccagcggtctcccaggccatactcccgtccgcagatcccggagcgaggccacaggcagcgaggcagcttccgctccagcatcaccgtggtggccacaatctgcgtatgggaacaaaaggagaagtcagagatgaggctgggcgcagacagaggtaggggtagggcagcctttgttgaccttcttcagtgggagagagttgatagagcttgagaccaacaattctttacccaatgacccaacatccatgacgcagccaggccagaggcaggagaaagacaggaagcagaagccccattcccaggagcacaggcaccagagaaagcaaatagaaagggcttttaagggctcccagatattttgaccctacagacataaaggccacttataaatataaacatcccacttagaatatcaatatatattcctggagaaaatatttttctgagtgaaccttatttcccagcttagtttttccactccgttttctacacagcatagttaaatgccttccagtttgggaaatttccattattttgctgaaatgatttttttagataaattattttctaggtgttttttaaatgaggatttgattcatctcatggtcttctctccctatcttgaagatctggctgaagatagcttctgctactataggaagttttggtggcattacttttttaacacatcctgctttccatatcaaattttgcagacttaaatattatcaagaagacttgatactccagtttttatttgggaacaaaatgtactgagtgcaattttagccaccgttaattttcttttgatttatttcttgttgattcctctagaaaacactgagcttttaactgttgagaaaactgtgaggcattcttctcagcgattccagtattgcctggttgaattgctaatcagtgcttctgtacattttgcatgattttgctagctttgccacaactgtccaaacataagtggggtggagatatcctgtctctcagcttggcaggttccttggtaggaaggggatgacttgccctaaccctccctgccaccagggggctcacctgggccctccacagctcatcccgctcatgggccactcgccagtgagtgtcgcccatcatggcaatgaggaggttgagcatgagcagtgtggcgatgatggcaaaggcagcataggtgatgctgtacatgaagggcaggtccacgttgtagttggctgggccatcgatgatggtaaggaacagctcgaaggtgctgaacagggccatggggtagtcgtagaagtggcctagctcctcggggtcctctgtctggaagatgatatagaaggctgctccacccaagggggtgagggttaccatggcaaccatgcagacgaccagcccaccccgggctctgcgtgcatgtccatcctggtcccttcatctcaatatcaccagctctgcagtgctccaaactttgggtttttacggtccctagttttgtatgagcctcatcttgatcctaagagccacctctccctaacactcccgatttttctcacctctggaggacgtcccatcctctgataccataggtctcctctgatctctgcattactcctcctccccaagtttagccagagccagtgccccctagacttcctcatctcttccctgccatggcccctggtcctggacagatgattacctgaagcaaagcccaggatgaccacagccatcagccagcagaatcgcatcaggtcgccaaaaatcatctagaaggagcaggaggcagagaacatctgcacacattccccaagcaattgccccatccagcctctaacaggtctcaccccgacaagtctcacagctccaccctctgggacagggattggctatctatggcctgtggaccagatctacctgacctgctttggtgtggcctttgaactgaaaagggtttctacattttttaaaaggattgttaaaaaagaagaaaaacatgcagtgaggccatgtgtggcttgcagaacctgcaatgtctactgttctgccctttatgggaccgtctgctgactgtggctctggggcctttctctagggagcttggggggaggactgaccttctgaatcatgatggtgaaggggcctagcatctggaatcctcgggcgaagtacatgacgttgcaccagcccagcacgagtgcaaaggacatgggtaccacctccccgctggcactgatgagccgcatcaccatggtcaccagcaccatgaaggcataggtgatgctgggggagcagggaggagggtgatgaggggagggctgggatgatcctggggacctgacagcaagaatgtagctgggaaagtacccacacatgcagattcagcctccccacactcaatgcccagggtcatacacacagcactagagagggggctctggagctaaggttcttgagaggtcaggaatccaaggagtggaactggagccctgttgagggaagggatgggagtgagaggaaggaaactcacatgaggacatggaatgggcccccaaggatggtctgtccaaagaagcgagtgacccccattctgaagatgtctggaacctgaagaggtcagggagacacaaaggcactcagataccggaacttgggctggattcctcgggcagacagcctcacccagagtccatccacacctcacctctaccagcaggatgatgatagccccaatgacagtcaccagctccccgaccagccggatatcgtccttaggggtcatgtaggcttcctaatgggggagaagaacagtcaaaatgctcagggctttcaggcctctgccctgcatttccatggtgcccagggtcaccagtcttagcagattctttttaatctgttaggtttgggtcttctcaaactctgctctcagagtaagagcgtatgtgtgtttttgtgggcgtgcatttggagtttgtacccatatatttgagattagagcaaggggagaaatggtgtgagggaggaaagggacaccagtctctgaggacagagagccaagtcctgccctgctgatctgctcctacaagggtgtcacctgaagtagcttctgctgtaagagggtgttgtcccgggggctcgtgcggttattggtcctgggcttgagggggcggtagatgcagcacatggtgaagcagatgatgtacagcagatatatggcacccagcatgcagaagtacggccgcccgtaccgcttccacttgaggctcaccagctccttcaccggcgtctggtccaggatctggcgagcctgcaacagaaagagaacaggtggctcagagaccctgacacccctccccagccacagcctgctgtcatgagccatacctcccgcttcttggtggtgatgataagttccagcagggactgctcatcccctgaggagtcgatctctgtgaggtcatagagagtcgaggtcagtggtccatacgtccactgggtgtgcttccgcttctgcatcaggtgctgaaacatctaagggaaagtgaagatgactcaggagcagtaagcaaaggggacggtcacagagtgtggataggatgcatgtgcaggaggacagcacccctggagaaggtggctgccctttcattttgatgacagcctttagagggcagaagaacccacattcacagtgacattcataggttcctcatcctctcccatgactccctccagagtttggaaaggagagacgagaggctggagggccctgctctgggggctgaaagggaaggtgggctggggcattacagacaatcctagcatgggatctagactctgtaacccccaatgcctcaggggaaaaggagtgggcaagaaagggaacaggtaaccacagtgggaggggttgaaaaatttctgagttgagaatgggatctaagcatcagggatcgcgttcacctctgtttctcccagggccagcgggataggttgagggtcattagaaagacacctcagggatggggaccgtctctcaccacagtgttaccctccactccagccagcttgaaaggggtgagaccctggtgattgggcacgaggtccaggggctgcaggtggtccccatgtctgtcgtaggacagcaacaggttgtacatctggcaggcaaaggttttgttgggctggaggatgaggatgtgtaacactgtgtttcctggggaggacacagggtatcatgtggccactggcctaaagtccctgatgtccccatccccaccctgaggtcttcctgaaggtcccagcccctctcctcaccctgtccctcactccctgcagcatcccagctcccctccccatctcagctcttacccagggagtcctgggcccggatgtcagctccatgctcaatgagcagccgcacgatctcctcactgttcacacaggcagcaaaggacaaagggtgctcccctgtggacacagagagatctatggtaggagagtgcaggatggcaggatggggtggacagtctcccccaagtgacagccttatcttcccccacatctcagctcagggcttgaggacacttttcctgcagaaccagaggaagggtcgtggggtaaattggcctctagtctaattaagccctagaaggattgctcctcccagctgcccaacagatacggctgaagacaggatcctcctctgcctggccctgccctgccttgcccacctttccaactgcccgtcctccaagcccagccctgctctcaccaaagtagatgaggttgcagggactacggcggaaggcagtgcctgtggctctggcagagacactggccctgcgggcaagcagggctcgcaccaggttcatgttctggttcacaacagcgatgtgcagtgcagtctgacctggcccagagacagctgtcagtcacgggtctgtccccaggatcctgcagggggtccctcccatatgcaccccagtctctttccctcaggggtagcctgggatggagaacagggagctctcgggtgttcaggattcccaggggatccagctgctgcccatctcttcctcttctctaggcccctggcatttcagggggcaggcgttcaagtgatgggcagtcaggactgacacggaagggagacagagaagagaaaaaaagagtaggaggctcagatcccctgtgtctttcccaaattatccatcacagagactgacttgaaatacccaaccagtcactcctgctcttcaccccagacccgtgggccctcaccctcatagagctcagatgtcatgggctcaaagaccagctccggggcagcctccatcagcaccatggcggcctccaggttgtcatagagggctgctatgtgtagcgctgtttcccccatggctcctggcatttacagagaggtgggttatatggcttctgtgggacagcggattggagacgatagattcagaggccaacagcacgaggtcctgggcactcctgggaggccccatgtgtggggctcacctaggagatcatgctgcatttgtgcttcttacctctctggtgcaccttgcaatcctcatacttgagcaacttgttcagggcctggacatcattatctttggcagctagaaggagaggagactcccagatcctatgaagggatggaataggaaagctggaaacagtgagcatacctagttgtggagggagaggccctggcttgactccattattatacacagatgtgtgtgcctcagcagcaggaacctcagggtcttcaatcaaggcaggtggggccattgatgtcttttctctttacagtcagtaaatacaatcaactttttgcccatttagcatgcgttttgagattgtccgtgactggtttcattccccgctaccgggtcctgggaccagaatgtatcatgtgtgaatgtattatcagtgcatttcaggtacggaggggaggagttctatgtagacatgtgcttacctgctaaccagtttacccctggagtggtcctgtttgaccctcaccaggtgccctgagattgccctccaggataagccttgttttgcatggaccgaggggtgcaaggaattcctgtctcatatttgtggagggagtcatatgcacaggctagcaggatttctcctgttgcaccatcctctgcctactcaaccttctcagcagaaccctttgatcctggcgcttccctcccaacaatagcatcttcagggcttaacacaaaagaacagtggaccataagaacaagcctggctccaggccttccttcctcataggtgttcattcattcattcattcattcattatctctgtctcttcctttctgcctctcgtctttcttctcacatcatctcaacagccttccttcttaaagtggacccctggatcagcagcagcacatgagcccttataagaaatggaaatgctctggcggacccttccacctagtgaatccaaatctgcagtttaagaagatttccagctgattcctgggcatatgaaagttggagaagcattgcttaagtggtccttgcatgcaaaaaccggtggcgataaatcagagacaagctcaggggtctcagtttccaaacagctcacattaaagtttgcgaaacagtgttctccatcattttcagaccagctgtctagagggctttagatactactttgtttcggctattggcccctaagacacaaactatggccaacaatgacagatgcagagaaaaaagagaatccaatctagaggattcattcatcgaatttcatgtgcatctgaatgttcccattctgtcttcggacccttcttggatttacccaatttgggattcatggatccgtttattttgctgagtcagattagtctctccttattatccacttctcgcttgttttaggcaaaattatcttctctgaatccccagatcatctctttattcttatacctactgtgtgctaaaaatctcttttaaaattagaacttaccccaactaagacacatgggtccctttgattcaattttctcttggcctggagccatttggtctttctatgggagtaaatgaaataactctatttatccatagtttgacaattatgtgacatacaaaaagacatagacaggagctcacattctaaagcgctggcagtggcaagaaattgactccagagctggaggtgggagggcaatcagagaggagacatcagctcactcatctcctctgccttgcccccatgcacagcagctgccaccaggtcctgtcagttcagcatggaaagctctctcttcattcagtccctacctccttgctcctgctaaccctcattaattcaagtcttcattctctagcccagattagcaaaatgctaaggataaggaacacagaagctctttaaggtctttgtgcaactacttttccaccctctgcacgtcccacccactccttagacctggcattttggtctcatcctgtctcagcactgcagagcacaccattctccctatgtctgtgcccatgaagctctttccttctagaatccaactcccccagcccgccaattgttcattgtgtcttctgcactgcctatgcctagaaatacacctaggatggtgtagatgctcactgacaccatctgtagagtgaatgaatcagcagcaatgccaaaaggtggtttgaattaactgttattattattttcatcagctgcccgctaagccaactttcagcaagcatataagtgaaaaatagtacacttggtatgcaaacacagcttcaaaacaagttttccacattccctccatcaccaccaccacatcaaccatttgcacaaagccctcctctctagataccctagactgaggggaaaacaatcgctagcaccacatacacacacacagacactcagaagttcttcactctctcctgtggccttacttttatttcagcatctttcactgggtgctgtaattgctatgtatctgtgtcccttcctctatgctaagggtactcgagggaagagaccagccactaactcttccctgccctcctccaatatgcttccacgtttgtgtcccattttgaccaaatgtgtgaaagattgatggcaaatctagaaatgggtccgagagagcaccttttccaagtccagagttctactcgctgtatcctagatgttagtggtggtatagtcagtggcaggctcaaagattcccctttggtccctacacgtctctgaagctgaaagtgtcccccataaacctccattccctatgaattctgacactctagtggcctggggaaaacaaaaagctactgtcagacccagagttgctagagttaccaaataaaaatacaggatgctcagttagatttgaatgtcagatgcacaatttttttttagtataagtatgtcacgtgcaatattggggatacacttatactagcagcctattcgttatctcaaatttaaattgaactgagtgtcctgcattttatctggcaacctagccagaccacaccctgcgtgaagagccagcttatgacccaacccagcaaggtttgtagagaactagcctcctccgagtgtgaactccagactccagcaaaaaggggggcccagcctgtggacgggttttgaaggtatccggcccagccattacttgcaataacctcatatgcccacaaggggacagcacagaaagccctagctcacctgcttgggagtaaggctgaccccaaaacacctgactctccttgggtccctgaaggaggtgcacagagctgacctactcaaagattcctgtgcttgggggacaaatagatttttcaatagcaacttatcacaggagtttagatcacaacacgggggtcaaaggcagggacacggctaagcaccctgcacatgacagccctcactgcaaagaattatcctgtccaaaatgtcaatagtccaaggtggagaacccctgattcagaggtacaatgattcataatccgttttagaatgaggattcttcactcgaaaaggaatcagaaatatcctatacataaaaatgttttcttatggatcactaaatactcaactaagggagaaacaaaaaaaagtcagatgaagccttttaagctcccactgatgaagtagtcaaaagagattatagagcaaatctgaaactgtaacaatatgaaaggtattttcaggttctagaatgttttcttttactaggcaattaattataataaaattgaacggtctagttcaacattagcctggtgaaaacccaactaaggggttcctggcacaaaatctagcacattatttcttgagcaaacagatcaatgacctccttctcagggctgcctctgggccaccagggaaggattcctgacttcctctctccgtctcctccgccccacaccctcatctgctcctccatccttgtagatgtgtgcactgtgtgcatgggtccaatttggtttttaggtgctgagaaacaaggcaggatcacaagactcttgagaaaagttcaaataagatttttagagctagaaagcccctcagaaactgagtcaaatctgctcatgaaacagatggaggaagcaagtcagagacagagccacgacgcatgccccactggtcatttcttggtcacgattctcagttttaatcagggctggaagaggagttagagaagacaggcatgggtcccactggtctctccacaaatacctttcccaccagtgagtgtaccctctgggcagggctggggctggtacataacagggttgctcggagtgcgtggcttcttgcattcctgggtggatacagtgctgtgcaggggaagttcatggcccctctcattcccgcagcatctcactcattatcacttttgctctttacaaccttctaacaccagctgaatagttctcccatgcttcagaaaaggaaactgaagcggcataaccaaatcattgccagaagatcacacggagttaaaggcaggatgcttggccaagaatccagccccaggctctgaccactaaattatgtggttcttctagttttatggctcctcctgatttttcttggaggttggggggcaagcctgagcagtgaccacagatgaaggaaagagcggtaatgtgtggggcggaggcatacattgggcacttgtgggccacctccctccagctcatgttcctggcaatggggatgagaaagccaaagtggttgtttagagatttggaatcggctgccatcctaagtgccacagctccttttgtgcacatgtctatttgcgcatttacaagtaggcatgtgtgtaagtatttaccaaggcaagcgtgcacaatataccagagaaacccagggatgacttttcagacactcaattcacacatttcatacaggtatttaaccctaaaaaaagctccaacaagcatcaccttccctccaaattgctccttagatgacaaagtgccagcacatgggctggagtggggttcaggttaagcagcctctatgaagctgcccaggacaccccacagcagccgaaatcagatctcacacttccccctctatgcttccagaacactcatttacacccttctagtgatgtctactaagcccatctttagccccgtatgtgccttcagtaaactttggtcataggaatgagaactccctgagagcaggaacagtgtcatattcattttctgcagaaaggtggagtgccttatgttcaataaatgtgtaatgcattaaatatcaggaagtgagaaaacccaagcccaagggggagatgacctggaggacacgggagaaagttgagagctcgacttggatcccagcaatgtagatttaagcagagcgggctgcgtgctaagcaccaagaaacgtccactgtaaaaagaggagtttgggttcccgatcatcctggagagactcaaagccttcctttctcactagaccatcctgtaccgcatggaatcccacgcaatcccaccccacagttctccctgtgagtcccctttggaacaaattcaacttcaccatttacttgctctagggttctgggcctgccccattcatagggggataacaggacccaccttccattattgttaccgggatgacggagataaggcaggtggtagtacctagtacagcactgggttctcaatcattgtgtgctcctttcttccattagctcacccctcacttgtccatattgttcctatttacttagtcatcccatgtttatctcaatgcccccatgccttctctttggttgacggcacagattaggaaactccccttgcaggcaatttcagcatccttctgggaagtgcccacccaaagaagagtcattgctctggacacctgatatccagcaagaagaaggccaagaaagtgcggaggccagtaaggagatcagggcagggaggggggatccctcccaagggtgacatcaagcctttctagccaaagtctgcagaggcagcccccatatgatctgaggaaaagtgagggcagacaggacatgcggaagcagcctattctcagccactcagcgcagggcctcccctctgctctcccctgatatcgcacacagggaatctccaccaccccttccaatcccccaggcctttttgcactctgtgcctggatcccctggccctggggtcctaagagtgggaagaggatgagtgaagccagtgaggacgacctactctctaacaacaatgccattctgttgccccaagatgtcatcagccaaacatgtgctccagtccccactctcccaggccttgggggagaggtgggcggctggagagacgggaagccataattcacagaaagagaccatccccaacccagaatccttcagcaaaagaaaacacaggggcctccaggcagcctccccggtcaggctaaagcaggctcctactcttggggtcagagaaaaaccctaaggcacaaagacttcaggctttcctctatgaccagacatctgcctccttcgtgacccagggaaagccccaacaggcaggacttccttctagcatgccaccaactgggtagagaactctattagagaccttgaagaagagaccacatgcagggatagccctgagttccgattccctgctcctctcctgctctgtactccaagctgtcatggtgaagaaagcaggacacgggtttaggaagttttcaggggctggaagccaccagtgaatgtccttagggcttaaacgctagagtctcgatttccaccacctgaatgcggaagagcacaggtcctcggaacatctgttattttgacccgcttccccccagtccccacccgcactgagagagaaatacacctcaaggttgggtttgagcgttgtaggtcttcatatccccccagtgctgggcaaatagtaaggccttggtcagtgtctgatgagacagatacataggaatggtcacttttttcacattttgtcttattttctggttcctggtgtccgcggttctctctgcttcattcattcaatcgttcactcattcctccatgcgaacatatgtatactatgtgttcctgccagagagactgttctagaggcaagcagtggagatacagaaggcattgtcctcacctgccgtcccctcttgggtggaggggctgtgatgctctatccttacaagccccagcaagacgcctggcccttagagaagtactcacaagaggcttgcagaatcgaattagatcttaagatagtgaacacctgtgcccatctcaaccccatcctctttcaccagccctacaggctgaggctcttaagacagaatgctcccaaggagccagtccgggcctgggagcaccatctgtccagccaaaggtgccaaacaaagacgggaggtgagggaggggtgaggggtagaggtgcaggcctggggaggtggggaagggagcagaccaagggggccttacctcttctgctgcagcaggttctgctcatctcggctctgggcccaggactcccgtctctggaaccatctgcagaacttgctccataggcagagaattagccctttctccttgggcagtgacaaacccatggggtgtagggccggctccttgggggcctgaggccgaggccagaccctgacgggactcagccttggggacacatcagcccccccaagggccggcccaccgtctccctgtagaggtcccgtctcctgtctcctgccttcctgacgagttccttgggagtctcccagcagccccagccagtttggagagggctgtgagtttgttacacttggcagagccagccaggactctgcagggctggcctgtctggagctcctgctgggagtgagcaggaggagccaaagctgcacggacacgccctccctcctcccaaattacctgagatttaaagacacaggccagccacagacctgcctaccaagggggacttgtgccaactccaattctttctccacccagggctctctccctgcccccaggccagtcacaaccagggaggccttcagaaagactggcgaggcctcccttggacgtcagaacacccagtgacctaccctgagagactctaggcagtgagaaaggaggggaggagtcagggcaggcccattcccaatgttgaggactcccaggagggagcgccacactttcccacagtgcctcttctgccgaccacctgcctcactctctgcctccccctgcttatgtcctggagaattccattttctggactcttccagtttcattcttgccaggcctgaaataggtatataaattgcgaagattctcagttctcccagactttcctctcagtccccatcacctttgggtcagcaaactttttctggaagggctgataggaaatgtaaagatgttaggttttgcaagccatgtacactctctaatgtacgttattctttggttttgttttggtggttgttttctaaccacccccaaagatgtaaaatgcattcttcgctcaccagccagggcacaaaatctagctctgggcagaccccctgctcgggagctccacagactgtccacaatgccccgtgcatggggtgggtgcccgataaaatacaggacacgtggtcaaatttgaattttagataaacaacaaagaattttttagtataaatataccccacgttttgcaagtattctatctgccagccttcccgtggaggtgacattcagctgctactgtgtgctgggccttttaactgagcgttcccaggtaaactcgtaacaaacctgcaaggcaggtattattatctacattgtattgatgggagaaaccaaagctcaccatggtaaaggaactctcccaaggccatagaggtggcagaggcaagattcacacccatccctcattccaagcccacttctttctccctagcacacctcctcattctaactggccaacagagcttcagagaggttaagtgactcgcacagtcatacagaagaatgatggcattaagcatggcccatcgtcttcccacaacaaagagctccatcatgagcttgctggaagctgtcggaaaggtcatttagttcaacttttccactggaaaggggcagaagcccgggcttatccaacctcctggtgccagccaggtgccaatagcctaggggcaggtgtctgggtgttcagagtcacaggtgtgtggatcacttcctagcttcagagtctgttttgtcctaactttctctgactcagagttggaagacccagccaggggagtgtgtgtgtggcgtgtgtatggcgtgtgtgcccatgtgcatttgtgtgtggtgtttatgtgtgtgttcatgatgtgcatcggtggggtgttttgtgtgtggtatgctgtatgtatatgatgtgcctgtggtgtgtttggtatgtgtctacgtgtgtatgatatatgtgatatgtgtaggtatggcctgtagagcgtgtggatgtggtgtctgtgatggtatgtgtgacatgtgtgttgtgtatatacgtattgtggaaagattgttgcatgtgtgttgtgtgtatggtgtgtagtgggtgatgtatatggtacctttaaggtatgtgtgcgtgtacatgatgtgtgtgtgtgtgtgtgtggtgtatagtattcatgatttgtgtagtgtatggtgggtttactatgtgtgtatgtatggtgtgtgttgtgtgtgtatgtatgtcatggggtgtgtgtcatatgtgctgtgtgtggggggagtcggtgtgtggagggaggtggatgctgaggtagggcaggggagagaaggaccccttcaagtggaaagctatttgtgttcctgccgctgggcagaggccaggccacgcagtcctgagcaaacagttcaattggattagcttcgtccccacccacctgggtcagtgggttcgggctgggttgggggaaggtgctagaacccaaaccttgaaccccaagacctttgtgcccattaagccagtggtttgtcgcttcaaagacctatttagcttcaaagaccccagtttagtgtctggtggggaaggagagaaagcaatgaggccttcgttacgctggggagggaggctgggggagggaggctttgggagggagacttagggagggaggaggataggaggaggacaaagttgttttccaatgctcttcctcttcctcagcctcctccacctggtgttgtgcatggatcagccaacagactcaaaattggggtgtccggatgggaggggaggacaagtttgcaggatataagcttctggctgcaatgttctcttggtctttggacctaacatcgtatcagtaagggaaggtggccctagggtaggtggcactacccccagaagctcctgaaagcacccccaccaatcactttcagtctcgcattttttttttttttttgagatggagtcttgctctgtcatccgggctagagtgcagtggcgtgatctcggctcactgcaagctctgcctcctgggttcacgccattctcctgcctcagcctcccgggtagctgggactacaggcgcctgccaccatgcccagctaattttttgtatttttagtagagacagggtttcaccatgttagccaggatggtctcgatctcctgaccttgtggtccgcctgcctcggcctcccaaagtgcttggattacaggtgtgagccaccgcgtccagcctcagtctcacatcttaaacctgcatcccatattgcttgtttccaggggacaggaaggatgccgtggacctccttctcccttgagactagcacagccccctctgtgccactccaccccagggcagcacctcctgacatgggaggaatcggttctgtaacccacagtcaaggagtgggcatgcccaggaggctgtgagttttggggtgaaggtggtgagggggagactggagatcctgggagagcactcacggggctggcctctcccggttccctttcccaggctccaaaaataataagacttgtgtgacttctgagtgagtcgctcttcctctcaatgattttatccataatgatgagtgcatggcctgacctcttttctgccctcgtggtggcctctgaccaagccctgaagagaaccgaaggggtcaggagccaagagagggggaggacaggactggagcaggcaacctggggaccaggtggttaaaccagtcctccctgcctggggctgagcctcaaatgctaagtgaaagtgaggtcctcaggcttccctgggggccccagggcagagtgtcagagcctcctctgacggcccctgagaggggcagagaggtcacagttacacagtcctgagctggaggcacaggagctctttggagctcctgtgcccccgatgtttccgcatttggggcacaatttctcgaccccggcactattgatatttcggaacaaataattcttttctgcaagggctgtcctaggcattgtaggaagtttagcagcatccgagcctccactcactgggtgacagtagcatgtccctcccctccattgtgaccaccaaggaatgtctttacacgctgctcatgaatgtctttacacgctgacattggcaaaatcattctccattgagaaccactgatttagagccagaaaagtatatgtatagtttttttctggctttgtcactttttatttgtcctatgtctttctatgtttcgctcaagtttttcctcttactgcctctgtcactgtgcaatagtatctctgctcccttgctcttagtctctgtggtgaggggtgtgtgtgtgtgtgtgtgtgtgtgtagtgtgtgtgtacatgcattgcctgtgtgtggtattttgggggtgtactggtgtatttctatagtgtgtgtggtattttgggggtgtattggtgtatttctatagtgtgtgtggtattttgggggtgtattggtctatttgtatagtgtgtgtggtatatgtgttgtggtatgtcaagtgtcagtgtgtggcctgtggcagtgtcccctggcctcttggagggcgtgtccttgctctctgctcatgagggatggaaccagcaaggggtagtgaggtcaaaagcattgcttactcactcagcttggagtttgttccagtcactgggttcaccagccgtgcgccaactcataaagcctgcaaaggagcccatgacagttagtgcatgcacacacacacacctgcagacacacacatgcacacacgtccctgcagacacacacacacctacagacacagacataacctgcagacacacacacatctacatatacacacctgcagacacacaggcagctgcacacacaactgcagatgcacacactcctggcagacacacacgctcctgcagacacacacacgcacacgcacctgcagacacgcacatgcacacccacccctgcacacacacacacatacagacacacactcctgcacacactctctcctactatacacacacacacctgcagacacacacacctgcactcgcacacacctgcagacacacacatgcacaggcacacacacccctgcagacacacacacatctgcagacacatacacatgcacacgcacacacacacctgcagacacacacacatgcagacacacacacatgcacatgtacacaccacatatacacacatcaacatacacacatacaccccataccacacacacacacacaaccaccacacacacatgcacaccacatactacacagcccacacacaccacacccacatgcagcacacacacaggcagcacacaccacccataccacacatacacaccacttacataccacacacacacaaccaccacacacacatgcacagcagacaccatgcaacccccacacaaagcacacacatgcagcacacacctaccacacacacgccacataccgcacatactacataccacacacacaccacacacacatgcgtcacacaccacacacattgcacacacaccacataccacacacatcatgcacacacactacagacaccgcacacacacacacacacacacacacacacaccctaccccctacacctcccaccccagggatgggggcgcggtacgctgctgcggtgcctgactggaggtatctgactgtcgcgctggctctgcagttccctgggaagcactttgttctgaaactctccaatgtccttttgtactcaaacatccagcgcatctgaagaaatatgcttcacccacggtcccaatgcacacgaagtcacttcaactttcataggtcaagaggtctaatttattgcagaactgccatgcacctttccctagaaagtgactttagtcccggatcccttttctcatcccaatcactcgttgtagctccatccctggggcttcaagccctcatttcctacctcccagtccttggccccacggagcctccgcgcccaaggagcttcacactccacacgcttccttagcaagatctgggggcaagatccaagagcagggtggttgaagggctgagttggagatgaaaatagggcacagggaggcagaggtgatgagcagccacaccacgcagccagttttaccatctagatatgcatgtgcacgttatttgacataaatgtatgcatggtgtattttgtgtcaaaatgaatcaatacatgacagtgatgttccagagcaattgtgtgtgtgtgcacgcaggtgcctgttttccagcatcttcccagcagtctatagatttcaagacccacaggcattcagtcctcctgggcccctacccctgtgtagaatgcacccaaagggcatacgtgggcatctgtatggccaccgtcccctcttctccatttctccccactgtctgccagttctcacccctctcctctcccactcccctcctcagtggaaggtgggtccaaccttgggagtgctcatgtagtttacagcccctccatcaccctctcaatgagtttgagttccccagccagaagatgtcaggggaagggctgagtgctgatctggggagaatgggtactgaccctcttgggtttgtgagaggaggcctgaagctttggaggaagcccatatgccccacctgctctgcccagctgcagctagaatccccctgccccctgcatgggtcccctgacatctggtacccgcaggaggatgccaagctcttcagtcttgccctgggcccagcctctggtccttctggccaagtttcccccaagcctcttttttctgcccctcatctttttctctcttcctcatgagaccccaagttctcctccctgtgagaactggaccccaatcctcttcactctaccatacctggccccatctcttctcttgcaggcacaaaagacaaacaagaagagaggctgcagccctttgggaagctttacaagtaggctaagtgtgccttgcagcggatcggctttctgggagaagtaaaatggaaagagcaattgatctgtaataaagacagctgcattctaaccccagctgaccagaaatcacttggtgtccttggccaagtcacttacattttcatttcctgatctacaaaaataaggactccagatattgagtgcccctgttcccttttccattctctgctatcccaggtagcccccctcagcttccagctataggcaggatggagctcaaagcttcattgtgtcagaaagggctcatctctcaggttaagcctgactgtctttgtctctgagttacacaggaaggagagagcaggccgcaggcagaacatgaagacacaaagcctctgattctcctctgaccttccgaatgacaggattctgtggtccaagtagctctggctgaagagaggatgaagctcctgaaccatggtgattcttggagctctggaaagccacagatatggaggggacaacgtgcgtgttccctctgacaaggcgggagtgggctggctccccaatccagggcagtgtccccagactctggactctaggtcaccaacagttttcactccatgagaacctggctgttgcctcttagccagagagtggggaaaggagggtatgtgggggccactaagcccagagtaaacagcattatttggggctcagaagacaggaacaagcctttatcccaaagcccatcatggctgttaaaaattcaaacccaaagcagaattcttttccagaagcatgcagtctgctcaccatagccttctgggcagcaggcctgcaggggtggcatttgattgccaatcttcccctggttgtccccacctgcacttcttattcttctctcttcaaccaacaaactcagtgaaagggcagacagtgagaagaactctattgaattctatttaaggcaagcagtcacccaaacaccccaccacctccttaaaaaaaaaaaaaaaaaaaagcaaaatgccagacttggttaagagtggaggatggtttaagatgtacagacatgcccaaaccatgggagggggacacactggaagcaagctgcctcttctgaaaggtctgggtctgaggggtccaggacagagagacccagaagcagggaaggagcagaactgagggggaggaagtcccctggaggtggagtagggacacacccaagaacctaggggctgggaggcaccagcgagtcagggtgcaaaccttccccaacttttctcacaacgggagcttcgcccctggatagaactgcagtagggagaaggtggtggctcagcctccccctagaccacagggtagtgctaagctgagacaccagggactgggcagattctgtggcagatacctgagctgggaggctgagaggaaggtggagtggcagcagctgagggggccaggaggtggtgtcccagctgggtacagggagggatggaagcccaatagtgtgttctccagatgactgttgggaaatcctggacctagctgggcaccaggagcgtgaggtcgctagtcagtcactacactaacaggaactagaaaattaaaaaaaaaaagactttagctattctgcaactccccacctccccagcctccatcacacgattcttggagcatggggcatggttccctcctgtgtgtagtgccctgtgcacgtgggagtgtggatgctggagtgtgcaacttggctttgtttgagcatgtgtgtgctggtacaagcatggggcaaggtgggaatgggcgacagctggagtatacaatgatctcccgataggaatctgtttacccatcacccctgtcatcacagagctatgtgctgtgccctgggagcagttctcctgcccggggctcccacttgccctcctttatcttctcctcctccttctccttgccttgccgaggtttctaactataagagctgactttggagtgtctgagggaaccctgagtcttcaagctgctgggaagtccaggaactgtttcgcaggcagtactgggcctaaaattcttgcaggcagaccaaagtgcagaaggaaactattggcacagggctgccgatccgagtcaacactgaaggtgctggtggatgatcctctgactgaagttgtgtgcccagcattgagggtggctgctgcaatgtactaaacacactgtcagaagtgtgcaagtgcctgtgagctgacagactcagaggtgtcttttagttccattatctgtgttcacccttgctacagactttatgaagagggttgtgctccatccaccaggatctggatttgtccatctgtccatacaacgagggagcccttgtggagacagatctctccgggagcccagaaatcctgggtcattgccctgctccattctggtgagatctgtgacttcaatcagacaatctctctgagaatcagcttccttgtctgtaaaacaggaacgcttaatactgctctgtttactttatggggttgtttttaggattaaagaagataacgaccatgaaaagactttatacaccataaagtgtcatatgaatgcaagtcacttgttttatcattttgctttggggggagtatttgaaatccaacccatctaggaaacagctttctggtagagactttagaactgtcttatctcaggggctctgaattgtgaggtagaagtacaaggtcttggagccagataaatttgggttcaaaatcagactctgctaattactggctgagtgatattagtcaaattggcacacccctctcagcctcagtttccttgtctacaaaaggagcacggtaatagtcacttgaccttaggcaagtaactcaccctctctgggccttagttgcctgtctgtaaaattaggatgacaacagctaacttgcaggctcctgagaattagatgagagagaagagtgtgggaggcagctggcccatggcaaatatacagtaatagcctctgttcttattccctcattcttctcttctatggctgttattctgccttggagccctttcagtgatagaccacattaccctctggtgagaaaatccgctctctccctccaggagactagagtagatcctgcctcaggctgttaccacctacacagggtgggtttctgtatcatcccttccatagacctcaccccctgctctcccaaagagactgtttacatctaagtctcttgttcactgttgacttgaatagtgaggaaatacgggttatggcatttcccctacaccaggctctctaatcaggccaatcctgccccagttcaggaagatgccccagatgatctgttcataaactccagctcatcctctgaagcccaacttgaatgtcacactctctcttttcttccctaggcacccaactctacccagtcagggccagtccctgcctctcctgtgcccccacctctcttccctcctgccctgcatggaaaggatcttactgcattaacattgtccctttgcttgcctatttttcccacctagagagtctcaaaggaagaggctaaatcacatcacattcttctttttccgcactggagtgcctggcgtagagtttatgatgaactacgttttatgaggaatgagctgtgcctgggaaattgcaagctatttaataggtatattttctttcctaggccccaagggtaaaggtggcccagtgtacaagagaggggctcagaaggtggtgaagaacaaggaaaggtggcagggaggtgtgtgtgtgcccggtggggtggggagggggtttttcaatccccagcccacacacagagaaatggccatctgctcttgaaagattaattggcctggataaggtgggaagggagcagcaactaggatggaggaaaggacgtggtgtatgtagcagagacacctgtctccccagccattcccaccctcccgccctgagcttccccatcaggtctggcctgggacccagagggaaggagtgatcactgacctgagacctggggggttggcacagaggccatggaacctgggattgcctccttcttgcccctcaggttcaccaagttcacctgtggagggagggagagagagaagggaaagagacagagatttctgcctgggtaaagaaagaacaagttgcttgggcaacatggctaaaccctgtctctgccaaaaaacaaacaaaaaactagccaggcatggtggtgcacctgtagtcccagttatttgggaggctgagggctgagttgagactgcagtgagccaccatcacaccactgcactccagcctgagtgacagcgtaagaccctgtcccccaaaaaaagaaagaacaagttgttgcaaccctccctttgcagctgccctctctggatgtggtttatttagggagaagagagagactacaggatgaggggctggagtctgagagttcctgaagaagtaaagagccatcattggggggttaccctctctgacctatgggcatgacagaggctctaaggacctggccagtgtcaccttcatggagccatggccttttatttctacatctctttcccttatatccttatttctgaattggaagacagtgtccagagggggctcagaaaaagcagagggagcaagagcacaagagaagggaaccagggcagcccaaggtattgcaatcactccttacagcagtaaaattttaggaacgtgtgtgctttcacatgcttggtgctattttcttgtcataatcatgtcaggtacacaagtcagaaattatcatcatcactgactgatgtacaggtttcctcactaataccatggcagagctggggagtaaaactgggttttcacatgcacacgtcatccggcaggggcccccgttctcgagggagctctgctcatggggatgagaaaagaggcagcggctgaggtggccttgggttaaccgagcacctaagacagtaccgaccaaagagggccctggtggtggttggggcagggtggtagtgatgatgtgtcttggaggcaggttgtaaccctcagtgggcaccacagtttggtcaggaagaagaaaaaaagcagctcaagtaaaagggccaaagaaagaaagctttgttgaaaagagaatgacctttaagaatcatgaaggaggctgggcgaggtggctcatgcctgtaatcccagcactttgagaggctgaggcaggcggatcactaggtcaggagatcgagaccatcctggccaacacggtgaaatcccatctctactaaaaaaaatacaaaaattagctgggcatggtggcacgtgcctgtagtcctagctactcagcaggctgaggcaggtgtatcgcttgaacccaggaggtggaggttgcagtgagctgagattgcgccactgcactccagcctggcaacagagcaagactctgtctcaaaaaaaaaaaaaaaaaggaatcacgaaggagaagctcttcctcacaggtaagtgcaggaagcactgcacaggtaagtgtggaggcacacactcaggcttgccatgctgcagctggcttgcacaagcccctaccccctcaggctcaattgatcctaattgccgcctcctcaaacccagggataacaaagaggtgcaagcaaaatgaagaaggtgtgtccagtccttccccaggtggctccaacctggctgccatcccagggcagagaggggggggccacacttcaccaacttctccctgtctgcatgacatcactcagcattacctggttaaagtatttctcaccatgcccatttctcatcttttcctcattaacctttaagaaacaagtgagcttgactcaaggaggtaaatgatccttgacctcatgtcaaggcattctctcagtttttcctggagtgatctcaggtgtgccaagcagccttctggatgccattgttggcccctctctctctctccaatgtctcttctctgccctgccatgcaatgccatcctgctctaaggacctgctaagacagccctaccttggcttactctctccctcctcctttttttcccctccctcagctctgcccagaccttatcttgcatttcttcagatgcaacacagggggaggaatgctgacctctggcccccattcctgaggcttccggcacagccattcctcaggtgcaactcagctgttcttaccagaacccagcaccttgtcaataacatactttgcaaacgtctgagggagggaggcattttaaaagtccagtgatgcctctgagaacaacattttctttttcttttcttttcttttttttttttttttttgagatggggtttcgctcttgttgtgcaggctggagtgaaatggcacgatctcggctcactgcaacctccacttccagggttcaagcaattcttctgcctcagcctcccgagtagctgggattgcaggcatgtgccaccatgtctggttagtttttgtatttttagtagagatggggtttctccatgttggtcaggctgggcttgaactcccgacctcaggtgatctgcccaccttggcctcccaaagtgctgggattataggcataagccactgcacccggctgagaacaacattttctcattgctttccagcctctggcctatgagacatacagaagcatgaatatttttttgcattctatattctgaaataatcagggatgggggagacagagggggaagaatagtaaccatttgtgggtacctgaagaattcctgaggcagaacgagcagtggatatttcttctactccctgtccctgtctctgaagtcctgtatagaagccttgcagctgccaggcaggaagagacatttgccatctcgtttagcacacgggtcacttcccacatctgccctgcagtgagctgatgtctgtgtgtatgtgttctcttcccttctcacttgggctcctgagggcagatgtggaatctcacagattatcttaatgcctcttacagagggtaccacataccagacagtaagtgctgtcccagagctttgctgaaggacttcttgcccccttttcctcctcctcctcttattcttcatcttttttccccttcttccttcttctcttctctgtcagtccccctcctgccccttctcctccaccacctttttcctcttcctcctccttcttctcactctctctctctgtgtctcatatatacacacacagacacacacacaaatacatattcacacacacgtatatttaggctaaaaacatgttctagcaatcacatttgcattggtttttattctttccaaagtgtttccactcatattatgtggtcatctttaattactacaacctcactcaaaaggcagctattttttttaccacctctgacaggtagaaaaaaagtggaaatatgtgtggccagtaagaaaagtcagaataaaaataggtcaatcattcatagattcagttaataaatattcatttcacaatacattgtactaggaattatgccaggtactgggaatacaagggtgaataagatggacatcatctttacgtttgtggagctcatagtcatttaaacaaacaagtgcaataaagtccagtgtgtgtaataaaaagaaaatataggtggtctagcaacataaagcaggtagtctctaacctagtctaggagtgagtcagggagccccctctcttaccacacatgtgcacattcacccaccctaaatgtataatctttaagctgagaccaataggatgaataaaagttacagcgatgggccgggcgaggtggctcacacctgtaatcccagcactttgggaggctgaggcgggtggatcacgaggtcaggagatcgagaccatcctggctaacacggtgaaaccccgtctctacgaaaaatacaaaaaattagccgggcgtggtggcgggcgcctgtagtcccagctgctggggaggctgaggcaggagaatggcgtgaacccaggaggtggagattgcagtgagcagagatcatgccactgcactccagcccgggcgacagagcaagactccttctcaaaaaaaaaaaaaaaaaaaaaggcacagcaatgaaagaggaaatggaggcagaggggtagaaaggtccagaaattatgaaagccagggggaaggagaatatagcactacccaggaataaaaataatacatcatggtaaagtcatgtgcagaatgagacactttaaaatatcctaagtgacaaaagcaacaactccttttctaatctactaagctattatatgtattttaagataaacatatacatacatatacttggaaatgtctagagtatttttggaaggataaataataaactttcattagtgaatgtccctgagaataacaagcaagaggctgagacagagataagagagcttactttcctagatatcttgtgtgctgtttgggttttgtaccttgtgatgtgttatctaatcaaaattagttatttttcaaaggagaaatttagggactagactatccacaagacgtgagatcaactggatatgagagttgagatagaggtgtggaggatgggacgcctaggatcctggcttaggcaactttgttgtgctaccacatacttggttggaaacactggtggaggagcaggtttggtgaggaagaaaagctgttcagtttgggacatgttgagtttgaggtgtttgtaaaacatccaggtagagcggtccaatcaataggcgtccaagccgttcatgcctggagctccggagacagatctaaggtgacgataaggagctagggattctgagcttgtgcatggtaatctattgaattaggcaggactacccaggtggtaaggaaaacagcctgtggactgaaaatctttaaggggtcagtggaggagaagcagccaggacagctgcgatatgtggcacaagacgtgttgagaagtggcgcacaattaaccgtaatctgaatgctaccgagtgttcaagcaaaactaagactgttcagtggatttaactacaggtatcagtatcacggagaaggcagggtcaaatcacaatgggttgaggtgtcagtgggaggccagtagacaatgggatttactcttaagaagtttggccctgaacagggagtagctgaaagaagaggtggggttgagggagggagtttgcagtttcttcgaaaatgcaaaagaatagagcatgcttatttgctgacagagctaccagggaaggagaagttgaagatacacacgtgagaggggtcagaggagacagtgatggacacagggtgtgaaaagacagagtgaggaatggatctagaacacagatgggagtttagctttgcacaggagtggaagttgtaaactgagaaaaagatgtctgagacaagtctcgatcaatttacaggtttattttgcaaggttgaggacacaggaaaaagagacacaggccacagtaagatctgaggcctgcactttttccaaagtgggttttgaaggcttcaatatttaaaggggttaagtggccaggaggggaaggagaaaagttaaagaaaagtggcggagagtagacaagtggttacattcttttgaggctttgattagtgctcactgaatccacatgttgcatgtgagaagcaggggacagaggaacagtcatttatgtatttgtgtcatgctcagtaaatctgcactttacataagacaaagtaaattagaggaagaagtcaaatatgccttcatcccagggtaggaggagggacgatttctattcttctcttctcctgtacccgtgaagataaactgttaatttataatgtcagggtgaaggaggccatctggggagctaatgtggccttctgtcttgaggctatctgtttaggaacaaaaagacaggcagtttccaaactttttggaagaaaggcaacttccaaaagtttgactcagtttccaaacttaacttttccctttcacatagtgagtttgaggtcccaagatgttattttcctttcacatcctcccaccctgttcttccaaatctttcagggaaagcattgtagaagaaagtgagtgtctgatctcaggtttggtctgatcccttgtcactaggacagtttatttctagagggttaggtccctcattttagaaaggatcattcttagcaggttgtgaagtttcatgttccacagagaaaaataggggaaagaagagagaaagaaaaccagtagaaaaggaggaaagatcatgacaacaaaaggggaaagtaatcctggaaaactgatttaggctatattgctctgaagtccatgaatgagtaggcaggcacaaaagtggtttatatatataaataatttgctgttacttttcccaaagtttaagtttcaagtttcacttggcagaactttaagaaaagcacagttttaattttaatttaattttaaattaaaatttctagttttaatttctagattccaaatgagaaaaaaaagggaaaaaatgaaagaaaaaggaaaaaaaaaatgaacagtagtttggagacttgtagccaggaaaggacttaggattcagtccaaatgcattttaacaaagaatgaaactgagaaacaattgataaggtggggtctaagaagaggtgttttatatgttttttttaaaaaaaaaaaacataatttttatctcagtcctccatttttatcaaagacaaatcatagtaggactaatttatttgtaaaaaagctttagttgtattatacttcacctgattctttgtataaagtgcagcaagaataattattttctatttaggcttttttaaaattgactttgctggaaacttttttatttaaggaatcttagtttagactttttaaaggccccaagcccagtcaagaatttatttgtgcctgcagatatctgtatgaactgggcgaatgcctctcttcttaatcccaagataacttggggttcccgggcctgccagaaagtaacgttctttacttatcacaggttgggaaccctgtaaaagaattgtgtaggcaaggtacaaggccagtttttttaaggatcttttattggctctataagtcaatggcaattccttaaaacagtttgttgttttgtttatagcttaaaatatttcattctagtcaaagctttagtaaaataatagtctccaattgtgtcctgttacaaaagaaagcagattcttattgagctcatacaaataactatattgttataaattaagaatactcaaaaatagttttcaaattctggagaaatcaggtagagagaaagaaatatgctttaaattttgctcacaagagcatattttactcaattgttaaaagctgtaaacaacccaaaaaatgaaaagaatcaccaatgtttcagacaaaaagatcacacaaaaaattattttagtcttctattagctcagttcatgcaattaacctctgttctatttgatattgggtcaacaatcctcatgaatacatcagatctccaggagtgtcctggaagatttttttcctctattttaatggcacaatctccaaagctgtcagaaacctgcatttaaaagtatccatctgatacagtttggctttgtgtccccacccaaatctcatcttgaattgtaatcccataatccccacatgtggtgggagggacccagtgaaaggtaattgaatcatggggggcagttccccccatgttgttctcatgctagtgagttctaatgagaactcactcattcagtgagttgcccactgtactctagcatgggcaacagatggttttatatggggctacccactttgcttggcacttattctctctcctggcaccctgtgaagaggtgattctccagtgattctaagtttcctgaggcttccccagtcatgcagaactgtgaatcaattaaacttttctttataatttacccagtctcaagtatctcttcatagcagcatgggaatgaactaatacaccatcagagtcctataactgattataagcaactttttgaaaaggaacaaagtaaaataataattgtgaatgacaaaagatatccacagtcaaagatataattgacaaggaaatctggttatttctgtggcacacaataatttaccataattataattattactgatcacatataccaagacatattaaaattataagaatattatacaattttggaacacataacaatagcacatttatataaatatatttcaaagaaagttacacaccattttatacttggcaatgcctcctgtatgattttaacatatcaaataagccaaatatgcctctgttggacatttaaaagtcagtttgaggttaaaagactgcatttagaatttaatcttggaaagttagtccaacattaaaagtttaaagcacttgatatcgcaaaatgagattacaggtcattataatcatttagctaaagtgataactcaccaattttaaaaaaaagcagaaatctttactccttgataaagaagacctcagttttctaaaaaataggacctaatagagacagtgtgaagccaactgaatctgtctctctctctccttcttctttaatttttttggcagtttattcaaagggcaaatgaaaatcttttactatctcttaatattatacaaaaatcttatttaaaagagaaaaccaaattttatttttgtattactgtattgttaattctaaagctttaatagaatcttataagcaaatctaccaaattttaattagtttgattgtaaggtaagatttccatgaggcttttataaactttacaaatttgtgttaaagaacacatcaatattccaagaaaatcctgcctcacacaggtgctcagattctgaccctgcatcaatgtgctatttatatgaatgttcaatttgtataatatctaaataatccccttaaaattttagccaaacttgatcacacacaaaattccttttacaagatcaatcttccacaaaccttctacgacttgcttaaaccttcagttttgtcgtttctgttaacttgaaacagtccttaaaatcctctaaactagaaaaaaacactttctcttaaaaaagaaccacactcccatgacttattttaacatttgttctccaaaaaaaacacagcctacctgtttaatacacattgtatgtacctagtagttttaattacattcattaatttataatgttaactcttagtaattcttattttagtgaaaaacctaggcagtaagcaattttaattacataccaggtgcacaagccaggacaaaggacaatacctgggggcaggccaagggctcaaatcaaaagacatataagtttatagacaagttaagcaagtattaaaaggattacagggctagtgcagtggctcatgctgtaatcccagcactgtgggaggtcgaggcaggtggattgcttgagaccaggagttcaagactagccatgggcaacatggcaaaaccccatctctaaaaaaaatacaaaaattagctgggtgtggtggtgcacacctgtagtgccacctacttgggaggctgatgggggaagattacttgagcccaggaggtcgaagctgcagtaagcagtgatcacaccactgtacttcagcatgggcaacagagcaagaccctgtctcaagaaaaaaaaaaaaggactacagaagcagaattttaaagtgcttctactatgaagagaataaagaagaatgatggtgactgagcagttttacataccctgccaccactgtgtcccagtgtgtgcgggcgtgtgtatacacattgtgcgatccctcactgctgggcactcagccctgggctggtgtatctgaattaactgtctgtggtttcacaaataccacttacttctttgttatcccagaccacagtcctttgaaaagctgacatggctttttgctaagggtgatgatggggctgggattagaagtatagtgctggagacacaagagaggctgaccatgagcacctataatgggtgccctggacacattattcctaatttccctcctggagagggatgacccttcctctattgttgctgttcctttcacaactcagtgtggggcaaagggagatgggaatggaggatggctatgtcaggagaacaagcaggagcctgttgcctccaggcacaaggatgattagctgctagggacagagcaggagggtcctggaaaagaaatgattaggccattcaaatataggcctaatttaccatacattcttaaaaacacaccaggatgcaaacacttcagactgtgagcctcaaaaagcaaagataaggcaattcaacaacaacaaaaacctaattcgaaaatggacaaataaactgaaaagacatttctccaaagaaggtatataaacatccaataaataggtgtataaaaacgtgctcagtatcattagtcattagggaaaggcaaatcaaaactacaatgtgaagccacttcacacccattagaagggaatgtaaaatggtgaaagctattgtgaaaaccagtatggcagttcctcataaaactaaacataagaattgtctagcaattccatttttaggtgtatgcccaaagtatctgaaaatagaaactagaacagatatttgtataccatattgatagcagcattattcacaacggccaaaaggtagaaaaaactcaaatgtccattggtagatgaataaataaacaaactgtgtcaaattttggactaagattgcagaatcccacttacataagatacctagaatagttaaattcatagacagaaagcagaatattggttatcagggaccagggcagagagatagctggagagttattgttcaatggggattagagtttcagttcggaatgatgaaaaagttccataaatgaataatggtgatggttacacaacaatgtgaatgtacttaatgccactgaatggcacatctgaaaatggataatatggtaaattttatgtgacatgtattgtgccacagtaaaaaattaaagaaggcaagaataaggagacttttttattgcagttggtgtttgcttgctaagtggagagagagacctacaggaggctgggaaaaaaagaagggccacaacctctatgccatgcctggctcttcccacgtaagccctggggagccagaatagcctcacagcttactactttctaggggctgcgtggggcagaagagaaatggtcctgacattaatctagcatccctgcctcatgtctttagttgccaacctcctttttcctgagatgggtgacttgcaagagcccagaaaatacgtgagacaatcgatgaccattgcccattgccagaaattctgatgtgaagtgtgaggcatgaccctttagggattgttctgtctcaccctcccatgattaacaggcacagaagttagacacttgcataggcagaggtctccgtctctgtccccgcccccaggccaaccgggagtaaggtcaagagtgatagcgatgttaatcaaaaatggtagacctcctctccatccccctcactaaggttcagtccaagattcaagtgccccagggtgttttgacgaaggatctcccagcctcggtgactgctgctctgggacgcggtccgggacagggaggaagttggaagagccaaagaggctctggctagagtcccactctcagccccagagggctgtttctcagatggatgctcctggtcatcctccttgtctgagttcttgaacacttccacatagcgaagcactcgcagaggattctgatcattgtggttctcaaccctgataaggggaaaggggaaaggactcaatccaggtggggagacatgggcaggggagaagtagaggtgaccatttagaaagcagggtcaagagggaagcagaaataaggcagcagagttgaaacaggaagagtatctgggatcaagtgaagggaggtgatggagggcaggctaacctgggatagagataatggaggctgagcaatcagggcttgcagggtggtaggacgcacacaggtgtgtgtgtgtttgtgtgttactaatacgtaggaatgtgaaagagaaaacagagccaactaatagataagcgtgtcacaaggatgacgagatgcaattcaggaagtaaatttgaggagagaggagagtcacgccgggagatgagggcagaatatgaaggaggaagttagatccaagccaaaagtacactggagatgaaggtcagctcagaacaaggttacagcaagtctggtaacccatgctgacgtctgagcatggacacatgcacacaaccttttacacgtggctgccctgaggtacacacagcattcttcgtacccctccacttcagctccagccccctcccctagacaggctaatgcaggctccaggacgcctgtcggtcacccttgcttccgtggccttatacacatctgcagttttgcatgtgcacaccatcactcaccgcaggaaccagcggtcccccagcccgaattcgcacccacagatcccggagcgaggccacaggcagcgaggcagcttccgctccagcatcactgtggtggccacgacctggaaggaggcaggagatacaggaagaactctgaaagagccatgaggttcaaagaggcactgaggccactgataaagggaaccaaaggcaatctgtgagataggacactagaggtcagtggtgagaacagccacctattcaccccacagcctgtgccaggcaccatgcaaccagcttcactcatcaagaaatgagagaggattttttgtgagtgttttgaataaaatagttgcccttacattactattcactcatggagaatgagtcactccaaactaatctcaacttctttttcatataaaagccacagaccaattatctcgatttaaataaaatgattaaagagaatctctacgatcttggggatgaattgatactgttactgttcagggaattttcagcaaattaaatatccacatcttaggaaggaaaagggttgattaatgactgcaagttggcagggaaatttctggtagcaagtccaccacacgttctgtcctttgctcagccctcattaattacttagatgaaacatggaaaacaagcttatcaaatatgcctgtgacacaaaactgggagggatatgtaatatgtggggcaacagaagcaatataaaattatctcgctagattggaatgctggtgtaaaatcattaacaagaaatttaagtaaaccaaatctaaggtcctatatttacatttaggaagcttagataagtgagtcatagaacaaaggtgtgggagtgctagctgatcacaagcttaataagggccatttgtatatttgctaaaagacctgactcagctttaggtacccttagcattatgtccaagtaaggaaaggcatagtcccgctttgtaccgcattgccctaatcatactggggactattctagtttcaaagaaaccatgatctattagagcatggacaaaagggtgcaatcagaatagatcagaaccaggaaggcttcctaattgaaggagtgcaatcttcaaaatagcaaattcttcacctcatgtttttctactccctatcttcctcattactccacacttctttcagtttcttaattgcaccaagttccctcctagctcaggacttccagtcattctgtgctcttaccctggatagctgttcttctttgccttgaaagaaatgtttattgttcctcctgagccatcatgcagccccgtccttcctcgggtaacagcacccatttttcatttagggaattgctccctcatcacttttagtgcattggtttgagtggactgggcttcacacagttgtgcttaattaatctattttcccccaaacctcccctccaccaccatcaccaacacctccactatctagtccttggtctttccttagattcaacgatgtgcctatgacccgaatgtgttcccatgagatggaacatggaaggaattggcagggggaaagatgttcttttaaagcctgcagttttgcctggcaccaggagcctcacagaatacaacgtgagtggggccctcggagctgcgtgttgcattgcacatcctcattctttttggagtttggagcttctagaaatgatctcacaaacacgatgggagagcttgccttagaagagaggtcaaaagagagccgaacagaggaatggatgtaatgtataagatgtggatctgcattctggccagatacctctaaagttagtttaattctctaaacttcccatttatgaggactaacacatcctcttccccctgtttaaaaatctgcaagtctgtttgagtttggttttctgtccctgtagccaagagtcctaattgctactaaccttgaccttcatccttttccctccttccttttaactacctagttcttgctcacctttgggttctcatcttaaatgttgctccctcaggaaagcatgtcttcacttcccagtccgattcctctgttgtatcctcctcttagcaccttacattctctatagcacttttgctgctgtaattttacagctttttgtgaagtcattcacttcatgcccgtctttccaactaaaccgtcagctccatgagggcacatatggtgtctgttgtgtttatgctcatgtccctagctcctaggcatttgtcaacacatagcagggtctaaatgatcatcattaaatgaatgaaaagtctaagggaaaaatgatggctatattcaaatatttgaatggtgcttatatggaagaatgtgttctgtgatatatgagagggaaagactggcgccaaagaatgaaattttaagaagataggttttagctcaatgcgacataaatgtctaataacaaaatctttaaaaatatgggaaaactcccttcctcccaacctctacctgaatttgcaagataataaggtcctaatcagcattagagaagatattgaatgacattctgaccaataaatgattattatgttaagtaggaggtcaacttgagggccattgagggtcacttctaattctaatatttatcagtctatggtgatataaagaaaagatcatagagaaacagggatttacagaagcaaatagaagataagatccaaattgaaaactggaatataccagaacaaggtcacttctagttcccactggactcaaggatcaatcctaggtctacttttcccctgtgagcaacaaccccacctcttgccactatcgtccatttaatcctccttctgtcccttccatttatccacatgtacctcaggtttacacaaacctcttctgaggtgacagcctcactgggtttttctgtgactcttttaagaatgatccaccataacattttccactttgatttttctctccaacccctgcttcttagcaagactaacacaaataaactcacctgggccctccagagctcatccctctcctgggccaccctccagtgggtgtcgcccatcatggcgatgaacaagttgagcatgagcagtgtggcaatgatggcgaaggcgaagttgacaatgctgaacatgaagggcaagtccacgtcgtagttggcaggtgcatcaataacagtgagaaaaagctcaaaggtggtgaacagtgccatggggtagtcatagaattgccccagactggttgggtcctctgtctggaaaatgatatagaacgctgctccgcccaggaagaggacatggagatgggataatggagttatcacaataagcatggacatggttagcacttattctatctctgatctatctatctatctatctatctatctatctatctatctatctatctaaatacacttgcacacatgcacagataattacatactaataaatgtagtttcctgtggaactgtctaaccctaagatgtcctatgattaagttcaccactctgggtaatggtcatggtaatagtcatttaacaacaacaaaattgtgtgtgcagcgtgtgtgtttgtatggataatggataataggtcacctaactggtttttgcattttagaaaaccaaatacttaaaaggcaagttattacaagaatgcatggaatcctcaacaatttttaaagaacagaacacatgaacaggctaaaagaagagccccttttttaatcttgatggcctctagataaccctccatcactctgaccttccctgagtgaacctgaaccaacataggaaacggattcctgcttagggtggagcctactggatagcagtgagcgtaagggaacttcaggacagcgctggactgcttgaaagcctcctcactgcatagggagctgaagcacattctgagagcagaaacagggtctatgacaaagcattgcctccttatttatttaagagaaaagcaagtgcaatggccaagaagtgaacatttagagagttctggatagaggacatctacagaaagccactctgggaccatcacctcattttgtaatctgtgttatgtatagatgtagatggccagggagtgggaggaaagggtacataagggcttggggtggaaaactccaaacaggcagaacgccatggttttactctttcacatttcagattttggtgggggttttgttgttgttgttttgttttgtttgttttttgttttggtctgttgttttgtgggaatccccattgaacgggaaatccctgaggacagtaatagagtcctctgcactgagtcattgctttttagagatggggggatccttctagtgcctcttcttgtctaatagatggtcagttgcagacactgaggactgaatttgagctactggccttttgcttttcagacctgggccttcctctttctgcccctccctaaggactttcttctgctcctccacccaccctctccttccctctggctgtttccacctgcctgtgttttcctgctgtgccgttcctttcttttgctccctggcactttcactggctgtgccttgactgggtgcctgtgtgttcctgttctcccagtctctcttcacaactcttcttttttgttttctctgtcatcttcaaactgtccaagctgtttttctgcacctcctttttctaattctttcatatttttctcagctttaaatgaccacatatagaaaaaaagcaagttatatgttgttgagtgctttatgtttcctcttctgaattgtaaacataggagagttaagcatggcactatctctgtttgtccacatggttttctgagatccatgactggccagtctttcctgtttaatgccctgttctcaccaaaagtcttttcctgtctctcctttaaagatcttgcaaggcagttagtgaacataaatcttattggccctgaacacatggctttacgttccaggccaacctgagtggcccctggtcctataaatatgggtgtgcttttagacttaccttccaacaggaaaaaacaaaacaaaaaacaaacaaaaaaaaagaaagcaaaatgaagtgcaaatgagaactgagagcaagaatgagagtgaactttctggagaactagatctgctgatctagtagaggagtgtatggtgccttaccggaggcaaatcccaagatgaccacagccatcagccagcagaaacgcattaggtctccaaaaatcatctgcaggaaacagaaggaagaaagggtgggatgattccttttccactgcttttgagcagctaacgctaacagatcaagaggcccccatagttctaccagctccattctacctccatccctctgtctgtgaaggtcttgtgcctgaggcggaggaagcttcgggaaagcactgaccttctggatcatgatggtgaagggacccagcatctggaatcctcgagtgaaatacatgacactgcaccagcccagcaccagggcaaaggacatgggcaccacctccccattggtgttggtgagccgcatcaccatggtcaccagcaccagggaggcataggtgatgctgggggagcagaaagcagagagtgagagacaagctggaactattttaggtccctacagcatagtggtgaccagggtggtacccacacactcaggcttagtctttacacctaaaacgcacatacagttacacctacaagtccactggagagaagtccttggagtgagagtgacctgaggcctagaactcagagagtgagctggagacaggaaaagattctggtaaggaaaggcagggggctggaatgaggggatactcacatgatgacatggaatggccccccaagaatcgtctttccaaaatagcgagaggcaccaaccctgaagatgtctggaatctggggagaggacggcaaagcaaaaatacaatgtggactgcggtacagtctgggccttagatgggatgggattagcctggaccccgcctgcccctcacctctaggagcaggatgatcacagccccaacgatgctcaccagctcccccaccagcctgatgatatcttcacgtgtctcataggcctcctatgtggggaaattcagaagaagtgctttctgatgggcagagtcaaatccttttgtgcaaatgatcgaaagctgctaaagcccatccaaaataaaggaaactccccttcccaccagcatcaccccacccccattgtacttgccattgtgggtaactctgtgaccaggacaggagtctatgtatccaaggtttaatagacgtcacatatgctaatgtcttgagctaccatctagcaaaatcgccttttctatagatgctgtaagcagaaatttatgatgtatatactgagcagctgagaacacatttcagcgcatcaagtgagctaacaggaagaggtattagtggcttgggatggtttcagctatgtggaaagtccaccttttccaacctcatcatggcttctagtgggaagaatacactgtaaacatatcacagaattcaggttccctcacggatccggaatctactacctctagtgagaccttgaaccattcatggaaaatctctgaacttgaggtttctcatctgtaaaatggaggctacagtgcttacctcccagagtcattgtgaagcttacattaatgatatatttacatgaactttataaatcataaatcactatagatatattcactgtggttttatgatgatttgacattacagaaaagagcagagaaggggctagagacactatgaggaagggtccctgcctatcctgagcagtagttgtagaaggtatagtccaagggtcaaggtggaatgaagaccaccctacttcaatgcatgttacttcacggtgaaacttatgcaatatcacagatgtagtgctagaatcctacattaattatccttatgtttttgaagttatgagctcacttgaaaacataataaaaactgtatatcttctttctacaaaactgtgttcccatgtagacaattcccacatgatattgcacaaataatttcaacacatgcaagcagccttttgacttttgggagctctgttgtccaaggtcacatctccaaatagtgcacccaagaaaggagttgagagtcccctggggccagcaggaaagctgatgatttgagccagggagaatgtggtccctagttagcataaggaacggcaattatccctgctctgctaatcagctggaacctgtaagcatctctccagactctactgcagcagcacactcacctgcccggtgagaggcagtgcttttaacacagggaaccaagagagactaggagagaagcttctgtctgtgtgtctggagaactctgtggtctaacaacctgtgaccagacatcagtcaacacttttttttttttttttttggcttaaaaaatggtatgctctgtaaacttttctgacatttatctcttgagaaactggtaaattttattttatcatataatagcaaatttctttttttacttgcttccaaagaatttcagagtttttgttttgttttgttctatttttttgtgtgtctggtttttttttgtgcggtttttttgttttgttttgttttgtttttttgtcctcagctctagcagctatctttgaattccttctcttctctcctgaaattcagttcacggactgtgttctttttctttatcttaatgtttctatagcatctgtcttttattgtaaaacatgccaactccttcacagagtcaggtagtgagtaggaggataaataacaaatacattacttcagaaacaaaataacattaaatatagaaataactgcatctatgccatatatgtgtctataaaaatatttttattttaaaaatgtcgtgtcttgatttaatatgtctgaaaagatgctaccaatcttttcttggctcaagaagaaaaggactacacataagttggcgaggatggctgtgaagatcagggtgcccctagaatccagccagggagtcacagcagccattccttcaggagatgaaaatgtgaaacccctctaatgctggggacagttttggtcaccaaattctcctgctggggcttcctctcaccagttcaacagatttctttacaagtacgcattactctgcacaaattcactaatgagtaatggaggtgttcagaaaccccaattttttgcctctgcactgcctgggatctgactgacctagagtagctgcctccagcactctgtccccggggtccttacccttaaaccaggctgcaaagtgccacagactcctgagagcccccttccttgctgctctacaagaccagaatacaaacccttctgtagggttttgtttgctttgttttataaactaatctctctggaaaacaaaaacaatatatgtatgtaaaagttgcaatagaagtaatgataatattgggcttttaaagcactttgattttctttagactttctggggaactccagtgtttcacactgatataaaatgttagctcttgctttagaatagatactctttgcaaaggtaaggaagatttcagtatttcagaaatggaaaggggcattaaattgaagtgctaataggcttcccttttaattaaccacccttgcacccctagaattaaaccctaagcccaaactgtaatggatgtttcttttaattttaaaaattttattctttgggaattgcattcaagatttttttttctagattgagatgctgattcacaactctctagatttagggtccttatgaaaatattgttgcctggttatgtttggcaaagtaaattatcagggcacccattctccagccttactcattcagttcccaattctctctgacatgttttcctttcccttggttaacagaacttatgccttagggcaaacccatgccatctaccatctagtttaccctacatctatttccgctcattcaacccaccccgcacaatgcttctgaattgacctttctaaaacacagatatcatcctgagacttatctgtttaacatcattcctagctccccaatgccttcagaatagaaatgcaggagaggtggcagtggagagtgttctttaatctttatcgtcacagaaattcactagataatgtctaaatttgattagcaagtagagatagaaggatttgattccagggatgtggaggtgatgacaggaaggaagagctaaaagaaagaaaaactggttgtcccctgtgagtaagacatgggtgagaaagaggggctgtccaggacgcagttgctctctatcagatctgccacttgatttgtaagtcatgagcacgatgtacgtcattttcttttaattaggaaagctcactgtgagataagaatttaaaaaataaaaccagagtaccaaacgggatgtacaaaaccctccctgctatggcccctgccttgtgtcctcataccctgtgtgagctctggccacattgagctattggggttctgggttgctaagttgggtctctgcacaggctatgccactttgtcagaatgccttcctccaccatgttgacctggctcaccctcaccgatgcctcaagactcaggtcaggccaacactcctcctgggcctcctttcctgcccctccatgcccaggtcatgtgtctctcctgggacatgtggggctgctgtgtattgacagccctctcccagcacactgaaagtgtctgggtaccccatgtctcaccagtagtcttagagcttcctgagggcagggatgcctccctcctactttttatccacaaatgcacacaatgtggtaggcactcagttggtaagaaaggaaagaaggaaggagaaaaaggagagaggagacagcaggtgcaagttaagcattgcctaagagacgcagaagggtggtaaggaggacaggaagcggggatggagagacctatctggaggcctaagaggaaaagaatgacaactaatcgtgcttttctgaaattttcagattcctagatcaaggtcacctaagcaggcctggctaacaacgcacagagaaggtactccaatacatccctttaaaaataaatatcatctaacaatgactggaattttttactccacaacatggcttgcaatttaatgagctttcaacaaccaaatcccctatgcaggctggcatttatacgtcactgagaattggcctaatgagatttgctctcacttcccagccagctgagttcattgcctggaaggaaatgcccagaaggagtgggcaaagcagtgcctggggcactactgggtcgtaagggccagggatgtactatgtggaaaggatggggaacataggccaccacagtgggaagtgggtaggccccagaaccagttgtccagcccagctctagacctttttcccccccatgatcccagacttgcaaaggaatgaagttttcagagaaagctctgctagctcttacaaagagcttctccgattccctaactgggcatgagttcctaaccaggactgcccatcagaatcaagtggtaagtctttgtcacaacacacatgtccaggccaaccctgggttaatttggatcaagaacctggcatttacttgaaaagttctgtagacgttttggacgtgtatcccaagttgagaaccgctgggccataaagagagagagagagatctggttcccatgtaagtcaagctgccttccaaaggttaatttcatgtcccagtctctgcattttctcaggggtattggcttgggagattacccctttcttctgaagagtctccacccattcccacagaattatgacttgccctatatgccagtaggttaaccccatcaaaaaacagtgccaattatcaaaactggagaggagtatctgggggtatgaatcagtatctgggggtatgaatctttctatatctgatcctctcccacagcacttctcaagtgcctctcctcttgacagggaaagatgagatgtgtagatacacgtgagtgtggcaagccctggctagccaatagagaagactgggacctagcacatcactctggagggagaaatggccttgtctggtgtttaaaggtgaggattctgaagggaggcagacttgcagcccaatcctagtgctgtccttgctagctcagtgtctttgccaaattattcaacctctcttgacatcagattcaccatctttaaagtggtgatgattgcatttatttgttaggatttctacaaagattaaatgaaagaataatgctttgtcactcaaaacgcggtgcacagaatcacaacattggcctcccctggcagcttgctggaaatgccaagtctcaggtcccacccagccttactgtcagaatccacagtttaataaggcctcaaaaacactgatgaatgcatgtgttcatgatcagtgctcagtggatgttatttttacctaccgggctccctggttctcctcatctctttccctgtctataatgtgctgtgcttgttccaccatgagttggttaggacccctcaacaaagttgtatagagttggcaatcagttgcttttcaaatagcagtggtgctttggattgttcagaacttacgagggatgatgatgtgtggacaaatagatcccacggactgtgataggtagaagatgatttttaaaagatggaaacacagtagggatgattttgccttcaataagtctcctgatgccaatcccttccctctatctccccactacattcctaggccaatccaccatttttttaaatttatttattttgagacggagtctcatactgtcgcctggcctggagtgcaatggcgtgatctcggctcactgcaacctctgactcccacgttcaagcgattctcctctctcagcctcccgaatagctgggattacaggtgctcaccaccatgcctggctaattttttgtatttttaggagagatggggtttcactatgttggccaggctggtctcaaactcctgacctcgtgatccgccgcctcagcctcccaaagtgctgggattacaagcctgagccaccgtgcccagccaacattatcttttgcttgctaaactgtaatagcctcctgactggtctcccaatgtccttcctaccaccccccacatctgttactcaccatgcaagcagagtaatttttctaaaacaaaaattactctgtacatccccctgtttaaaatccttctgacttcccatccccctggggataaagcgtaaaatcctttaagactatataatttgagaaggatctgtctggacaacctcacctggaggtacccaacccaactctctgtgctctagtgaatcttctttcagttcctagactttggtgaggttattcctgccttgaggcatttgaatatgcattctttctgtctagaactctcttttcacgttgaattcatacctagatctcagctcagtcatctttctcagaagcaggctctggcctcccagagggaccaggcccctgttataagttttttccccactctgtgcttttctcatcataagaaaaaaataatattgatgccaacagtcacagattataatgaagtatctatttgtatgatcgtttgattaatacaaaccagtctgtagactccaagaaagcagacatcatgtgtgttttgctcagaccatggctgttgaatttccaacacctggaacagctgtttagcctatatgaggctctcaataataatttatttaatgaatggattagcaaaatatttctgggaaagagaaaatcaaaggagggctcaagagaatctttttcaaaagtcaaaaaggagatgtgacgagaaatttgaactccctgctgaacagtaatccgggaatctaaatgaccagagtggtgggcctaagactggaaaggcagagctgcacttacttcaaagatggaagccaggggttctcaaccttggcagaacatttggctcactcaaagagtttcttaaaaataccaaggccagagcctcagcttcagacattccaacttattaggtctactaaagtgtagcctaggagctagtcattttactagcttcctaggtttctagtgtgcagtctgggttaaaaatcacagatctggcaggaagtaggattttcctaaggtcaaacaagtattaaatttcagagttagggctaaaacccaagctgctggactccaggactttgagctttttactcacctggaaacctaagagaactagtactatagtgcatgctgctctgcttaaaccaagtagaaatatatggagataagaagttaactcaaattaatagagttctgggaaatctctagtaaagcagaacttttatggctgagcaatgaggtgtcttagagtcattaagatagcccccaaattggatagaaataaactaactccagctttacaaacatcagcttttgtgtagttttttgctaccttatacagaggaatttgttttctctcatctgttctgagatggtgctgttgcactactcttataaaatgccagatattaaactagaaaggatcataggggtgatggagcccagtgatttccacagatcccaagagatctgcagaggaagtcctgaagtgactgagatccctgtgatcccagagttattaatataattggacagtaaagtattcattcatctaagaaaaagctccaccagctaactaatatgtcaacaattgcatgagtcaaatcaagacactgtatttgtgcgttttcattttttctaagactttcaagtaagaaaacagtaggaaaaaaaaggaatttcctattatttaaaaaatctggtgcactgtgaaaacagaatctttcaaatcatgatgataagtttaggagcccctgatctaatccaaatgggcttactactgaataagaagaacatagtcatcccataaatcagggccagggctcaaagcatagggacttttcattagcattctttgttatctaaccccttccagcagcattctcaatcctcttacccacccacttctccaccaagaaaagaatatctgaaagtccaaagtcttctctttgagctgaagtggctttcactgaagcagaaggcagaaagggtaaaaatgccaaggaacaagaaggaaggcagaagagagaaagaaagaaggatgggtcaggtgttcagctataattatgcttctgagtcctgaagcaaaggaggcggtcttttacatacagactatctggatcaaagaaatgtgtttgtacataactagccctgtcccaaagagaaagagacacacaggaaggagagttttggttatcagtggctcagcattgcccaccttttaacccagagtcctgtctaccttcaaaatgcagaaaatctccaagtaaatttgagacaaaggaaggttggagaagacatatctgaggaaatagggccaggagcattggaaaagtccagtcatccccaccttgtttgtgttttctcaatttctaatcactcctccctccacttgccatctcctaactgtccttattttcctcatgtctccatgccagggacaacttttgcggccagactgagatgcatgcagcacaactgcttccagtgtctctaacacattcaggcttgtcctccccagacagcaagacctacttggtgagaggcagtgtatctggacacatgacacactgtatatatatacatatatatatatatacatatacatgtatatatatacatatatatatatatacatatacatgtatatatatacatatatatatatatacatatacatgtatatatataaaggcaattctaaaaacaggagagatggagtgtctctacctagcatagggttcatttgggctctttgccctgttctttctctgtgcatatcgctgtctttggtctaaacaaattcaggatttttgcttcttggctatagaaagtttatattctctttcggactgaaactaccctgcttcctagtccaggctgagctatacctatggctgctctctcctgcattgagataaatctccaatcactcagttctcacttgctttgcaaaattctttttcctggtcttttgctttctgctacatacctacatcaccttctgtgtattttcagctcaccaggacaaaaattttagtaatccacaaagagtcaacccctcaaatatagctacagttgttaaatatatatattcagaagtgctcattagagtctaccctttctgttgcacaaaaaggaggtttactttcttcaacagcagatttctatatttactgtgtacctcgaatcagtcctcttcctaaccctagttttcccttggccaccacaacacagaatggcaggcccacaacactaaatggagcctcagagagtatttacttcagcctgatacccaatccagacatccttctgcagagtgtctgacaggcagtcagacagctgacacattattcccatgggcccatatagacagcacacagaagagggtgcaggccagcagggctgtctgtgttgcccaaatacaacaaaaatggactcagaaatggacttggagcacaattttcctccttttgagcaatagagtttaccttgaacatcccactacaaaaccctgatactttttgtaaattaccaaaaaatttcacaaaagcacaggcttactcatgccaagcactctttcaaagtttgtgtgagaaaatccacagctccctggacaaatgctcttgtgctcattaaaccccatctgtggcctcctggtctcatgtctaatttctacctgggtgtttaggagcctacacctgctggaacccagagcgtggcatcgtccctgagtagcatggcttcgtttccagcaccatcaccccttgatgcaattctctctcatccccttctgaggagaatcacctgtagtagtttttgctggaggatggtgatgtctcgagaatgagtgcggttgccaccacgaaacttaagggggcggtagacgcagcacgtggtaaagcagatcatgtagagcaggtacaaggcagccaggatgcagaagtacggccggccatacttgttccacttgaagctcaccagctccttcactggggtctgttccagaatttggcgagcctggcatggaagtagagtgaaacttggggtgaccaacacagaaggatgttgtttatcccactgggggccagaagaggcagggcagcaaccatcactcactcagctcatcagtcacttatttgacggacaaatagtatatttcctgcatatggctgggccttgtgctagtgatacaggtaaatgactatagcagtaaacacaaggcaccatagcaccaaagaggatttaaaggatgagtagtagttagatgagtaaagggagagttaggaaagatcataccataagctaaaagcagttgccaggtcaggaaggtctgagaagccattgcccatttgcagttgagatgtggttggggagagcggagaatctattgggagtggtagtcagaaatgataatgactgaggaagaacagggccaggtcatcatgcatcataaatgccaaggtaggaagtttgcattttttgttttttctaaatataacagaaagcaactggggagttcaagcagggaagtggtcagatttgctctagaagtattattgggctggaaagaagcaatggaggttacaggcagtaggatgtggcagggtgggatggtgctctgaaataagcagccagtgagacgttaaagatacacaggagaggggatgatggacgggaggaggcatctgagaaattagaaagagacagattcaaagcacagtagagtgattagccattaacagcatgaatatcttttctattgaagctggaggggaggagagagacagtgggcagtttccagacatgctcggcagtgtagggcaggaagctgaaggatccccagccagaaagcctctatttttgtcctaaatcaggagtctaggtcttctgaactgcagctgaaggtagtgaaggatgtgaaagggggctagaaaggaagatttatggaggaaaaaagcaactgacccaagacacttatgaaacctgctggagaatattgagaatagcttaaatcaaagaccaaggatatgtggtggcgaaatccacacagtgggattgtgcttttaatacctaagaaatcctgctcaaagtgtatctgtttccagggatattctctgaggaagatctcacaaactagccactcaacttttcttctattcgttagtattaataatcattcatgttttctggatctataaggattcctgggaaattgtcactgtggcagatacaaaacagaaactacatcttggcactctcatggaacgttctgaaacctggaagtcttttctcctctctactgcagtcttcaacaaattttcgtttccctcacatcactcaacccagcattgttgaatggtctatacgttgctccctctctaaaaagctcttttttttctctcatcttcctgtgactcccaattcttccttgaagatccagccccagcatttcctctgtgacatcttctctggtctatccaagccaagttaactctacctcaatgtggctgtctgcatgcatggtacacacaactattacggcatatgtcatgctctgttgcaattattcaggacagggactgagaattgaggaagttgatgaacaggaactgtgttgtatttatttctgtactgtttgtttcttgtgcagtgcctgacatacagcgggtgttcaatatgcttgtattagtccattctcatattactataaagaactacctggcacagggtaatttataaataaaaaggtttaattggctcatggttctgcaggctgtacaggttctggagaggcctgaggaaacgtacaatcatggcaaaaggccaagaagaaagcaggcacatcctacatggccggagcaggaggaagagagagcaggaggaagagagagcagggggaggtgccacacacttttaaacaaccggatcttgtgaaaactcactatcacgagaacatcaagagggaagtctgtccccatgatccaatcacctcccaccaggccccttctccaacactgtggattacaatttgacatgaaatttttgcatttggacacaaatgcaaaccatatcaatgctgaaccaatgaatgaatatgaggaaacagctcttatttggagtttctcatctgaaatgatagaaggcgaaaggtaggcagaagggactggagctaagcagagagacaggggattcaggagaggagtgtgcattggactttcccccatgtcccaggagactattctcatctccaactattataaggctgggaagtgtctcaggcccaggatcttagtaagtggacagactctgcacaaacactaaattccctcacatgacaggcctgatcctccttggcatccatacctctcgtttatcagaggagaccacaagctccaggaaggacagctcctctccccaggagtcgatctctgtgaggtcgtagagaatggaggtcaggggtccatacgtccactggatgtgcctccgcttctgcatcaggtgctggaacatctgagagaccaccaggatgagtcagggggccaacgtgtgagaaggtggtcgaggagaacaactccattggatggagccagttgcccaacccttgagacagacagacagtgggaaccagcaaacctctgcatctacaagctttcccttttttgtcatctttcctgctccaaaaccccagaaagtgcagaaagaagaaaataggcaaaggaagctagagctttgggttatcacagcacatgcattaaggtaaggttctcaaatcctcttgagtcaaggaccatgaagctgaagatttcagtgatggaataggaagcaagggaccaccatccctttggggagtttggggaaaagggattttagagaaaggtgggcccttcacctctatttctcccagggccagcaggataggttgagggtcattagaaagacacctcagggatggggagcgtctcttaccacagtgttaccctccactccagccagcttgaagggggtgagaccctggtgattgggcacaaggtccaggggctgcaggtggtccccatgtccatcgtaggacagcagcaggttgtacatctggcaggcaaaggttttgttgggctggaggatgaggatgtgtaatactgtgtttcctggggaggacgcagggtatcatgtggccactggcctaaagtccctgatgtccccatccccactctggggtcttcctaaaggtcccagctccactccttaccctgtccctcgctccccacagcatcccagctcccctccccatcccagctcttacccagggagtcctgggccctgatgtcagctccatgctcaatgagcagccgcacgatctcctcgctgttcacacaggcagcaaaggacaaagggtgctcccctgtggacacagagagatccatggcaggagaacgcaggatggcaggatggggtgggcagtctcccccaaataagggcctcctcctcatcccccatatctcagttctaggctgagggacactcgtccagcagaaccagaggaaggaaccatcaggggaatgggcctctggcttaattaagccctagaagggctgcccctctcaactgcccaacagatggagctgaaggcaggaccctcatgccctggcctccctctgccttgcccgcctctccagccaaccatccttcaagcccaaccctgctctcaccaaagtagatgaggttgcggggactacggcggaaggcagtgcctgtggctctggcagagacactggccctgcgggtgagcagggcacgcaccaggttcacattctggttcacaacagcgatgtgcagtgcagtctgacctggcccagagacagccatcatcagggtctccctctgtccccagttctctcagggacacagcatcccccaccatccctctcaggaggttcctgatagatctttgctagacttatgccctgggcttggcagggtggcctgggactaagagcaattcatccctcaggctgccctgctcattgacctacccttcagttattgggagccagcaggggattgctatgaatataatcattctcatgttgctatgagagaaagaaattgagataggtcctacagggactatgggaggtttgaaaggaaatgctgaaggaagccacagattggtaaaagccaagaccaggacctttgcatttctcccaactcaacggagcccatcctcctgaccctccatcaccccaccccaacccatccttcagaggccaattttaagagacaacagcacaccctccatctcaaagtttccaccttgaattaccgtgtaggctccttacctgcaaaagcctcacatgtggtgggctcaaagaccagctctggggcagcctccatcagcaccaaggccgcctccaagttgtcatagagggctgctatgtgcagcgccgtctcccccagggctcctggattggagtaagacagagatgttagacacttttcagattcccttgaggaaggggcctcaggctccagagacaccctccaaggccctatttcacaaactcgaagtcttggggaggaggagtaggttcttctgcccccacctccatcccattaaatccagatcccacctctttgtcgaacgtcacaggtgcagtccagtagaagttgcctaagaacagacaggtcattttccttggatgctcgaagcagtggagactctagaatcctggggaaaggtgaacgtgagtttggaagagacagtcagagcagaatgaggccaagagcaaaggggatctaagacattctttaagaccaacgtgactcacacagcgtgcagtgacaaattggaaagaagtgcctactggactcgaatgaccgagggtggacttgggcaagggtcagccccagggccttccttgcaattcacatcatggtgattctcctgtgaggatggcccttgaagctctgctggaggggaagagttaataggaagagaacctgtagtctggaaagagtggtctgagagtctctaagaagaggaccctaggcttggctgaattcatctaacctgagtaactgtctcagatcctggatagttggagagcgggacagagggcacttccatctgcggtccccctgctcctgggcctgctgaatctactgtctttaaccaaggggagtttgggagaccacaacacagagggaggaggaatggatcgactgctagatctttcctaggcattttgaaatttgtgaaatttgtgaggcactaaagttctgactactccctcaggctatttttttttttttttttttttttttgagacagagtcttgctctgttgcctaggctggagtgcagtggtacaatctcagcttaccgcagcctctgcctcccaggttcaagcaattcttgtgcctctgtctcccgagtagctgggattacaggcacgcaccaccacgcccagctaattttttgtatttttagtagagatggggttttgccatgttggccaggctgatctcgaactcctgagctcaggcaatccgcctgccttggcctcccaaagtgctgggattacattgcgcccagcatcctcaggttatttagatacaggtccctgcagggggtggagagttgtggggtgagttacagggtgcctctttcttctgcattatacccttagatgcaaaggtctaaacagcttgtttatgtgggtgtctcaaggcaaaacaggttgagatactcattctacaggacctctgttaatctttgcttctaccatacccagatttgaacccagcaagagataaagctggagcctctccaactagacatatgtgtattggccccaaaggcaagcacatggtgtagggggaagaacagaaaggacaggccgatgagtggctcctctgaggtccccacctccaaatccctctcttccaatagccccaggagccagggcgaaaaagtgtttttgttttatttatttattttttttgagacgaagtctcactctattgcccagactggagtgcagtggtgcgatctcggctcactgcaacttccgcctcctgggttcaagtgattctcctgcctcagcctcccgagtagctgggactacaggtgcccaccaccatgcctgactagtttttttatttttggtagagacggggtttcagcatgttggccaggctgctctcgaactcctgacctcaggtgatccacccatctcggcctcccaaagtgctgggattacaggtgtgagccaccacgcccagccaaagtgttttcatttaaagaagaagcttttaatctaaaggtggggcctggttttacctgttaaggcagtgctcctaggaggggcctttgtgaggagtcagttccctgccccgtctcacccagggaatcagtcccagggagcctggtgtccctgaccagcctagagtggtcagggctgagattgcaaattcacccccatcctgaggccactgcacaaacaaagtccttgcctccctggccctctatccccactgcccctctgcagagggtccaagttggggctggaagctcactttctcagagacccaggggtcccactctaaagcaggaaggtgagattccactggaggtattgggtggggagatgaggaagcagagggcttgacagtatgagggctcagaggtacttgggaccaggcccagtgtaaactgcaaatgcaggaccccttgttcaaaattattaagaacttgaagatgaggacagcagggcattgaacaaagcacaggaatcttctggagtacaggggagccctttgtgactgctaatgtctgctcaacaacctcacccctcaggcagctgttgggtgggaggcaagccccaaaacacttggaggaagaagcagcccacaggattcgtccctgccccagctgctcttcctgggactggacctcagggctaagccatgaaatgatttacctgcaggtgtgctagccctgcccgaactaagagctctccaggagcaggcacaagtctcattcaatctttatgtcattgggatctaacacccctctgcacacagtagactcaataaaaggcagatggactgaactcagagccctccagtgtcacctgagctgccctcctccactggtcagcacccagtgttacaccaaacaaagcgctcctcccctttcccacacagtccactttcattcaaatgaatggcgtttccttatcgtgcttccaccacccacaggagtgcatcccttcttcagcagcctgcttctgccttccctccccatcccacacaacctggcttcttccctctggtcctttttggtcctttcactcccccttggctgtcattctgcctctgtccttaggtctaccctcaagattttcctgtgtggcccaaagccacatcctccaccgccactaaaaggggccagctgggattctgtaattaggtgggctggaaggaaagggtatgtctgagtgactggcactgacaatacacttctagggtgctgtattcggaaagcaggcccaggtgggtcagagggtctgaggatcacggcggtagggccacggatcgttctaggaagcctacctcttctgctgcagcatatgaagcttgtccaggtgctggtcccagtcttgttctctgaccagaaaggagggcagaagtttctggagttggctcccgggcccttctgccttaggtagaaaaccccccatgtcttctccttgcagacactggcagattatagaaatgtggcgaaagaaacaggtctaggatgacagcaactgagcaagagatggggtctatttggggctgggactctgagtttatctcctgtatgacttgtgtatgcagcatgcagcttgtaggtgtgtgtgtgtgcatgcagtatgtgggttgtggggtgtgcgtgtatgcacagtgtgtggctgtggtgtatgtgtgtgcatgcagtgtgtggttgtgaggtggtgtgtgtgcatgcaggtgcgctgaggggactgaccgccctgcctggggagaagtgcttttcctggagggggaggagctctttgcagagctgagccccacagccacagaaccaccctggggaagaaaaggaggaggggaaggaaggttcctaactgtgggctgggatggctgagacccgagaagctaagaggtggggcagaggaatttggaaaaagaaaagggatggaaggtgggtccacaaacaaggtgcacagttagttgcatgagggagaggaggaaataaagacttccagctcaagagtcaggcagagcctggttcaaatcctgactcttatcccttacagttaggtgagctttctgagcctcagttcctaacctgtgaaattggggtaacggctatgccgtctcacgggagcatctgtaaagcatgtgtcacaagtactcaatcactgccgatcctccttccacaagagggctcaagagacccccgggctgcttctcagagcttcccatttatgtgtcttgtggtcatctctgtcctcaaccctgtacctcaaaggagggtttctgacccccacttcccaggccaatccctctctgtgagaagtcctcatgaccgtgaccggccagcttcctggagcgtcgccgagcaggctctggtacctggggacgcaggtcagaggagcccccaggggcctcgagttattatggaggttgaacagcagaaactgagcaaaggtagacgacaaataaatcgtgattccatgtttgggactctttccaggaatgaaacaccaggaggaataagtaatgttgcactattttatatattttatattatattttatatattaagtagtttcccttatccacagtttcactctctgatggttcagttacctaaggtcagccacagttggaaaataggtgagtacagtactataacatattttgagagacagagagaaagagaacattcacataactttatattattataattttcattttattgttgttaaactcttttttttttttttttgagacagagtttcactttcgttgcccaggctggagagcaatggtgtgatcttggctcactgcaacatccaccttccaggttcaagttattctcctgccgcagcctccctagtagctgggattacaggtgcccaccaccacgcctggctaatttttgtatttttagtagagacagggttttaccatgttggccaggctagtctcgaactcctgacctcaggtgatctgcttgcctcggcctcctgaagtgctgggattacaggcgtgagtcactatgcccggcctaaactcttcactgtgcctaatgtataaattaaacttcatcatatgtatgtatgtatgtatgtatgtatgtatgtatgtatgtatgtatgtacgtgtaggaaaaaagatagtatatacagggtttggtgctatctaaggttcctggcatccactggggcgtcttggaatgtatcccctgaggataaaaggtgactactgtatatgatagcttgtatttatgttctcattttttttattattatactttaagttctagggtacatgtgcacaatatgcaggtttgttacatatgtatacatgtgccatgttggtgtgctgcacccattaactgtcatttacattaggtatatctcctaatgtatccctcccccctcccccaaccccacgacaggtcctggtgtgtgatgttccccttcctgtgtccaagtgttctcattgttcaattctgttctcattgttttcaaagaggtacatcaatattattgaattgcattcactcaatagacctatcaggtaaatgagaacaaggaagaattccgtctgtgagaattcttgggtgtgctggccccaagtcccatggctagtggcgagactgtaactggccatgaacttgggatctcagctccaaaccactctccagaccttgttgcttcttgggaatcttttggctgtaaaggtgtgagagaccagcgtgaggatacgctgggactctccctctgggggtcttgaggagtggggactgcccccttcttttgttgtaagaaagagagatctgctcccaagattgagggatggacaaaataacctttagagaaggacaagaattgaaaggaaaataaataaggaaactaagaggagctagtgttcattgatgtttcaaaagggggaaaatttggatctttttcttattaaaagccaaaaggaaaagttaagtaaaaaaaaaaaaagatacagtggaattatgttctcactgggagtggggagggctcaacttgtgggacatttttctgcctcgctgggggtgacgcccttgtggagtgacttccagtctaaggagatggagggagcgataagggtgaggtgggggttgtagatgccttgataagcgaggcaggtcaggaaaggagcacctgccaaggaaactacaacccataaagctggtcctggggcgggggggttgggacatggggggccggcaggggaggaggctggcccagtctgagctgcacagagcaggtgtgcagggacttgccgccaagggcatgtccaggggtctggggaagagaaaggggaggcccaatgctcaggcccccccacccgccatccctgggccttcgccctctcacttgcccttctctgcctacctcgtcctctccagtgggaagggcatggacaagtaacctgggtgaggaccatggtgtcccccggcagtcccagctggtagaccagagatttggagtctctcctgttctctccttgccttctctccagactgtttcttcctcttgtgatattcgacatcaccattctatttttccttttctctcctttcttttcatgcctctctcagctttctgcaagtgaggacatctgcaaactctcgccttcagagagcagcttccctgccactgatgaatggtcagtaatgcctccaggcactcgggagaactgggctgggggcaccaaactacaccgtcaagtcccagaacccttcacgccaaagcagcctgacctcttattctaacataataaagaggaggaggaaccataatacctagatttccatttttaaaaattacactcccaccctacgtggccacagccatctacgaaaaggattcagggccggatgcggtggctcatgcctgtaatcccagcactttgggaggccgaggcgggcgcctcacgaggtcaggagttcgagaccagcctggccaacatagtgaaactccgtctctacaaaaaaaaattagctgggcctggtggcaggcacatgcaatcccagctactcagaaggctgaggcaggagaatcacttgaacccgggaggtggaggttgcagtgagctgaaattgcgcctttgcactccagcccaggcaacagtatgagagactccatctcaaaaaaaaaaaaatagaaagaaagaaaaggattcaaataccataccttaaaactaactgtggccaggcgcagtggctcacaccggtaatcccagcactttgggaggccgaggcgggcagatcacctgaggtagggagttcgagaccttcctgaccaacagaaagaaaccctttctctattaaaaatacaaaattagctgggtgtggtggcacatgcctgtaattccagctactcgggaggctgagacaggagaatcacttgaacccaggaggtggaggttgtaggtgagctgagatcgtgccattgccctcccgtctgggcaacaagagtgagactccatctcaaaaaaaaaaaagtgattatcactggatggtggaattattagcctttttggggttttgtatttttctatattttctactttgtaataagaaaaaatatttaagggattccctgttttctgcaagaatttatctcttttaacactgcggaggtcaggcgggtggtggtggcaaggaaatggaagtaatggaaacaactcagttatttccactcaagcctgcccgggaggcaattctcaccccagccgccctccccattcattcccacagagctggagatggcttctctttttgccaggaaaccaagaggctgctcccccaaaatagccaggagggaggagattagtgatggttttttccattcaagcatcattctttggatctcacgtcaatgggttcaaggtggggtgagcagggtcacctgcctacttgaatctttccttactcaccttcaagcgacctccgtaccactccctagtcccttgtcatctggcttggaccatcaggaagtgtgtaagagatggtgtctgctgtatgtgagacagcatccatgtgggcatgtctgctaacacgagtaaactctgtgggaaagcatctctttgtgtgtttctgtctgcagttccctcttgcagaaagggtgcctgtctccgcagtgtccttggacctgcatgtggtatttcattcaggtctggtatgcatggatgagcaggagcagtgtgaactggttatgagagttcaggagtgactaaagtcttctcttacctgtcttagcagccatcctgcatctaatggcctatgtctctgttgctggttttcgaaaaaaggccttcattctgtctccctaactcacaaccctccaaccatctctgcccaagaagcagttgggggtgattacccacagccggttactgccaacagatctgtgctcaccaggctcatgggcaggaggcgcatccaagtactgaggcaggattctcccagatctgttatttgggatcctagactccctgccgcactgcggcttctctgcagactctaactccttttgccaagcaatgaggttggagatgagcctctaacaaccttttctttcgtctaagagtacagaaaggtgtaaaatgaaagaagagggtgtttcaacctggtggtacaagaggacaaaggctagaaaagtgggaaaaccaggggagggtgaagagagggtgtgaatgggctctaccagctgcaaggcaccctgctctttgtctctcgctctctctccgttcactctctcttcatctgtctctctgtctctgcgtctctatctctctgtctctacccctcagtttctgcctgtctcggtctctttctttctctctttttctatgtctctgtctgtctctgcctgtctatgcctgtctctgtctctgtgtcttttatacacacacacagcatgtgcttttacccatccttaccctatgctcctccccatctttattttctggcagacccatgcttcatgtagagcagcatgttcatacccacgacttgagaatcctgtccggctcatctgttctgggcctcatcctatgcaaaccactcttgttacagaaaggccacatagaatagtgggaagatatcatatttaaaagtaaaagttaatcaagagtccttttctgccccttagtatttgggcgattttgagtgagagagtcattttttctgtgagcctcagtttcctcatgaatgtaatagatatgagaacactatgattttgcagtcctggtttctacgtggatctaatggtgtaatggatatgaatgtacattgcaagctgttaagtcatttctgctaaatacagaatgacccactgtggtcatcttggaagcctcggccatccctgctggctgtgctccattcttgtgcctcgccattggaacgctctagtgagccggaatgaagttcaggcccatggctgtgatgtcacagaacatgtgaagtcagaggtcctatggaaggtgaggggagaaaatgcccctggaaagggttaagggccaggacaggaatggggcaggaggtgcacggatcctgctgggcactgggagcagggggcggccaaaggcagtgggtgggcaggtccatgcctcccctggccccccagctctgcagggcagtgttcctggttcctatcttgctgctgctgcaggtgaagcctctgaacgggagcccaggccccaaagatgggagccagacagagaaaacgccctctgcaggtaggtggaaaaaaagacaggagccatacagagaaaacaccctcttcaggtaggtagaaaaaaagacgggagagtctggaggctcagggtgaggtctgtgtgaggccaggccccaggtcactgatgaggctagggtgagacctgacataggtctggtttatggggggtaactccagccactgatggttatcatgtgaaataatagtgtcggctcaccatgggccagctgagcttgcatgcaacttctgtgtgtgtaagcatggtgcatttggctggcttttgtcatgcttcaaggtggcccctgactcccccagtgttgaaaccctagaggaggcagctaaccttaggaatggtgtgtgtgtgtgtgtgtgtgtgtgtgtgtgtgtgtgtgtgtttgagttggggctgtgattgaacacagaccagaaaaaacctctagaaagagcatcccctctctggtgaaggctaaggatatgggcaattgggactgcagccctaggcttcaacgtgtttttcctattctaacttctcctttctggttcaggccagggtcagggctcagtccttgtccttttcccctgttccagaccagaatcaagaacagttcgaagagcactttgtggcctcctcagtgggtgagatgtggcaggtggtggacatggcccagcaggaagaagaccagtcgtccaagacggcagctgttcacaagcactctttccacctcagcttctgctttagtctggccagtgtcatggttttctcaggagggccattgaggcggacattcccaaatatccaactctgcttcatgctcactcactgaccctccctccctcctgggctccaggtcacaactcccaaaggagatgcaggcatggctctctgcctctgatcaccatcactgtatctcaaggttcagcagcagagataccagttgccatcagtgctaactgactgcctctccaggttcggagtttcatctcccagggccagagacagcagacccacatccttctctcccacacctctcctggttttgttcaggacagcagattagaggcaggaggcaatgacaataaaataacgataaaatcctgagaacaattgggagcagctttccgatacttaatccaagcccttctcgtctccaactagactgctttattgtccaatctttggtccactgggtggccttcaaacccaccaggtcaccaattgttgattctttccttttcttgtgtccatgaaacatttttggcatttctccctcttatcttttctaacttcagggtatttttctcccgtacagttaatgacttccaggcatagaacatagcaggaacaagtcattaagagacaagcggaagccaagtgccagcttttatttttggaacagaagcagaaaggaaatcttgctctgattccatggatgtgaccagggaggtgttggtcgatatttctgtgctgtggcatctttggtaaccaagttaccagagctggcagcggctggaggggttcaagagagcaccacgtgcacagcggaaatacctggcaaaggctggggtgctgctgaggggcccgtggactcggaggtgtggagggctgtgagtgtcgtgagagtcctgggggctgggcttcctacacatcacctgagcaggaagagaggtcattgaagggggagggtccacaggacaaagctgacccggtgacaaggggtgatcagggacagcagacaaagaggggaaccaggggatcaagtgccccaagggccacatggagcatttgaaatgtatagttcatttaatctggcaataggagtccaggaggagggcctgggctgtgtaatgataccatttatcaatgacagagaggcagggtctagcgcaggagctctggggtgaagtctaatctaagcgtgttgaagacctggcacctgagtctgttgagggagtacagggtgcttaaggaggtgatgtcaagtgggcgccacacctaaggtcaggtgtctgaagaggaatgtggcacacagtcagcctgtcgcaggctttttttttttttttgtgagactgagtcttgctctaccacccagcctggagtgcagtggcatgatcttggctcactgcaacctccgcctcccaggttcaagcgattctcgtgcctcagcctctcaagtagctgggattacaggcgcccgccaccaagcccagctaagttttgtatttttagtagagacggggtttcaccatattggccaggctggtcttaaactcctgatctcaagtgatccgcccacctcggcctcctagagtgccaggattacaggtgtgagccactgtgcccaaccacaggctcatttttaaggcatctgtattttgggggtatgagaggaaaaaaaagttggtctcctcctctcctggaggaacttgggaatagagttttttctaccttttgagttgtgggggtgctgaattaggtagaagaacctgtagtcatctgaggggtgattccaaggggtagggagggaagagaaaagataacagtgaggacatctgcagaagagggtttggggtatttgacggagtgtctgaagaggggacttccatgagcttcagtaataaggcgttcaactgacataaagcaagctgtggcgggaggtggccgctgcctacctgggcatagcttcgaaagaagatctgctgggggctgaggtccaggctgggcaggacagtctccccatggtgccgtaacagcctcttgctgtatgcctgggtaggggtgggtagagaagggccatcaggctctagacctgtggccatttgaaagtccctccacacagtacccaaaacccatggcccttgctcactggttctgcactgactagttgatctgagccagaagaaagagtacttcccagaagacctatagatgtcctaaaatggaggatctctggggtaggagggggatccccaagttgccgtctattcagtggggatgcgaagggcagaaagccatgcaactgtacttgtgtcaggaatggtggaaggaaaacttgaggacatgttttctagtctgccagtacacataaactgtggcccttgacacttgcatacctgcagcgcgatggctagccccccaacgtctgcagcattctctaagaatgtgagggagtcattgaaggaggttctgctaggtaatggaaaggcagcataatggcgcttcaggcacaggtgagcttcctggagggcatggttgtcacaggcgaggcagcccccaggcagtactgttgaaaatgggacaagagaacatacagcaagagaacatagggttggtgctgcctaggtgaggatgtgggtggtaccacagactgaatcagctcccaggagcatggcaaagttcccaggactgccccacctcaaaccctcaaataacctccctttcccctccaggcctcccttgtggtcttcccttaggttccctattatcccacctcccagtggcccctgttacccacagagctggtagaagatgtgcaacagctcgtgggccatgatgctgccagcagcgccaaagttcacggctctagggagacaagggcttatttgacccccagaatctctcagcatttgtgaccccaattctccaaccgtaagtcccatccatcataacacctgtcggcccctcttgggaaactccctacctacccttacagagtgacccatacctgggatagccagggtggaagaatgggggttggaggagtccagctggaaagactaccacatggtcagataccgaatagtaagcattgacgtcccaaggggacaccttccacctgtgggaagaggacatgtgaactccagcccccaccacgtattgccctgccaccctgagacctacacagtccctcccaactaccattactgttcatgctgcctgccctgagccctggcttcctttcctgtgaatcatggatgggtctctctgggatggagtgcctgtgtctcccctgctgtcatacctgtgttgggggtgaggctgcaagaagctctggacaattctagctcggagggaccggacacagctcaggacagactgcaggaagctcgatccaagctgtatctggggaagaggcaggaggtgacttgggcacacagagacttctatagatgcacgctgacaaacaccaatgggaccatttgaccccaaacaggcaagccctgacaggcaggcatccagggattaggagagagcagcccaatggcatcactacacagcacacccaggctttacacatatcagcacacagatgaacacgcccagacaagtcacaggatgcatgcatgtgtgttggcacatgcgttgggacctgaaaagattctgttcttctgccagcaagacgtacagtgtggatatttccccatcaaccccagccagcaccagagtaaggacagagctaagtcacccagggaaaactgattgtccaacaaagacttaggagggtcagagaagtgacgagaagtcaaggactgaaaaggagctggaaaacacagggacccacatcgttgtattcttgtcgggccagctctggcttcagggcccattctgaagcccccatctccacctgcagttgagcaacctggagagagacacagaagaggctaggaatactctccgagtctaccagaggaaatttctcccactcgttgccctgtcccagcctctcacattgttgccagtgtgagtatacagcccagtggcttccctacttagcatgtgcctgggggggcctttggcatttgcttccaatccccatctcgcttgttccaatactccattccctgcacaggctcccacaccagccaggacgcctggcctgaccttgtcctgggccatgttctgggtctcctcattcatccagggaaggtttctgaggcgagtgatgagggcatcccggatcgcagtgaataatttcatggcctgtgggagtgaggtccagggacagggggacaggatcaggagaggcctcagcctggccctgcccacagcttctgacccttggaaaagggcttggccccaaggagctgcctgggctggagctgctgctagaggagcagctcaactaaagcaactaaaggatctgtggagaaaggaaggcagtgccaagcccacaaagggaaggtggggcctggccatccgtgagggccatcagggagatatagttcctttccatggggaaatagcctgacacaggagaaagacagtgtcctcactcctgggggcaggaacacctctcagaaatcagagggaggagagggctgtcattttctcctctggctcagggctcttgttctcacactgtcttttttaaaccgtccactccctctcctcatcctcctgagctcttcagcttcccagcaagtcccccacaagtctccctgccttcacaacgtgagtgtgtactcactgcttccccagccacctgccatctcatgtaaatcctttcctggaggaaaatgaaaggcaatatcgagagcctgggctctggcatcagaatgcctgagttcaaaccctgtctctgctttttggtaactgtgtgactttgggcaagtcacttaacctctctttgcttcagttccctcttgtataaaatcaggatcataataggaactaaatgacgtagttcatgcaaagttcttgaaggagtcccaggcatgtggtaggtactcagaaagtattcagtggtgatttatttgatttatttgccctcttcaagattatgtcatctgttctgatgtcacgtcatgtgttgttaaaaaaatcttagctacaacagggaggagacttagagatgatagtgttcaattttccttttttttttttggagatggagtttcactcttgtcacccaggctagagtacaatggcgtgatctcggctcactgcaacctctgccgcccaggttcaagcgattcgcctgcctcggcctcccgagtagctgggattacaggcatgcaccaccacgcccagctaattttgtatttttagtagagatggggtttctccatgttggtcaggctggtcttgaactcctgacctcaggtgatccgcccacctcagcctcccaaagtgctgggattacaggtgtgagccaccgagcctggctcgattttctcatttgatggttgaagaaacacaagaccaggaaagttgggtgacttgtccaagtgagagcatgtcatggagaatttgtggcctgaagctgaactgtttccacaccagggatggagcaggcctttgggttccctctctcagtggcccttctctgactgcccaattccccaatcacacacaccactgagaaagtcaaagttaatagaagagggaaggctgctttgggtaggaaggggtggagggatgtgggctgggaagagctctcacatacagcacttcgggtgctcgggccaaaggcctcacgaacaaacaaagccgccagcgtgggctcgaagaacgtgcctgtctcctccacgcacttcatccatcgtgggcgggcaggctatggagacaaagctggaatgagtggctcctgttcaggactctttcctcatctgtctccccagtcttcactagatcttcattcccagagggtgctcttttgactggactttctgggtttcatctgtttactatcccttagggtgatgcacatcaccgatcagtacaagaaaagcacagcttcctcagagctggtctcatgagcctggctgagtaaatccttcatgttattgcctattgaatttgacagcaaggcctctaggaggcatcatcctggggtttcaaaagcctcctgggaagaagatgagaacccaaactcatacctcggcagtctgatgttccccctgttcccccaccaccactctactccggggtcccagcaatgacttccatcctccatgcttctttgctcaaaacggagattgcggatggaaattctgtcctaccaccatcacctttatcctctctccaggtgggcatggtgtatcatactgtagcatcttgtaaagaaaaaattatcagagtagaactgggttttagatgccatattgtttgctaggaaaagaggacacaagacaagactcagtgtataaattcatagagctggaagacttccagccaagtcagagaggagagaatagaacaggaaggtggagggctttcactgcagaggcaggaggccatggacaaacatccaagagggcagtgccagctgaggacctcaagaatgagaaacagaagagacagatgctgagaaggtcttggcggtgggcttgcatggctttaaaaacttgaccaaggcataaacccagagatgacacggtaaatggagacacacactcaaggaacccagggacaggaggaggtagctggcctgagggaaagctgagctggaactgataaataccagctaatatgctaatttgggttaggcaggatgaagcctcaaaactttattcctgtgatttttttacttcccaaagacctgcccacggggaaggtaggaaggctgccactaatactctccccgcaggagctaggctggtcctgggaatggagggggtttatgtgcatcccactacaggaaacagaccaaagaggccagtctggtagtcaccgaagaaaaaactcccgaacccaccagttaaagaggttatcattttggaggttgctgcaggcctggctgtccacatctgtgttctattgaaccttgaggtctgctaaccttgagtcttatttttatttttattttgtaacagagtctcactctgtgacccaggctggagtgcagtggtgcaatctcggctcactgcaactttcacctcccgggttcaagtgagtcttctgcttcagtctcccaagtagctgggattacaggtggctaccaccagagatgaagttttgccatgttggccaggctggtctcaaactcctgggctcaagtggtccatctgccttggcctcccaaagtgctgggattgcaggcaagagccaccgcacctggccaaccttgtctctgataaagagaagaggctcagattcttctcatgctgcatgagttggagctctgaaacaacaggaactaaaaagaagtccgggtctgaaagcaattataggccaagttgagaatctgccagccacattctgctggacaagcttggctccaggaatacctcttaccagacagttgctacatgtggagcagcaaccagcatcagcagggagaccacttgagcttggaagtgtagatctgcctattcttctcaccccttctcattcttgatttgtttcctgatgccctttgctggagcctgatcatttctccaacatgctttgccgtgggacctgactactggataatacaatcgccacctcagaccactactacagctctctctcaagatgtggaatggtagtgtataccacattgactgcaaagggagagtcagagagagaaagagagggagagaaatagaattcgagaaaaaaaagtctccaaaatataaacaatagaagaaatacttcaaacccaagataatgaaactcagtggactaattttagggcaccagaaaaaaaaagttccatatacaacctcagaaccacagatagtatttgagaaatgatagaaatcaggacagattctaagagtccggagggaagcaaaaatttgaccaatcttctataggatgaaaggaaattttagggattacgagccaaccaggaatccttaatgttaatttctaaacaaaattgtggaacgaatcattaaacagttttttaacacttggaaaataatgtgtaactactaagggctatgataggatcactgaagaaaaataatgccaaaatgataaaaattcttctggctaaaaggcttatgtaactgaggcatatgaaagaccggaagccgcaaactccaataggggccatgcagaggcataacagagaacagcagtgcaacatcagagctacaggctgtggtggggcttcagagagcgcacccagccctgagctgcatcatgtagcgacagtcagttgttgccacaggagaagggtagcccagtgtttcccaagcttcacagacacacacacacacacacacacacacacacactagaaacctgaatgctggcatgccatatcctagtttttgaatgttggtgattaattcaaagtttgcaaaagattctacaggctaacaaaacacatctatagacgaaatacatcctcaagcaccactaccatcctaccactgaatagagtattagcacttactaagtttgagttattaacttaaacccctgtggttcagtgacaccagttgtcgaaatgaaaacaatatctagtctaccttcctcacaggtttggggatcaggtgaaataatacctttcaagtactctaaggcactaccccactctgttggcattatcttgatttagccaggcttgaaaaacacagattgagtcctcgtgaattagatagagaaactgatgttgaatgatagtgcaatttgagtggagtctcatctggctgaatcaaaagtaaacatcaatggtgaatgatttcaagttaacttgacctccagtgacattcctactaagaatcctaactaccactcacttagcatttcctttcctcatttcctgttttgcttttcttcataacacctcctaacatattttattattttattagtttgtttattgtctttcttctttcaccaggatatgtggctgaaggcaggattatttatttgtcttttttgttcattgctgcattccaagtgcctggagaagtacctgaagtacactaggttctcaataaatgtttgttacataaatgaatgcataaatccatatctaggtcttcaataacctgacccgatgcccttctcccttcaggatcttaacagtagtctggacgaagatacactgaataaaattgcaaatgatccaaagctggaagacctgaataaattgagatgttgggctgaatataaatcattcacatttaatcatcacaaatgtgaagttctgcttttacttctcaaaacccaccttcccaagtttcataaaagaaaacctgacttaacagccattttcattgactataactctattcaaaactaatcatccaaagatgggccaataatgagatttagaaatctttctgtataagggcactataaattataattcattcaaaagaatatgatcagaagtcggtaattaatggccactgaataaaaccaaacattttgatcatatcaaggccaaactctaggtgatgtctttgattccattctccttctcacatcactcatcatcaggacatcccattactaaccttaaaatatgttcttttaaaacataaatgagataaatccctctgcatgtctttatttcatacagagagaagcaaaagtccttcagcaacctaccagaccttgtatggttctctccttcctgctctgattccctccccactattgtcctagtcactctgatccaggtgccctggctcccttgctgattctcaaacacctggagcatgctccaggggcatcagtggacacagcaagcctagtcttctcctctcaaccagagccaccaggaggatccctcaccctgcaccaagttttagccagcctgcctcctgccctgtccccatgagatgatacccctttcttcaccagaaaactccttcctctctctagacattttgtcagttctgcctcctgcacagagatgccactgatccttcaaatgctccctgatctctccctcttgggaactccaagaatatctgctgtctcaaccaggatcccctgggaacacagcatttacttagtgtacagttgtttttgcactacagggacagagttgagtagtttgtaacaccaaccatttatggatcacgaagtcgatatttactatgttgccctttataaaaaagttttctaacctttgtttgtagcacctacttgtttctcaatcctgtatagtgtgtggttaaaaacatgactttatgagccaaaacatctgttttggagtctgttcacttacttgtgagctgtgtggtcttgagaaagtttcttgacctttctgagcctatttttgcttctgcaaaatggggattaaaaacctccaagtgtttctggaagatttaaatgaataacctgtcccaagtgctgacagacagtgactactccatgtatagcagctattatcattattattaagtgccatcttttatactattgttccagaaaggtgaagtggcgtccccaaggtcacacaactatttgttggcagagattagttcagcttttaagcccaaggacaattatgtgccctagtggaaaagataatggcttcaggacatctaagccttctgcattctttaagcctaagcctcaacattagcactcttacagcctccaagaagtgccatgaggccatggtgctggcatttataggtagctgtttgttgccaggattttgtagcaaccccaattaagataacttggggctctggtctgcttcatctgaatcaagagaaaagctgggcagaagcttcttggccactctccaacccaagtgatgttcctcaggaagactgcttttttagcacaatgagtaaacaacacagaccctggagccagactgccagggttcaaatcctcaccccactaacttactgtcatacctgagcaacttccttatctttcgtgcctctgtctcctcctctttaaaataggaaccaaatggcatccatggtacctcatggaattgtaaagattaaatctaaatctagatttagatctaaaggatttcagagtgtctagcacaccattagctcttgataagcaataactacattccagtccctgtgaatacatttatcttctctgaattccacagcaattttaggttgccaaagcagagagtttctccaaggcagggaaatggaccacaaattactaagaaaaaaaatccagtgatttttaagactaaactgaggccttcactgaggttgggatgtatccaatgtactagactcttctgcttgcatttggatatatccaacttgggatttcaagattctcagcaaaggagcatctctgcatcttatgtaataagtagactctggttagtgaagtgcattttctacccaggcccctcctcagatatatccacatctgtgccacaaagtctacatgtggcccagtggatcccactggatgtcagagataaactctttgtgaagcacgtttgaacatggaatcaactagacataaggaaggccactgcgtaacatatctctctgtcatcccaataaattgtaagctctaagtccaagttatcctgagcaaatagtgtaagcatcatgacaaagaaagggcagttttgataatatcagagttttatatttgagctcaaacacccagcaagaagccagagaggtagtcaggctgggagatgtgtgcctgaaggtctggcacgtggcatcttggttttcaagttaaactttgtctgtccaacttgcctgcttctatggaaagccaagacatggaggggcatctaccatcacggccccctccctgagagagagatgccgacatttacccctcaaaagagtagatactcctttcgagtatctgggcaaatacacccgctcctctcctcaccatgggtggttgctctgtcagttcccgcagtttctggctgagctttctgcgtgcctcctggaattgactgtccagggctggagaaagggtcaccaccagccctaagatcatgtggctctgcagaaagtccctatggagacaaaagagacccacacatataccccaggaatctggggatgcttcaagaagagcctctccttgtgtaagtcaccttgatactcgtgaaggcagctccttctcctctgtattaataagtgttttaacatgcacccaagtcaaaaagagcttttcatgatgtaggttggggtgggatctagctccttagtaaaagaaactagatgaagaggcagccttcaaagtcacagggaaagaaagttctgggctagatggagtctggactcatgtcatgaaacagattctgcttccacagtcaagatatctctggttatcctcagatgtatctcataagcataagtaagctggtctctgtgactgctctctcctccaccagcaatgctcctgccagggctgcattgcacccttatgtaagcctgctcactgccatgtgaatgggcagctacctccctcaaaaaggatttccagatgctgctgccaccatgaagaaggcccttaggtccaagcccctggaagaaagccactgctttcaggtggtagccacccaggtatcaggggaggcagagagcccaacaaagagccactctttcatgtccccaaccccaacacccccttgatttcctgacaccagcagaaatgctcttagacattgtttcccataagagctccagcatcttcacaccacacctgaggaatggcccctcctcttcctttcttcccctaagcatccccagccttcaccatcttcatctcctcatctcatgtgcctcctcctcctgcccacagtcctcagctgctaaaaagacatacatacacttaactgtcttctgtgtctgggtcttccagcatcttctacagctcagaggctcttgactggctggtgttctactctcaggaaaccccgtgtcttggctgaccctgcgttcctcatgtcgtgtgtatcctcccttactcgtgctcccaagacacatccttcttgatccctccatcctctctgtgccacccaccccacgcttctctgcccgcacaggtggcaggttcctcttatcctcctgggaggcccttaccagcctgccttccccaaggtttcctttgcccccaagatctacggtgctcaggctctcctccatttccatgatctccccaatcccacctgcggcgaacctctgctttagcagcatctcctccaccagttgtgacatgtttttcaaatattccacgtcatggaccacgagggactgagaagggctcagggacatcggtgtgaatgtcgcttgcaagcaggacaaccagtcgatggcgggggccatttccttagaggagggacacaaagctgagggggaaaaggaaaagagaaggaaggggaaagggcttccccttgggtgtgagaaaaagaagagaacaggctaactgggggaggggatggagtcagagacagaatgaaaaggtattaagggcactaggaggaagaaggaaaggaggtaatgtttgagaggaagatccccatgcccacagtcttctggcccccagttccaggcaccttgagctggtcgatagtgaccatctggaagagcttgccctgtgcccgccgctgctccaggggcctcagaaactggaacagccgtgaagtgatggagattgacaaggaagagtgttcttgcaccttgcttgggtctcctcccagcaaggttcccagctgattcaggtaagtcaggtattcccgaaagatctggaggaaggaaatgtcagtcacaggtgccagaggtccctgcttttctcctggcctcagagggcagggcctttgtccatgtgccatcttacctgggcatagatcttctgttcttgatcttgcttgaggggaacatcaaactctggctggtctatctgggcacaagagagactggagagaagcagggagcatggcggatggagagggcaggtgtggggaggtggggaatataccatgggagatggccttgggagatggacacaaagattggacagaagagaagcaagagtacaaagaaagggagggattaagggttgaggggcatgagaagaagagtccagatgtgaaaatgggaagagatggtgagtattacaaccagtgtgggtgtgcccagcaaggcagaagcatgataatcagcatcttaaaaggagctattccttgtctcaggaacagggccagggtgagtgaggtgaggaacctgtcccaggtacaaaatctaagaggtaccaaaaactcagtaatcaaactgcaacctaacttaggagtatattcttgcaacaggtagctccatctcagccagccataccagctgatcttcaggcaaccacaggctgtcaagtgatcagaccatgcccattaaagacaattgctaagctgtaaccaatcaagctgtttctgggtgtcacttcctctttctgtaaatactgcctgcctgcattgttgggtggagctctctgaacctctactgcttcaggatgctgcccaattcataaatcagtctttgctcaaataaactcttttttaaaaaaactcagtaatcaagataaataattaacattttaaaaaatcaaaattactaccaaaaatgtatgataaataaaatctcaaaactttgcttatcatggactttttttccccaaaaaaacatacttttagtcaattttgaaaagaatcatgatgtgttcaagaaaagtcctcaatgtatttttgattcattttgaataaaaaaattagtattttcaaaaagattcacacagaattttgtcccattttttgggaaaaaaagcataatcttttttcaaaaaaattcataatgaagaaaagtttgatattttgttccatcatgtattgttgcattgattttgattttttaggaatatttaataaaatactatttatcatgatactgagttttggggaccttcttaaattagcaccccaggtaagcaccatgtatatttcaccttagtctggccctgatgaacccttgtttctattctgaagatctttgcttctactctttcccttttcttctccaatttcaatatcccactcttatcttgagccatatacttttccttctgtctcgaaaaaaactttcacttgacccttttgctacattgtatgtccacagttcaaagaacaaaaaagcatctatgcccattgtttccactttcttatcttcctcctaagctctgtgcagtctgtgtccactgccataactgtttggaaagtatctctaggtatccaagggtgtcttctcattccttcttctctgagctgacccctccttcctgaagctccttttctttcctttgtggcccaccatactggtctagctcccatctctccaatagtactctctcttccctggctcccttctgccctcagtctttggacttctctttctgtagtccattcttcctacctgcttttaacccaagagactatccaggctcacactgatgataatcaccctcctcccactcacactaaatcaaaacaatgggatcactgtgtaatcccccactttctttctttatatccaatcagtcaccaaatcctctagaaacagcatgaactatcatcactagggtgaagttgcctaaatccttgtgcctggctcttcctttccatttctacctctatctcagggcctcaaaaatgctcatttagtttcctcaacacccccagactgaccttcaaaactgctgactctacgcacaaccatcaaaatacttgctctatgcacaattgtcataagagttggatggcctcagtagctcttttttttttttctattatgtcaaatgtttcaccttcgcctggcttcttagaaataatcaggctcaaccttatgtcttcagtctcacttttacctcccactgcaccccaccttgcctcccaaatcctcaattaaatagatcagcctcctcactgactccacgaaggaatcacaccattccaggtcctccccctggctcagcatttccaacgccccatagcttcacctccacttgtgtgaattaaccatgtttcaaggctggcttagctcaccttctctcattctctcctctctgagcctctccttaaccagatcttaaccggcccctaaaggccacatcagttaaactcctgagcagactgtttaaaactaaattttagaacacctcataatgataatcaattcttcttttgtacttatcctttggtaattttgtggctcttttgacagtagggcccaaatatgcagatagcattacattgtttaaccacaagagtgatagctccagtgtttttatttagttactcactcactacaaatacctggcaaaacttctagctgcctggccctgtgataggtcctgagaaacaaaggtgaataaagcatggtcctgttctaaagaggctcacaatcttcaacacagagtgataaatgctgagagcatgaggaaacgaaagtagggagagcagggcttcacctaactcataactagggtgtcggtgaagacttcctggaagagataataaagccaacatttgaaaaacatgtaagttttccaggttcagtgtgggggatggttgcaggcacagggagcagcataggcaaagaactgaggaatattcctggaagcagcagtgagtcagcatggcttgggggtaagggagagaaggaatgtacgggagataaggctggagaagtgtgtaggggtcagatcacaaggtgcttgcaaagctttactaaagattagggactagattctgatgacctggcaagccactgggtcactgacaagcatttaaatacagacagtagcatagttagttagcccttggtttagaaaagttccctctagtaaaaataaagagtaaataaaatgagggcaatcctagagataggaggactggttaaggggctctgagactaatccagattaacagtaagaaagaccaggcctacttctgtcttcccagcactggctctgctgctccatttcccacccccagctaatgtccctgactttcacatcaataattttcccttaaggtagggttgtttcctatatcacacaggtgtcctctcttcccaacctgcaaccttcctctaagggatgattggctagagttggaggcaggccaggtccaactgtgtcttcgccagtgcatccctcacctggatgactggtgtgtgtggagaggcaggatgaggtcctaggtaggctctgaagaaagggaaatggccatactgactcatcagaagtctcagcgttcggttaaagtttaaggaagtccatttaccagagatgcgccagcctccaagctttaaaggagagagagggggctgagcataaggatccgtggagcccatcccccattgtctggatcggctcttacacagctgctactgcctgacctctgccctgcgcccttcgattcctctaggaagccacatctatccttttttatctgccttctcccaaggtcctgatactttcatagggcataaccatttccatctccatctccctcctagaaattggggggccctaggaagaagacccaccctctagaaaaaaaaatggcagccctaagcatgcattggtcccatatgttatgtatccagaaaagttaatatcccaacttttctcacctcctcaataacttgtctgaggggaccagtccctgcagcttcaatggcaagtgtatccatgcaggagttgtagaactggaaggctttctcctccccagagcctgggtgccaggaattctggacctctagaaaggaagcatgggagtgaggactaaactctgattttttttatcttgccccaaattcctatcaaaggggtctggggagtcatgccctatatcataagttctcatcagatgggttttatttaacccatgtaacatgatttactttctaacctgattctggcataacattacgagacaaagaagaaaacaaaaatattttaccccaaaacatgtttctttgccacattttgaaatggccctgcaaagctgttctttgtggaggaaaatttgcatctgtaaagcatctctattagctattaacatatctcattaacatagctagatcttttgattaactaagatctgaataggaaacatttgtcacctattgtctctaagggcagccactataagacttcaaaagaacttcggtctccgcaatctttatcttaccctgaacattccctttctatctatcccagatctttagacaaactcaagcaactgtcaatccggaaatgtttaaattcacctgtaccctggaagccacccccacccctttgagttgttccacctttctggaccaaaccaatgtatttcttaaatgtatttgattgatgtctcatgactctctaaaatgtataaaaccaagctgtgccccagccaccttgggcacatgttctcaggatctcctgaggactgtatcatgggccatggtcactcatatttggctcaaaataaatcttttcaaatattttacagagtttgactctttttgtcggcaggagaattaaaggagtggcaactggtatagaggcaaagagggagggtgggagacagggagcttacaggaaagaaagactcccacagaatatggaaggagggggaggaatagagatgaggaaaataagaaagatgagaggactgcccaatttggaatggatcaacttgatgaaatgatgaaagcagggaaagagaatgaggagaagaagacaatatggaaaataaaagaaatgtggggaagaaaccaagaaggaaaagacagggaagaaaggagaaaggtagcaataagtgggatatgggcaaaggagaaaagagagaaatgaaagacaaaagaaatgattgaagaaattagacaaattcagggaactagagaactttaaggatttggagagaagaaaactcataaggaaaggtttagcaaagagaagaaacaggggaagactcttctagtccagactcctcatccattgatcccaggaaacaaacacactacaataatcaaatgcaagtctctctgaatcatccaccctctaatatctaacactcttttcaccctcagtccccctgatatctattcatcccattgtaggcaatataatttatcctgagcatattttttctttttatctctgtgccttccctgaaagtatccatttacccaaagagaggccccctcccactctttccccatcaaaaaaagagggcagaggggtgcatttacttttcccagattctaattgatagtgtcaacacattctttaggttcccttgcactggaaatgcatgtctatcttatatgttcttattcccaaatcctcaccaccatccaccaacttcctgggacgcacttccaacctcctactcagtttcagctcatccttctggttttcctctcagtcctggcagttttcctctccagcctccatctgcaggaactttacttccactgccaattaactcagctctcctcttcttccagcatatcctttgtacttacccactttttctcttatgcacagtgatgaagccctctctcacttctcaccccaccatcctacccctttcattccaccatcatccatcatctccaatcatccatctctaacatcccacttgttccaggtcaacttgcttgccatggttcaaggtttcaatggagaagcaagaagcaagagatcattgtgagagaggggagctccggcatggtgagagggagagggtaatgttgacaaggagtcattgggagactgaggttttggaggttagagaatgagagtgatggacaaaagaattgaaatgcaggagatgctgaagagatgcttgtggaggaaaacaccatgcataggatagaaactgaacatttggaggaagcaacaaagatggagcttgctaaaagggacaagttggagagaatggagtaattatggatacatggagaagcaaagaagatggaaattagataaagaaaaaaatgcagaaagggaccaagagaaacggaagaagggtacccaaggcaaggcaacaggaaacagtgagagatgagcaaacccaggcagctcccgccatcctgcctcttttactcccccatcatctccaatcatccacccgtataatcccacctgggatggtgcaaatcagttgttccacaactacacagggtttggagcagtcatggtcattttaggcacagagtcacccacttgcacagagcatcttccaccctgctttcctcacccagtattctccgaagtcggtttttgttctttgtggcaagctcctgaaaagaattattggtctctttggcccttccacaggcaaagctgaagaagtcggtgcagggggccacacttgtgttcccagaggccaggtaatgatcccggagatccaaacacacagatgtctcacaggggcctgtggggaaaagctcagagctgggaaagaagaggcaaaaagacaagggctcccccaaggggctaggcaaagaacatcaggtgagtaactaagtggggagctgatgaaaaagaaatggttaggatgcagggaggaagaagaaccatggggaccccaagggtcagggtgggcagaagccccaggagcagggactgggcctgggccccagggctgggggagggctgactaggttagggggtctgggatcttgcttacgagggccacagttctggaagttgtagaacaaaagcacagaaaaacaaaggagcaggcccaaaatcaggatagctgtcagcacccgcctggccactgcccatggcctgctcccttccacgggcagcctctcttctggagtgctctgtgggaggaaccaagaggtgaaagatacaagatgggggttgagagacagggatgggaagaagaggagagagaatgaatctgttggtgctacagtccctttatacagaaataattatcccaattcttcctaaacccagccctactttaactcctgggagatgagaaaacaaggaatgtcaactgttttgggtgaggatgaagcagacagttagtagatgagtgtttgtgggattttagagccgagagtgacaacatcagtgtattccagacccaggagaggaggccacttacctcttggctccagagagttcccattccacctgcctggctgcgttccctcggctcttcctcactttggtccccaccttcctgaagtgagtggagggagaaggaggagagagaagctggttcaggaaatggtgcattgaagagagttttatcaggccattttgataccctcgctgcctgccctgcccccacacacatatttttatctcggagcagtgttcccagatgggcttcagaacgaacctgtcccctgaatgtgccatttctcgatccctctcccattacctccctctctccccacctttctactctgtaagccttacattccctcccctccagtgggggcaggacttttgcacacagccaccctcacccctccccgctaagcctctgactccaaaaggggacttaccatctgtctatcttctgtggctccagaatccttcctggttccactctaggagctgattcggaggactggggtccaggaaacaccccccgccccagttccttgatcctggagaaggggcacttctgctgctctttcgccttgtccccagacacacaggactggcctctgggtggagcctgcttatcagtggggggcacccaggcttctcctccccctttatctcagcttctcaggggagaagagggagggagtcttcactccccaagcaatcttgcccttggtctgctccttttgtcttgcactgtgactctgcccatgaagttcctttatttctaaaatattcttccttctctcatttcttctgtattaaaaaaaatatgaggcacagtaaaattttaaagagtttatttaagtaagaagcaattcatgaattggggagcaccagaccgacaaaggtttagtgttgcgatgacaaaatgtcagaggcaagcatttattgggaagttatagaagcaaaatgaaacattatttgcttagtttgcagttacataattgcattttttaggtaactttttggaaagtccctagtcacataatcatatgttagttggctgcttatcattggctggggttaagttttatttgttgtaagcatttatcagaaattgacccaagttaagtttaatttatgtttgtagttttagcaagaatatggctatttttaaggtctttggctttgtttgcctgggaatttttcaggcccagtctccattttaattttgttttcacacctctctgattggcttttctgggattcatcaattcccaggtcaaatgccacctttcccaggaggcctcccagctccatgcccattcacactgttcccaagcatgcttaattgtttctctcggtgtttcatagctctgctggctgctggcaaagtcatgcattcaaaagatcacccagctaggagaccctaatctgctaattattagctctgtgacaataaacaagccacttaaactctgaggcaggtaagcaagttttgtcatctggaaaatgagggtaatacttgcctatgcctacctcataggatctcatgccttctacaaaagaataaggctttactgagcccctctttctttcattctgctttctgttacactgatagcttgcctcttcatctccttagtgattgaaaactatgtcatagcatgtacagtgtctggttttcattcctgcccacccaagatgctttctaaatgttaatagaaatgaattgcattccaagccagaaatcctctttctcacatcatattaagcccttacctgtggtctgagagaggcaagcacatttctgggggaaggtgtttcaactctgtccttgtttcctcatcccaggaaaaaaataatgtaatttattaggttagtcttgcaaatgatcccctggcgatatttccagattccatcagcactgtgctagggccttggtgcacttgccaggatgagggtgggtgtggagaagtggagtaaagccattgtgccccctggggccagctggtcgggtatcatgaaagtcataaagaaaagtcagaacttcatacattagaaaagaaagcattgggaaaaataaggcttttgaggaaaggtgtggcaagatacaataatatctaagaaacgccggtgtggtattggggatctggactgattggataaaagacaagaaacagagtggttagtttggtgttgcaggagtgatgaagggagggcccggcccaaggggatggcagaggggagggaagtgcgtagaaagaaaaattgtatggaataaagtcatggcaatggattgaatggaggaggggtttatgatagagccacagaggagctccaagttgcatttctgcatgactaggggaatagtgatgccagcgaacaatggaattttgattaaggggggagtaggaatcagagtgaggggaaaaagctgactcaggattctagaggtgtttggtctgtgtgggtacaccctgatggtgcctcctcttcaaacttcccttccacagaaagtccaatactctccccatgggcttttagcttccttcacacatattcccttcctcactccttttctatcaatcaaagcccctgagctgatgtttccctaggaagatgataatggagaccacttagatttgataagagaaagttgaagatggagtgtgctctgtgacatttgcctatggacagccaccacagcctggacttaggttctctccctgtcagagaagctgagccagccacagggatagggcagcacagctgccaggtccaccattcctactcagcctcctcctgaaggccaagcaacctccatcctgggagctgtctcaggagcaggacttcttcttatcacccatatcctactccatggtgagtcatcaccagcacagccatacccagtcacgggagtgcagcagccttcactcagatctaagccccgagaagaggtgtgttaacagctgtggcacatggaccacatttatcttttcggatgctgcctccttcttgccctcaattgtcctgtctgtttattttaattccaggaggttttgtttcatgccataatagtatcaaaataaaatattggtaataataaaaataaccactttttacggagcaccttctttgtgctaggaatgtgctaaatgttttgcttgtacattttccttcagtcttcacagcaactttctgagggaaataacagcttttattttccccattttatagatgagcggtcagagagatatgaaagtacagtgaacttactcaaagttacaaaattaataattagcagaaccgagaattgaaccaaagccttaaccattgagcctctcagtcactaagtatctgttttttggaagtttcttcatagtaaacatcttccttcatctaaactcttctttttaaactatgtttcactgcttggccttgtgaggtgacagttttggggactagtattctcaaactctctaacatccagtttcatcatctgaagatcatggcctttgccacaatgttctatccataatcagctgccatctacagtggatgtggtatcaaaatcaaggacaggacattaatctgtctattgtgacactctcaagtgtgcacatgactggcaatttgcttctaagatcactcgattgcagtgatagccactaagaagctaccccctaaagaacaataaacccagttctgagtgaaccgaagtaagccttgacatcacaagcaatgttgaggactttgcccagaagatgatggagaaacagatcatggggggcaggttttggggtgcactgattgctctttcaaaggaagcaatacttgagaattggggagctcctttgggaaagagtagcttgtaagttcagtataccacaaagtggcttttgaaataatttaagtgataagtagatggacctctttcaatatgtgtgtgtgtgtgtgtgtgtgtgtgtgtgtgtatatatataaatatatatttatattatatatattatatatatatttatatttatattatatatattatatatatatttatattatatatatattatatatattatatatgtaatacatattatacatataatatatataatatatatatatatttttttgagactgagtctcgccctgtcagcaggctggagtgcagtggcgtgatcttggctcactgcaacctccgcctcctgggttcaagcggttctcctgcctcagcctcccgagtagctgggactgcaggtgcacgccaccatgtccagctaatttttgtatttttagtagagacggggtttcaccatgtttgctaggatggtctcgatctcttggccttggcctcccaaagtgttgggattacaggcatgagccactgcacctggtccaatattttcatttttatatacatttttcttttatagatatatgactctaagaagactaaaatacatagcctctgtatttttattaaatcaactaaaatatactaaacaaataatagctgtattggtacttgaatatgtcaaaaacttgaagaaaatgctcagaagtctggagttttaattatgtatgggtagaaacagctcaaaaggaggatctttgtccttttttattttctttttggtattttctacatgccaccacatttttcttcctaatccaacaggttttgaagatagtactctgaatacagagactctaataagttgtgtcaattcaacatatgtttcctcaagaaaatttacataagttcttgctaaaaccaaggtcttagtcaactactaccataataatgctttgttacaaaccacccaaaactcaatggttagaggaacaagcatttattctttttttttttttttttttttttttgagacagagttttgctgttgttgcccaggctggagtgcaatggtgcaatctcggcttaccacaacctccgcctcccaggttcaagcgattctcctgcctcagcctcccgagtagctgggattacaggcatgtgtcatcacacctggctaattttgtatttttagtagagacggggtttctccatgttggtcaggctggtctcgaactgctgacctcaggtgatccgcccgcctcggcctcccaaagtgttgggattacaggcatgagccaccgtgcccagcaagcatttattcttatgtttaaatgtctcacttggaacaatgagaaacaaaagaatgggacaagctgtgtggtctccctcttagcaaatgtaccagttacttattactccataataaacaaccccttatttggtggcttaaaaaaaattggctctccattctatggattggcaaattaggaagagctgaagtatcctctgtgctcatttgcatctttggtttcacatagcaggccatttcagggctacctagtccaggatggtctcacacacatggttcttggttggctggggctgttggccaaggtgcctcagatctcctccatgaggcccctctagcaggctagcttgggctagttcccatggcaactagattctaagagagcaagagtaaatgctgcaaggatctggagacctaggcttggagttatacaatatcacttctgccatattctatttgtcaattcaagtcccaaggccagctgagattaaaataaactccaccacttgaggggaggatttgcaaataatttgcagtcatgtttaatatgccacaggagaaagacagttttcctttgaagcaacctatcatgaacagatcactgaacccgggagttggaaaacttggttttcagtcctacatcagttttaaagtagctgggtaatttttacctactttttttcacctcaataaaatctagcactgaaaacctatgtttctaggtttctagtctggtctctgtttcttttaagggggactttaaggtcccaagtcttctaaagtctcttaggtttaaggtcaaagcattagatcaatgtatggcaactgattctctcccccttaaagatgaccatagatgaaagaaggaactatctaaacccactaagccagtcctgaaagtgctggccaaggagattaagtagagggtcatatagcagctattgggactcttccttaggagatacttggtatttttccattgccttggcatgatttgttgttgttgttgttttgttttgtttgtcccttcttctattctgctgcctagaaggaagatgtttccttctaggaagataaggatgacaggaatgaggttcacacttgggggaactgttaacctcttgagctagaaggaacccagcatctgggtgctgtggacgttgtggagaaaagtggccatgtcggctctagactgcatctctacaaacttttacatgtgagaaaattactattttctttaggctactgtagtttctttctattacttaagactaactttaatcctactaatagataaatattaatacctaagataaatgaggtttgaccatgtctacctattcagtgttgttagatacagatgaccatgttgcgaactgcacaattttaaggattgacaattacatgaactaaaacgtgcatggttttctatagggttgagccacacaacaaccttgtacctaacaactagtatgatgtggaaagaggaagttgatctcatactaacgtgttgttcctatacttcttgttggttcactcagagacctcaatattcttgctcaagttgttcaacttgtgttttttctcttttctttcttttatacacagggtctcgctctgtcacccagggtggagtgcagtggtgcaatcttgactcactgcagcctcaacctcccagctgtatgaccttgaattgaacacctctttttgagatggggtctcaccctgtgactcaggctgcagtgcagtggcatgatcacagctcactgcatcctctcccgggctcaagcaatccttcacctcagccccaccaagcaactgagactacaggtacacaccaccacacccggctaaatttttgtttactttgtagagataaggtctcactatgttgcccaggctgatcttgaactccttggctcaagtgatccacctacctcagcttcacaaagtgctgagattacaggtatgagcccctgcacctggccacttttataagtctataactgttggaatcctcccaagaaaatagaaacagctctaggtatttcagagaaaacttaatacatctaactagatacataggtaatagaagaattgagaagttaaatgggtgggggagagaaaatgaggcagtcctaaaattatcaacagaagaaaactaccacaaatctttagtttagaggaacaaagaggagaaggggtgttaccagagtctgggagttgtagcacgtgcagaagatggaccattctggaccttctcagcaagctgggatcttagaagaaagaactatttggtgggagatggagccactgtggacatatgcctgcccttggaggtgccccctgaggcagagagagaaaacaagaaacatcctggtttcatctctgcttccaccctcttccccttggctgaatctttgcagaagtcagaaagaaaagagcctggggaaacagttcctcgtgatacagagcagaacagaggaagccaggaaactgacctgcaaacaggcaaatgactggcacagagtatttgtaggagtatttgatttgtgcgtaaaggcactgggaacacgcagtactgcttcatagcccaagttaccacgggtggctcaaagctgagcagaaaatgctcttttatgcagaactcctcagtatcttgaaaattagatgtttttattatctggaaacagcatccttgaaatagacattgctattcttatgatagtctgcaacagcagtaataaaggtaagcctccttcaaatacctctgtagataacagacattaactcagagaaataagagcaaaagaaaaataacacagtggatgctgcatagtaaccacagctgcctggatgatttatttcctgtgaaaacctacccctcagggaattccaaaaacacttgaagtgaactttttgggagaggcaagaacaggatatttgaggtgctgatgttcatatgacatcatgtgtatccccagatgaatggatcaggcatcatttgaattctatgaatatttacttcaagagtgtagtctttattaataagcaagcttggtctatggtttttctttttaaaatgtcatttttatagcctgggcaacataacgagatctcatctctatgaaaaattttaaaaattagtcctagctactcaaaaggctgaggctgaggtgggaggataacttgagcacaagagttcaaggctgcagtgagctatgaaggcagtgactttgtgacttgcagagtgagatgacttcccctgggttttcatttagcctcatatatcccagtcatggaggtgaataattcagaaacccagaaatgaaatggatgcagacaataagagccccaaggaaagcctgctctctccagcaaaaggagcaggaaaagggcagcctaccaagacagaaaacataatagtcactctattcaagccaattaccacagaaaaaatggtggctcctttcccatccatgccagcaaaggctgacaggaaagcctagatttccacctttgaaaggcatagtgaggcatgcaaacaacctcccaccacacacacacacacacacacacacacacacacacacacacacacatgcgcacacacacacacacgtggtatcagagaaggccaagtagggagccagaaatttcatcctcactggacaataaagaggcccccatcccctcctgtcagaggtgctggtggagggagagtcatgactttcatcatcagtcagtagtaagaagagcaaatcaccccccagccatagtgtcattggaggccgtgtgggagtcactcctatccctccagacagaaagtcctaccccttcacacagaaaggtatcaatagacaccaaatgagggcttgaaatcctaaccttgcccaacaataatgaagagtcttaaactgggttgtcaacagaggtcaactgaggaaaccgaatttctactctcaccaaaatggtgctccctactgccaccactctgctggagaagtgcctgaaaaagccagctaaaatagaaggtttaaataagatctaggtcctcataacatagtacaaagatgcccaagtttctatgaaaatcactcgttataccaacaaccctggagatctgaaactgaaagaaaaagaaaaagataatcaatagatattagcatagaggccaggcacggtggctcacgcctgtaatcccagcactttgggtggccaaggtgggtgaatcagctgaggtcaggagtttgagaccagccggggcaacatggtgaaacctcatctctactaaaaatataaaaattagccgctcttggtggtgtgcacctgtaatcccagctactcgggaggtggaggcaggagaatcgcttgaacttgggaggtagaggttgcagtgagctgagatcacaccattgcactccagcctgggcaacaagagagaaactccatctcaaaaaaaaaaaaatatatatatatatatatctgtatatattttagcatagggatgatagaaatgttagaattctgtgataatgattttaaagcaatcataatacaattggttaaatgagctgaaacaaataaaagaaaaggagtttcagcaaagaaacagaggatgtaaagaagagacaaacaaattttggaactcaaaaatgcaaaattagaaccccaaaataaataaatagcccaaatttaaaactcagtggatggactcaacagggaacagatgggtaaaaaaagcaatgtactagaagacaaaacaacataaattacccagtctgaataacagagagaaaagggactgggaaaaatttgaacagagcctcagagatctgtgagactataataaaagatctagactgggcacgatggctcacacctgtaatcccgcactttgggaggccgaggtgggtggatcatgaggtcagtagattgagaccatcctggtcaacatggtgaaacccccatctctactaaaataaaaaagattagccagatgtggtggcacacacctgtagtcccagctacttgggaggctgaggcaggggaatcgcatgaacccgggatgcagaggtttcagtgagccaagattgggctactgcactccatcctggccacagagtgagactccgtctcaaaaaatatatataaataaataaagatctaacgtacatttcatcagaaaaaggagggctaaaaatgtgctcaaataaacgataactgaaaacttcccaaatttggcaagagacaaacacctacagattcaagaagctgagcaaatcccaaacaagatcaacccaaaaaaatccacactgagacgcatcatagttaaacttctgaaaactagacacacagaaagatattaaaagcatcaagaaaaaaataaagtctatattggaaaaacaattcaaaggacagtggatttctcatcagaaaccatggaggccaaaaggaagtgacataatgttttccaagtgctgagaaaagacgactgcagcccagaatcctatacttagaaaaaatatacttcaggaatgaagaggaagtcaagacatctcagatgaaggaaaactaagagaagttaccattagcagaaccatcctaaatgaatgactgaagaaagttctctaaacaggagtgaaattacaaaagaaagaaggaaacttggggccgggcacagtggctcatgcctgtaatcccagcactctgagaggctgggatgggcagatcacctgaggtcaggagttcaagaccaccctggccaacacggtgaaactccatctctactaaaaatacaaaaattagccaggtgtggtgttgcatgcctgtaatcccagctactcgggaggctgaggcaggagaatcgcttgaacccaggaggcagagattgcagtgagctgagattgtgtcattgtaccccagcctgcgcaaaaagagtgaaactctgtcttaaggaaaaaagacaaaaaaaaaaaaaaaaggaaacttggaacatcagaaaaaaacatagtaaaccagtatataggtaaatacaatagaccttcctttttgtgaagactttgaaattgtgtttgatgattgaagcaaaaatgagactatatctgatataaatgtagagaaagaccattacattataattatgggagaaaataagatgactatgattaattatgtacatgtaacataatactaaagtaaccactaaatttattagggcaagggccaggcatggggctcacacctgtaatcccagcactttgagaggccaaggtgggtggattacttgaggtcaggagtttgagtccatcctggccaacatggtgaaaccctgtctctactaaaaatacaaaattagccaggcatggtggtgtgtgcctgtaattccagctgcttgggaggctgaggcaggagaatcacatgaacctgggaggcagaggttgcagtgagctgagatcacaccactacactccagcctgggagacacagcaagactctgtgtccaaaaaaaaaatatatatatatatatatatatatgcatgtgtgtatatatatatatgcaagaaatacacccaaaaagactacaaataaatcaaaatagtttgaaaaatgttcaagtagcccacagaaagccatgaaaaaatagagaaataaaagagagaataaacataaaacaaaaaattaaataaatgttacactttaatgcaccaataattacattaaatgtaagtagtctgataaaccaagttaaagacagagactggcagagtaggttacatccccccttatatgctctctacaaaaaattcacttaaaatataatgatatagacagcttaaaagtaaaatattggaaaatggtatatcatgcaaacattaatcaaaagaaaggaggggaccaggcgtggtggctcacgcctgtaatcccagcactttggaaggcggaggcaggtggatcacgaggtcaggagattgagaccatcctggctaacagggtgaaatcccatctctactaaaaatacaataaaaattagccgggcgtggtggcgggtgcctgtagtcccagctactcgggaggctgaggcaggagaatggcgtgaacctgggaggcagagcttacagtgagctgagaccacgccactgcactccagcctgggtgacagtgcaagactccatctcaaaaaaaaaaaaaaaaagagaaaaaagaaaggagtagttttattaataccatgtgtaatagacttcacagcaaagaaaatcatcagagacagagatattatataagattaatccaccaaaaagacatagcaatcctaaaattgtgtgcaccaaacaacagaactgaaaaatatgtgaaacaaaaactgatagaatgggaggagaaatagataaagtcacacttacagttggagattttaacaccccttctcaacaaattataaactatgtagacaaaaaatcctcaaggatataaaagaactcagtgttctaattaacacgtatagcacacttcacctaacagcagaatagacattctcttcatgcccacaaaacatgtaccaaagtagacgatatctttttttaaaactcaaaaattttaagagaattgaaatcatacagggtgtgttctccggttagtggaaatcaaagagcagaaagataacaggaaagtttctgaacacttgtaaactaagcaacagacctcttaataatctgtgggtcaaaaaggaagtctcaagggattttttcaatacagtgaattgaatgaaaatgaaaacacaacaatcaaaatttgtgccacacagaaggattgagagggaaacttacagtgccaaatgcacacattagaaaagaagaatagtctcagatcaacaatgtaagttcccactttcagaaccgagtcagaggctgcctgcagtgactcacgcctgtaatcccagtactttgtggggctgaggtgggcagatcacttgaggtcaggagtttgagaccagcctggccaacatgccgaaaccttgtctctacaaaatatagaaaatttagttgggtgtggtggcacatgcctgtagtcctagctacttgggaggctgaggcaggagaatcacttgaacccaggagttggaggttcccgtgagccaagatcacaccactgtgctccagcctgggccacagaacgagactctgtctcaaagaaaaaaaaaaaaaaaagaactgaacccagccagaaaggaatgaaatgaacccaaaacaatcagaaagaagaaaataataaatataaagaatagaaatcaatacaattaaaaaacagaagagaaaactaatgaaaaagagctggatctttaaaaagataatgattaaaactgacaaatctctggcaagactgacaaaatgagagagtgagaaagagaagacacaaattaccacatcatcaatatcagaaatgaaacaggggataacactatagtccctgcaaacatcaaaatttcatgaacaattctacatgcataatttgacaacctagataaaaatcaaatgatttattaaaaaaatacaaactcttacaatgcatttaagataaagtaggtaatttgaatagccttaaaaggaaatttaacttgtaatttaagagctcccaaatgagatattgccagcccctagtgattttatgggaaaaactaataaacatttacagaagaattaacaccaattctatatacaatctcttccagaaaatatgagaggaagaaatactttccaattcattttatgaagccattttcaccctaatgccaaaaccagaccaaaaaaacacacaaaaaaccctgcagaccaataatcctcatatagctgaaaatttcataataaaatattatcaaatagaattcagtaatatgtaaacattattctccatggccaagtaggatttattctaggaatgcaacataggtttaacatttgaaaatcaatcaatgtaatctaccatattaatggggtaaagaagaaaaatcatataatcgtatcagttaattcagaaaaaatcattagacaaaattcaacacctatccataacaactctcagaaaaataggaatagatttgacacagtgcatctacaaaaatcccatagctggctaggtacagtggctcatgcatgtaatcccagcactttgggaggctgaggcaggtggatcacctgaggtcaggagtttgagaccagcctgacccatacggtgaaactctactaaaaatacaaaaattaacctggcatggtggcatgtgcctgtagtcccggctactcaagaggctgagacaggagacttgactggacccaggaggtggagattgcagtgagccaagaccgcaccactgcactccagcctgggctccgtctcaaaaaaaaaaaaaaaaaaaaaaatcccatagctaacgtgatatgtgataagggactgaatgtttcccccataagatcagaaacaaggtaagcatgcctaatccactccaatcactcttattaaatgtagtgctagaagctgtaataactacaacaaagtaagaaaaagaaatagagggaatacagataagaaaaaaagaattaaaatggtttctgtttgaagataacatgattgcctacatagaaaattccaaagaatatacaaaaaaagtttagaactcaaatgtgagttaattaaggtcacaggatacaagataaacatacaaaaaacagttgtgtttttatttgctagccatgaacacgtagacattcaaattaaaaatataataacgtttacagtcactcaaaaaatacttagcaaacaaagcgtgtaatagtcaaggttcttcaaagaagtagacccaacaggatgtgtatatatatagtcatgcattgcctaacaatggggatatgctgagaaatgtgactatgcagtctcatcatgtgaacatcatagaatgcatttacacaaacctagatattatagcctactatacacgtaggctatgtggtatggcgtattgctcctcggctataaacctgtacagcatcttactgtactgaacggtgtaggcaattgtaacacaatggtaagtagatatatatctaaacatggaaaaggattttttcagctccattataatcttatgagaccactgttatatatgtgatctgtcattgaccaaaacgtcattgtatggtgcatgactgtacatgtatgtaagattttttgttggtatagacaaagttattctataatttatatgaaaaagaaaaagaatatataaaacaattttgaaaaataagaatgaagtaggagaaatccatttacctggtatcagcagtgattacgtagttacagtaattaacaatggtagtgctggagggacatagagatcagtgaaatagaacagaagtcagaacccgtaaatcggcccacataaacatatcaagctgatttttaatgaagtgcaaaagcaattcattggaagaaatccttttcaacaaatgttgctaaaacaactggacattcataggcaaataaatgagccttgacctcagtctcccatcttatatggaaaataaccccaaatagatcatggacttaagtgtaaaacataaaaatataaaattgagaggaaaaagcataggagaaaatctttgcaacatagggctagacaaagatttctgagacttgacaccaaaagcacaatccacaaaagaagaataagtaggacttcatcaaaattagcaattttgctctgcaatcaaccatgataagaggattaaaagatagactacagactgggggaaaatatttgcaatcatgaatctgacaaaagactggtatctaaaatatataaaaatgttccacaactcaacattaaaaaaacaaaaaattcaatttgaaatgggcaatagacatgaagagatatttcatcaaagataatataaatatgacaagtaagctcattgaaaaatgtttaaaattattaaccattaggaaaatgcactttatatggcagtgagatatcactgcatatctatcagaatggctaaaataaattatgacaaccaaatactagagagtatgtggaaaaactggatcactcatatattggtggtgaaactgtaagtaaaatggtatagttttgtagagacataaaatgttatattcacataaaatctctacgcaaatgtttacggtaactttattcataataaacaatccggtcacattctgatgtccttcaatgagtgaatggttaaacaaactgtagtaatttataccatggaatattactcagcagtaaaaagcagtaaactttttttaaacttttattttaagttcaggagtaaatgtgcaggtttgttatataggtaaacttgtgtcatgaaggtgtgttctacaaattatttcatcactgaagtattaaacctagtacccattcgttatttttccaaatcctctcctttctcccaccctctaccctctgataggccccagtgtgtgttgttctctctatgtgtccatgtgttctcatcacttagctaccacttataagtgagaacgtgcattatttggttttctgttcctgcattaatttgctaaggataatagccaccagctgcatacatgttcccgcaaaggacatgatatcattctttttcatggctgcatagtattccatggtgtatatgtaccacattttctttatccagtctatcattgattggcatttagcttgattccatgactttgctattgtgcatagtgttgtaatgaacattcgtgtgcatgtgtctttaaaatagaatgatttatattcctttgggtatataatcaggaaagggattgccgggtgaatggcatttctgttcttaggtctttaaggaattaccaattactgtcttccacaatggatgaactaatttacactcccaccaacaatgtataagcatttctttttctctgcaaccttgccagcctgttattttttgactttttaacagtagccattctgactgacgtgagatggtatctcattttggttttaatttgcatttctctaatgatcagtgatattgagctttttgtcatttgattcttggccgcatgtatgtcttcttttgaaaaatgtctgttcgtgtcctttgcccacttttttatggggctgtttttttttttgtaaatttgtttacaagttcctatagataatgctagatattagacctttgtcagatgcatagtttgcaaaaactttttcccattctatgggttctctgttcactctgttgatagtttcccttgctgtgtagaagctctttagtttaattagatcccatttgtcaatttttacttttgttgcaattgcttttcgtgtctttgacatgaaatctttgctcatttatatctcctgaatggtattgtctatgttgccttccagggtttttatagttttgagttttacatttatgtctttaatctatcttgagttaattttgtatatggcataaggaactggttcagtttcaatcttctgcatattgctagccagttatctcagcaccatttattgaatagggaatcctttccgtattgcttgttatggtcatatttgttgaagatcagatggctgtaggtgtgcagccttatttctggccttcctattctgttctgttgatctatgtgtctgtttttgtaccattgccatgctgttctggttattgtagccctgtagtatactttgaagtcaggtagtgtgatgcctccagctttgttcttttggcttagcagtgccttggtgattcagctcttttttggttccctatgaattttaaaatagtttttccagttttgtgaagaatctcaatggtagtttaataggaatagccctgaatctataaattgttttgggtagtatggccattttcatgatattgattattcctatccatgagcatggaatgatttttcatttgtttgtatcatctctggcttctttgagcagtgttttgtagctctccttgtagagacctttcacttccctggttagctgtagtcctaagcattttattctttttgtgatagttgtaaatgggattgtggtcctgatttggctctcagattgactgttattggtggaaaggaatgttagtgaattttgcacattgattttgcatcctgaggctttgctgaagttgtttatcagctcaagaaacttttggagtgggactataggcttttctagatatagaatcatgtcgtcaacaaatagagatagtttgacttcctgtcttcctatttggatgctcttcacttctttctcttgcctgattgttctcctggtcaggacatccaatactatgttgaataagagtggtgagagaggacattcttttcttgtgatggttttcaaggtgactgcttccagcttttgcccatgcagtaggatgttggctgtgggttttccatagatgactcttattattttgaagtatgttccttcaatgtctattttatggagagtttctaacatgaagggatgttgaattgtatcaaaagccttttctgcctttattgagataatcatgtgttttttgtctttagttctgtttatgtgatgaatcacatttattgatttgcatatgttgaaccaaccttgtatcccagggataaagccaacttgatcatggtgaataagtttttgatgtgctgctgggtttcatttgccagtattttgttgaggattttttgcattgatgttcatcaagaatattggcctgaagttttctttttttggttgtgcctcttctaggttttggtatcaggatgatgctagccttgtagatgagttagggaggagtccctcctcctcaattttttgaaattgtttcaacaagaatggtaccagctcttttttgtatatctggtagaattcggctgtgaatctgtctggtcctgggcttttttgtttgtttgtttgtttgttttgttagtaggctatttattactgactcattttcagagctcatcattggtctgttcagggattctatttcttcctggttcagtcttaggagggtgtatgtctccaggaatttatccatttcttctagattttctagtttatgtgcataacggtgttcataatattatctgatggtgtttgtatttctgtggggtcagtgtaatatcccctttgtcatttctaattgagtttatttgaatcttctcttttttcttccttattagtctagctagtggtctattttattaattttttcaaaaaaacagctcctggtcaatctccttcagttcagctctgattttggttatttcttgtcttctggtagctttgagatttgtttgctcttggttctctagtgcttttagttgtgatgttaggttgttaacttgaaatctttctaactttttgatgtgggcatttagtgctataaatttccctcttaacacttccttagctgtgtttcagagattctgatatgttgtatctttgttctcattagtttcagagaacttcttgatttctgccttaatttcattatttacccaaaagtcattcagaagcaagttattcaatttccaagtaattgtatggttttgagggaatttcttagtcttgatttctaatttgattgcactgtggtcaaagaaattgttttttatgaattcagttattttgtatttgctgaggagtgttttacttccaattatgtgatcaattttatagtatgtgccatgtgatgatgagaagaatatatatcctgttgcttttggatggagagttctgtagatacctatcaggtccatttgatccagtgctgcgttcaggtcctaaatatctttgtcaattttctgtctctatgagctgtctgatattgtcaatatgttagacaacagggtgttaaaatctccctctactattgtgtgagtctaagtctctctttgtaggtctctaagaactcgctttatgaatctggatgctcctgtattgggtgcgtatatgtttaagaaagatagcttttcctgttgacttgaaccctttaccattatataatgtccttctttgtctttttttgtttttgttggtttaaagtctgttttgtcagaaacaaggattgcaatccctgtttttttctgttttccattgtcttggtagacttttctccatccctttattttgagcctatgtatgtcattgcatgtaaaatgggtctcttgaagacagcataccaatgggtcatagttcttttatccagcttccagtcttttaattagggtatttagcccatttacttttaaggttaatgttgatatgtatgaatttgatccttccatcatgatgttagttgattattttgctgacttgtttatgtggttgctttatagtgtcactggtctgtgtacttcattgtgttttgtaggggctggcaacagtctttcctttccatatttagtgcttccttcaggagctcttgtaagtcacatctgttggtaacaaattccctcagcatttgcttgtctggaaaggatcttatttctctgcttatgaagcttagtttagccagatatgacattctggtttggaatttcttgcccccaatctcctctggcttgtaaagtttctgctgagaggttcactgttttgttttgttttgtttttgagatggagtcttgctctgttgcccaggctggagtgcagtggtgcaatctcggctcactgcagcctctgcccccccaggttccagtgattctcctgcctcagcctcttgggtagctaggattacaggtgcacaccaccatgcccagctaaattttatatttttagtagagatggggttttgccatgttggccaggctgctcttgaactccggacctcaggtaatccacctgccttggcctcccaaagtgctgggattacaggcatgagccaccgcacccagccaagaggtccactgttagtctgatgggattcactttgtaggtgacctgacctttctctatagctgcctttaacattttgaccttggagaatctgatgattacacgtcttggggatgttcttcttgagtagcatcttactggagttttctgcatttcctgaatttgaatgttggcctctctagctaggttggagaagttctcaaggattatatcctgaaatacattgtctaagttggttccattctccccagtgtctttcagggacaatgatgagttactcaatctctttacgtaatcttatatttctcagaggttttgttcattccttttcattcttttttctccatttttgtctgactatcttatttcagaaagccagtcttcaagttctgagattctttcttccacatggtctattcttctactaatacttgtgattacattatgaaattctcatagtgtgtttttcagctctatcagcttagttatattcttttctatactggctattttgtctgtcagctcctgcattgttttatcatggttttcagcttccttgaattgggtttcaacatattcttgtatctcaatgatcttcatttctatccatattctgaattctatttctgtcatttcatccatggcagcccagttcagaatgcttgctggagaggtgatgtggtcatttggaggaaagaagggactgcagtttttcttttatttttattcaagttttgagtgttcttccatcaggttttttttctcatctttgtgggcttatctaccttcaatctttgaggttgttgacctttggatttttttttttttaaaacctatttgatgaccttgagggtctgattgtggtataaggtgggttcagtgaactagcttcatttctgaaggattttaggaagccaatgcttagctccaactcctatactgtgttctctaactggaggacttgcattaggccccagttttgttctctggctctttgaggcatggcatgcagtgtgctggtggtgggggtagtgcagtgaggtgcagcagctgtggcagagtgctagtgggtgccaagtgcctgcctccttgcagttgttcaccacagtgacagaggcaatgcagctggggtgggggacagtggggtgaggcaccctgctggacactgtgtatagttgcactggaggtagtgttgggtctggtgtggggtgttggctggtgcagggtgccttctctatgccccacaagcaggagtgattgttcagggtggaggaggatgtgctgttctctgcacagtgttagttcggggccaggcactggcaggggtggggcttctgactctgtgcccaccaaggttccatctgcaatggcagcctgcaaagggaagtagagcagactgctctcccctccactgacagggcaaagaaaacaaaccccttccactcatgttggcatgtgccagcaaagtgatgtggggagttgctatgtgcctggaggaagcttcagtatgggagggaatggtaggcttgtgtgtggccatggagccacccagctggagctgtccactgatgaggcacagtccaccagcacagaagctattgtggtgggcccccagggcactggagattgccctgcaagaaggtgtggcctggctagggccctaggagaggccagtagaccaaggggtgttcaggttggaccagcctggtctgatgggcaagaccatcctgaaagatcaggtccgacagttcccctagggttaaagtctcctatgggagcaagtcaggcctgggggatggccatccctggaggtgcaccactgcagacactcccacatcaaaccctcaggctccacatcagctggcttgctgcctgtaccacttctctaagtagtgctccctgccaactcgagtgtccatggtggttgaggagtctcctcctgccaggttccagaggcctgtggtgaaatcaggtggtcagaggccctggcactatatttgccaaaaggtgatccacactatgtactctttctcccattttttacttggcaattgaagtctgctgcagatgcatctcattagcaaagctctggtaaaagcctgtgcgactgcaagggagtctgggagagcatggtctgatttctatcttggagaagagggatttataatatgggaaattctccaaacatagaaagacattcaaaagatacttttgagttacaaacacaacaaatgtccactacagatagaataccatgttttgtaactaagagactatatttgctttttgaagatctaaagacaattttcaagttctgctggatagaataggtaggagggagaagggagtatgtttctttgataaattatccactttctccttcagttcttggtgttctctatttcttgattcaatattaatatattgtatttttatagaaacacatacatttcacttatttaattttagtagcatataactgtgcctaacccttcttagttttaatattgttctccattgctatatatcctctctatttctaattttattttattttgtatttcctttttattacaaaatatgtttattatagcaaaattgaaaatcataaaagcacacagaagaaaaaatcatttttactttagtaaaaatagctgtaatacacctagtaatagctgtaataaacagcccattagccattccacccataccccattgtaaaacagacatgaggtttagatgggattcactctaccattatatctgggatggatcatatttgacctgagcaaaccagagtgattttattcccctgcccaatgtgattagttcaggtagagtcatagttaaaccattcagtgtctggcactccttgtcatagtgattggttcaggagtgggcacatgacctatgtcggtctagttttaaagaagcccaagacatatgtttgttaggataagaccaccatccaggcctgactagcacaagggagaaaacttttagctccagagctgcttgaaacctaactgaaaatacatcttatactcaggagatggagttaaaaaaaattgtcttagtccatactgtgttgttgtaacagaatatctgagaccgggtactttataaagaaaagaggtttattttgctcatggttctgcaggctggaaagctcaaggggcatggcactgctatccattctgcttttggtgaggtctttatgctgcctcacaatatggtggaaaatcaaaagggaagcaaatatgtgcaaagaggcaaaatcaaggagagccctggctttataacaacccattctcagagaactaatcaattctcaaaaaaactagtccatgctcagcagagcaaaaactcactcactatcataagaacagcaccaagttattaatgagggatccatccccatgacccacacacttctcattaggctccacctcccaacaccaccacattggggatcagattttggcatgagttttggtagagacaaaccctactgaagccgtaggctgaaactatgtcttcatcccattattagactctctagcatcgtaatctcagaggtctagacccaggttgttgcttttacttcttagttgaacaagataagatttatacagatttatcatttgacaaagcaaaatgtgtattttggctctaaacctactctagatctacttgtgtggctgtcttagtaaggggtctctatgataattctcttttggggacctggagtctccctagcaaatcctattttgaaataaaattttcttactttgctttccagattgtcctctaaattttctaaagcctgtggtccataaatatagaactggcggatgtaacttgattttattacagcagtctgggttttggtgccaatgctatgttgaaatgtaagagtgttattggatttgtactatctatatttaaaagactggtgggttacttgagcctggaatgcctaacaacttctgagaagggtcagaaccacactctgttcactcaaaaaagagatgacccagaagctggctggctgtgaatgtctaaagctacatgacatacaccctgtcctggcttctactgtggaacctacggaaacccacttaaaactgttgtgcctccactgactaaacctgaggacagccagttgccttgaaggcctccaggctgtcaggagaagcccccccttacccccccgccacaatttctctctcaatatttccaaacacactgtgcctggggtagtgagaagccctacagtaatattgtatactttattttatttgagatcctcctctgtgagcagtggtggggcaaagctagcatgcttccttcatacctagagattcactcacttagggaaataatccattctagttcctctatgtaagtcaaaagacagtctgtataaagtgaccactgactcccattctcatatttataaatggcaggtcttgtcttcattcctgacaggctcttctcttctgacgtctcagttgtcagttcttctcaattgggtgtgaaaactctaatctctagtatgtcttaaaacctctgtgtattttgtacctgtctctgaccatgacatgggatgggggagttccactgcctcaggcaatgcactaccttctctaggtctccacttcatcttctggcctagggagttttgggagttgctgtttctgaaaaaagacaggtattgggagttgggtagggccagggtgaatgtgtgttctgacacccagagggagaaagaggcagacaacatacaagtatacaaatgaatagtataatttcaggtcaagataactgctgtgaagaaaaataaagcagaaaagggggacagagagaaatggtagggtgtaatgaggtcatttttgataaggtgatccagcatttgagcagaaggagtaaaggagttgcctatgtgaggatctgagggaacacgttaaactttcctttacgtgtggtgggatgtcattgggcagattttaaaggcttgtccaggctcctgggggaggtggtgttaaatggaattactgcaagatccaggcaagaaatgaagatatggattaaagtgataggaatgaaggtggcaagaagcagctgaaatcaacatatatatatactttcctcaaaggtagcaccagtagggctagttgattaattccgtgtgagatgataatgctgaggttgatgcctgaatagttggatgaacggtggcgccattttctgagggaaagacaattgagggaggaaccatatgtgagtgggtacatgtggagagcttacttggttttagatgtttaaattaagggatgtttattagactttgaagaaaagattttgagtaaaattttaaaaagtgattagagcttaagggagaaatcaaggccagggataacaactaggaagtttgaattgaaatatattataattacagccaagggaccatagaaaatcacccagggatgaagtcagagcatgggcctctctaacattggacagacagaaggaaaatccaagaaaagagattttttttttttattgtagattcaggaggtacaggtttgttacatggatatattgtgtaatagtgagatttgggcttcaagtgtacccatcacccaaatagtgatcattgcacccaacaggtaagttttcaactgtcacgccctccccatctttgaagtcctcagtgtctattatttccatttttatgtccaaagtatactcattgtttacctcccacttataagtgagaacacatggtatttgattttctatttctgagttatttcacctaggataatagcctccagttccatatatgttgctacaaaagacacagtttcattatttttaatggctgcatagcattccatcatatatttatatataatgtgtatatcacattttctttatccaacgtctgtagatggacacttgggttgattccatatcattgctattgtgaataatgctgcaataaacacacaagttcaggtgtctttttgatgtaataatttctttaccactaaggagatacccagtactgggattgctgggtcaaatagtagttctatttttagttctttgaaacatttccatattgttttccatggaggctgtactagtttacattcccaacaacagtatataagtgttcccttttctctgcacttttgccaacatctgttgtcttttgactttttattagccattctgactggtgtaagatggtgtctcattgtggttgtaagatgcatttctctgacgattagtggtgttaagccttttttcctatgttggttggctgcttgtatgtgttcttgagaaacatctgttcatatcctttgtcctctttttaatggtttttttttttctaattgagttacttgagttttttgtagattctgtttactctgttgattatttcttttgctatgcagaaggcttttagtttagttgaagctaatttgtctatttttgattttgttgcatttgcttttggggtctttatcataaattctttgcctaggccaacgtctagaagaatttttcctagatttccttgtaggatttttatagcttcaagtcttacatttaagtctttaatccaccttgaattaactttggtatgtggtgacagataggggtccagtttcattcttctgcatatggcgctccaattttcacagcaccatttatctaatagggtgcccaggaaaggagattaagttagggaatgttaggacttttttctctccctctaggtgtgtatattgattttttatttttattttatttttttttgagatggtgtctccctctgtcacccagactggagtgcagtggggcgatctctgctcactgcaacctctgcctcccaggttcaagtgattctcctgcctcagcctctcgagtaactgggattacaggatgcaccaccacacccagctaatttttgtatttttagtatagacgggcttcaccatgttggccgggttggtctcaaacctggacctcaagtgatccacccacctcagcctcccaaagcgctgggatttcagacgtgagccaccacgcccagcctgatgttttaaaattgaatatgtcacattggggtacccatacagatatatttatgcgctagaattattctgttttaaaaattatatttttatcacaagtttatccattttcttcctctcatcaaataactagcttttaattttgtatataattatgccagttattttccaggttattaattcatgcttttatattccttccctattttgctttaaattaatactttattctgttctagaattctacagtataatcattttttcatgaatatctcttttttatttcttcttattaaagacctttaaatgagtacattttcttctaaacactgttttggcctacgtcccaatacattttaatatgcagagctgtgtattattactttaaaatatattttattgcattcttaatttgtttcctaagccaatttttacttataaaaaagtatttttaatactaaaaaaattaaacaatttgttaagattctcattatttacttctttttaaaatatggttaaagcatgtaatgggcagaatttctgccattaagaagttggtggttaatatttgtaaatatatccttatggcttatttaagatttttttggtaacagctatacaccgatatagttttaattttctcgtctaagtttacaatttattgaagttgcctgagtaactggattgaccaagtattcaatattttcattaattagttttattatcatcttgatattttcagtccctacctttcccacccctaagaatcaccattcttttttgaggtaatcctgaccaagaagaattgcatccaaggtattagtactgcccatgcaaggagtctgtgatgagtcctctttttcctaagaggttatttgtgatgactgggtgagcctccagagttactgttttcttaccatgacctatatatcgactgatgcaatagaaattctgccctcatttctggttgtaaaaactctaggactggataacagctccaccttgaccattgttgttccctggggagcttgattttgctccctaaaccctcagtagctgggtgaagagaggagtcaaccacaattatgcattcccagttacttcctggtgctgatgcatcctgcattggagacctactactacttgggatcttctcaaaacattgacttctgccaaaagaaatcgttgccactagtatctacccctcttagaaagtcattatattgctaagaccaattctgacttcctttttctgccacacgtgaaatattgagttctagtatgactgctacttgaacttgctaacttcagtgatgtgcaactcagatctttctccacaaatgcattattttgtgattctttttgtgttattccatgttctcagagaagcagatgtcaaaaccagattaaccatgcaggtgcttattagggggaaatgtctgtgaaggaatatggagaaggaaccagagaacattgggaagagtcatcaagccacaaagcaagtctgacctggactgaaggatgcagagagacaaggttagtggaaactttctagacatccacattgtctaagaaggttgggaaaaccaatggggagtcctcaagcgaaagttgcagtcagagataatccttgtctccaggaataggttgtgccttaaatcccatgagagcagtatgtaggtggcatagcctcccatagggatggattccaaagctggcagctggaactctcctcaattagctccatatacttggaggtttgcaaagagaattttgatggctgcaacattctcctccatgttaaacaattgtgcattaatgttttaatgatacattgtttaattgaatgtaaagttgttaagtgttcttttctattgtgccttttcattacattatatagttacccctatgcttaataatttatgtgttgatttctactttttttttttttgagacagaatctcactctgtcacccaggctggagtgcagtggcgctatcttggctcgctgcaacctccgcctcccgggttcaaacaattctttagtagagatggggtttcaccatgttggccaggctggtctcgaactcctagtcttaactgatctgcccaccttggcctcccacaaggctgggattacaggcctaagccactatgccacgctatgatttctaccattttgaatattatgtatactttccctgtaatttagaaatgtcatagctcatctccaatttttaaaattgtataaattgactttgtttttcaatttagaatgatagttttctgagagatgggttttatttttgtttttgttttccaaaatagtaattatggttgaaatccactcaacgaaattgttttgtccccttcctatacttcttatcctgttttgctttaacaattatgcctttttatacatagacaatatttacatgttcttctaaaatgagttgaagatagctttatttaattcaattccacaaagttaactaatacaaagattttttacttccagttccaaaatggcaatatagaagcaagatggtttcactttcccctgcaaaaaactgaaaacagttatacagtgccaagattttcaccagcaacaacccagaagtcaaatacgagaatgaaatagtttccaaggccacagagaagtgaaaaaaactaagcagatggtaagagaatcggacttacacatctgcaaagctcctcccccaccattctgcccagcaacaagtacatggaaaatcgtcccccaacacaatctacacttgaaaaagtatgattgagggagttaaccagcttccccatcatcttgggtgctctggcaggagaccttttcttgccttaacccagagaaagcataaagactgcctaaagggagaaatatccctagggagaggcagagacaaagtgtgtaggcatgactaacatccacagctgcggaaattgatctattagctaaagaagacgccaaatcagagtggttgttcagcagcaccatgctttagaaggtacattccacaggtcccctgggcacaaagccctagccagccttgataccacctagataatccctttgggatctcccccattcaggataggcagtgctctgatcatttactacagctgaggtgaacctggcaccatcttgagctgaaaaaagggcagcaacctagcagtaaagattcactaagcatatatgtccaataaaaaccaaaacaagctggacagagaagattgaaatgaacaatcctttaatgcaaacatatagacatatacccacaagaaacaactgcaaacagagaaccatgacctccctaaaagaacaaaacaaaaatccagtgactgaccctaatgagatggcaatacgtgagctctctgaccaagaattcaaagttgcagttttgggtagtgaaataacctgcattttactcatgtgacaaacctgcacatgtaccccctgaacctaaaataaaagttggaaggaaaataaataaataataaaacttaaatctcactttaaaaagatgttttgatcaaaataattttcaattgtttaacataaagactaaaataatcacctgtaatgacgagctagtgacattattcagtacaaagatgttgttattaatgaggaggaatgttataatagcacgtatctgagttggcatagctattcattgcaaaggtaaaggagcatgtggaagtattcttggaaccaaccccaatgcccatcaatgatagactggataaagaaaatgtggcacatatacaccatggaatactatgcagccataaaaaagaatgagttcatgttctttgtagggacatggatgaagctggaagccatcattcttggcaaactaacacaggaacagaaaaccaaacatcacatgttctcactcataagtgggagttgaataatgagaacacatggacacagggaggggaacatcatacactggagcctgtcagagggtggggggcaaggggagggagagcattaggacaaatacctaatgcatgtgtggcttaaaaactagatgatggtttgataggtgcagcaaaccaccatggcacatattgtatacctatgtaacaaacctgcacgttctggacatgtatcccagaacttgaagtaaaatttaaaaaagaagtactctaggaggtcaactaagagaatgtaaataaaaatttaaaattagacagcaacctagcagtaaagattcagtaagcaaatgtatccattaaaaaccaaaataagccaaacagagaagattggaataaataatcctcccatgcaaagatgtggacatatttccacaagaaacaactgcagagaatcatgacctccccgaaaggacaaagcaaaaatccagtgactaaccctaaggagttcagtttaacagaatcaagaacaaaaaaaatataattatttcaatagatgctgaaaaagtatttcataaaattcaacatcccttcatgataaaatttctcataaaaatacatatagaaggaacatatttcaaagcaataaaggccatatatgacaaactcacagctaacatcatactgaacagagaaaaaattgaaggcctctcctctaaggactggaacaagataaggatgcatactctcaccactgttattcaatagaatactggaagtcatggccagagcaattaggcaagataaagaaataaagggcatccaaattggaaagaaagaagtcatattagccttatttgcaaatgacatgtccttatacctagaaaaacctgaagactgtatccctcaaaaataactgttagaactgataaatgggttcaataaagttgcaggacacaaaaatcaacatacaaaatttagtggcatttatatgcaccagcgtcaaacaatctgaaaaaaataatcaagaagacgatcccacttacaatagctacaaaaaatataaaatacataagaatcaatctaactaaagacatgaaagatctatacaaggaaaactgcaaaactctgatggaagaaagtgaagaggacatggaaaatggaaagatatttcatgctcatgaattggaaaaattaataatgttaaaatgacaatataccaaaagcatcttacagattcaatgcaatctctatcaaaatgtcagtgacattcttcacaaaaaacagaaaaaaaaatcctaaatgtatacataaccacaaaatatcccaaatagccagctcaatcctgagcaaaaagaacaaagctgggggcattacaccacctgacttcaatatttactatgaagctatagtaactgaaacagcatggtactggcatcaaagcagacatatagacaatggaacatactagagaactgagatataaacccatgcatttatagccaactcatctttgacaaagacaccaagaacatacactgaggaaaggataatcttttcaatacatggtgctgggatatgcagaagaatgaaattagaccattatccctcatcacatacacaaatcaaatcaaaattgattaaagactgaaatctaagacctgaaactatgaaactgctggaagaaaactttgaggaaatgttctagcacattgatctggtgaaagatttctttgtctaagatctcaaaatcacagacaaccaaagcaaaaatatgatgagattacagcaagctaaaaaccttctgcacagcaaaggaaacagtcaacaaaacgagaagacaactcgcagaatgggataaaatatttgcaaagtatctacctgacaagtgattaataacagccagaatacataaggtgctcgaagaactcaatagcaaagtaaacaaacaaaaataattcagttttaaaatgggcaaaagatctgaacagacatttctcaaaagaagacatacaaatgatcaacaggtatttgaaaacaatgttcaacatcactaatcatctgagaaatgcaaatcaaaaccaaaataagatatcatctcatcccagctaaaatgacttgtatcaaaaagacaggcaataacagatgctggtgaggatgtctagacaggcgagccctcatccactgctggtgggaatgtaaattattgcggcccctaaaaagaatagcatggaggttcctcacaaaactaaagatagaactgccatgtcatccagcaattttactactaggtacacatccaaaacaaaggaaagcaatatattaaacagagtgcagagtctctgcactctcatgtttaatgcagcactattcaaaatagccaaaatttggaatcaacctaagtgtccatcaacagatgaatggattaaaaaatgtgttatatgtacacaatgaaatattattcagccataaaaaagagtaaaatcctgtcgtttgcagcaacatgggtggaactagataccattatgttcagtgaaatgagccatgcacagagagatacatattgcatgatctcacttatataagctaaaaaagtaaatctcatgaagacagagaataaaatggtggttacctagatgccaggacgggtaagaaggagggagggataaaggggaaaataataatataaatgtatttattattatggtacgtttaaaacggtaaagattgtaaattttatacatatattgtacctcaatttttttaaagtgtaaacaaaatttctatttctaaactggaaaaaaaatgttggatttctttctttaatgtgaagttttgtactagtgggtttacgtctaaatgtttgtctccattctcttttttgatctcatctagggttttaaatccagcattatactagtcatgacatcaatccattagctgtcagggttctcaatgatagctttcaacatgattttcccactcagtaagtttcttagaaaaataactttaaatgttattcagagataataaatgtggtcagcaaatctctctctggcctttgaatctgtgagtaatttttctactttttgttttgtttccaaataaatgatcacctaaccagaaaaaatggtctttgggggagtaggttttcttcaataacttacaaatattgtcctcttcaaggattttatgatataggttctaaaagttgtagtcatcctaggctaggcacggtggctcatgcctgtaatcccaacactttgggaggccgaggtgggtggatcatttgaggtcaggagtttgaaaccagcctggttaatatggtgaaatcccatctctactaaaaaaaatacaaaaattagctgggcatggtggcaggcaatggtagtcccaactactcaggagaatgaggtgggagactcgcttgaacccggtaggcagaggttggaacgagccgagatcgcgccactgcactccagcctgggcaacaagagcaaaactctgtctcaaaaagaaaaaaaaaaaaagaataaaggttgtagtctgcaatattttgaatattatcagtttatttttagattcacgtatcatcattacattgcattgaaataaaaggtggaagcaagtaactgtgttggcttgtttaccagtttttttttttctattattggtcagtatgtttctggatgtgaacgtctgatacccaacccgaactaatttagtcaagaagataatttttttcctatgtaaccacaagaaaggaagaggagcagtggtatagctggactattttgccctcaactccttatcatagcttctttctaacactggctccattatctcttctgcaacctggcttcctccacgtgggtgctctaggaatgcacctttgagtcccaatatcaacaaaggaatgacactccttctcctccaagtccagtttggcatatgctgagggagagctgtgattggtcttgcttgagtcaggtagacaccaacaccacctcttatcactggggtgaagtggtgtctaaatggttggcccagtttgagttatgtgtgcaccttcaggcctatcatcacttgtggtcaggtgcatagactgggaaggaaaatcacatattcttaagccaaatgtttgcaaaggtgaaaggagcatttcccaagggaaaaagttgctccctcagagaaaggaggaaggcattctaggcagataaaacaattcctattcattataataacttttaatcatttgacaccacctattcagaaattctctttatatccaagacagattattatacaccattctcaagttttgtcatttttaatgctttattttaatccaattatagtttgggtttgatttcctagtctatcccatcaattaacttttcaaggttaacaacaataatcttctttatagacactttaaaaataactttacaaaatcaagaactacagctatgcataaagtaatgtgaacatttctggcccgttgtccattcaccccatatcttcagccaagtgatataacaggtcaatgggtatctttctaacccttttcctaatcatatcctaagacacacagacacacacacacacacacacacagaaatgtttttaaacaaaatatatgataccttgtatggtattctatagctttctttttatttattttaaagtagtcaattttatatatcaatatatatagtattccccacttctatttaatggttacgtagtaagtattccatttaataaatacaacagaatttatttaatcagttccctttccttagacacttaagctgcttccagttgcattcttttattttatttatttttatttttttgagacaaagtcttacttagttgttcaagctggagtgcagtggtgtgatcacacttcactgaaaccttgacctcccagggtcgatcctcccacctcagcctcctgagtagctgggactacaggtgcccgccaccaagcccagccaatttttaaaattatttgtagagatgaggtcttcctatgttgtccaggctggctttaaactcctgagcataagcattccttccgcctcggcctcccaaactgctggaattataggcgtgagccactgcacccagccaagttgaattattttaaagcaaaagatatatatgtttccaacaagggatatatgtgtttccaacaagggtgtatgtgtccttttgtacatatctccgcaccctcgcatcctcgtgtaagtacatttagaaaaacaattcctggaaatggatagctgggtcaaagagtatgccagcaatagtcctaatcactctgttaaatggttaatcattatgttaccacctcttttattctaacctgtcctagattaatgactgctacaattcctctcatttatttgctaaaacatattacccattctttaaattttgactgtgattgttggagtcattccactgtagaaaagttagaagtttctcctgagctcttataaagttgttttcttgtacaagaataattttcctgactccctttttgcatatctactgccaatttttgatactgatgttttcatttgtgttcaatagaaaaagaaatctctgaccaattactctggcatttggtgatatcttcagttaagcatttaaaaatatactccaaaacaccaccaacctgaaatgtgttattccattttccagagactctaagttttagacttaatcatcaaaagtttttatattttatttaaatgttaggcatgaaaatcagtcttaatagattctattgagcatacctgaatgtcttcttggtttctcaagacgatcattaggatgccactgtcatatatacatgatctcagagaaggtttgctcctgcactaaatgaacaaaaatgtcttaagtcctttggtcagctttgtacagttggtttttaatttctctcaacatgtctcttgattgagagctaacacactgcttgttgttttcagtagacctgtcttttcttatctcctttctatgagtaaatcattttatcaagcttatttccaataaataaacaaacagataaaagggactctaacagacttcctgtgagtaaagtggctaagctttatgtggttcatggactttgtaacatttattttgtctgcttgctggtttattttgctattttctgattcctagctatgttctagaaagactacatagttgagttttggattaataagatatatatgttaattataacacttagagaatcaggatcatatagtaccccaaatacagatgtttttaaaagtgccagaatatcaaaagaagatataactatattcaaatattaaagcatcaaagcataatatacttccatggttcaaaattttaaaggatactttgaaacacttttctatctgatcctcctccctcaaggcaaccaatgttatcactttcttctgtgtctttacagaggtaattttaagcatatacgtctgcataagcaaatgcatacaagcacattttctttttgtacaaatggtagtatatcgaacatatgtcctatgcagtacagatcattgtatatttatacataagacattcttggttcttgtttccttttttaataactccagattattccaccaaatggaatacatacattatttccctgtacacaatatctaaatgacaatttctagaagaggaattgctaggccaaagcgtaaaagcatttgtcactttaatatatattacataattgcccttcatgcaggctattacattttacactacctattttcacgcagtgtactataaaactttttgacatttgccagtttaataactgaaaatagtatcttaatatggctttaatttttattgttctccttatgaatgaagatgaaaatattctcacatgtgcttatcttttgcccatttttctgctgagtagttttatttttttcttataggagctttttacacatgatgcaaactaaccttttgtgatatgagttgaaattgttttctggtgttttcgtgtgtctgtttaccttggggtagtattaaccatagcaaatttttaaaaaattcttcataaagtcaatcttctatgacatctgtgttttaagtcatcctaagaaaggtcttacccatttttataaacattcttttatttcttatgttaaatctatgttttttttttacatttaaatatttgacccattttaaacagcctggtatgacataggcagtaatggaattaacttttgttttttaggtagctgctagtttgtttgaccatttattgaataattcattttttcccaatgatagtactgtttacattatagctatatagtctgttttacagatgtagttattcctcattatgcttctatttcagaatgtttttgaaaattttttgcttgtttatttttccataataaaaagtttaatctaagctgggcacgatggctcacatgtgtaatcccagctattcaggcggctgaggtgggaggatcacttgagtccagcagttcaagtctgtagtgagctatgatcatgccactacactccagcctggctgacagagcaagactctgtctctaaaaatataaatgaatgaaataatgcatgaataaaatgtaatctgcttctctagatttaaaaaatactattgatttttaaattgtgattgtatcatttttatggatacacttagaggagaattgatatctttgtattgtttactccacctttccatttgctcaaatctacttttgtgtctttcaggagcatttttttaaatgtcaatctagtttaaatgtaaatctttacttgttaagcttattcctaataatgttatatttctttgcttttgcttttgtaaatgaggttctttccttccattatattttctaacttaatgtgttttatatgtgaagtcttttgactctcaatataaattttgtgcccagccacattggttttttactttattttgttgagatttccagataaacaaattatttaaaattcatgttaatctttttttctcctcctttttaacatcttggccctgcattttttttctcttgtctaattgcataggctaacatgccagaaattttaattagtttacatagagatgcagtacataaatttaaattgaagatctgtcattacataagacaaagggtatgtgtgttattatttattttagattggtccatcctctcaccaggagctcaggcagctgttaaactctggaaagagggcctaaaaaagataggggtatggataatggaagccctgcataaattctaagcaaagtggcagaaagcactttctaacccaccatcctgcctcgagggagggcaaagactgatgttaatgtctttgctgacctcttctggcaaatctgaagttagccagaagatggaagatttgattggttatttttttcacttcgatttcatatgatcacaaagtccctgggtttgcctgattcgcctgtttgaaaagatttttcaatatcccagaagttgtttttaaagtccacactttctttaacctctcagtattcttcttttcttcctcctcttttataaaatattcaaagctttatctcccttccttctctcacatttttggctgttcaaatatctcttatccaccattatcttccccaattgactttatttctgagctccaaattcatgcagtccttggaaacagggcaaataaatgggaagtcagtttgcatgtgaaaactgatcagcttggctggaacagtttcagtggacagtggcaaggagaatccaacttgctgcggattaaaaaaaaatgcatgggaagtatggaaataataacagtgggtatgtacttgtatttcaaaagctttgcaggaaaggagatataagattggatggtaacgtaatggttaaacaaggataagaaaagggcattcgttcattcattcactcattgtttagggtgtgcagtggccctgcaaatgcccctctcacatctctaacgacagggagcatagctgactggcagccctagctgctatgctccaaaatccttctcatgtcttagttaggtcatgcttcccacagactgctcctagctaatgactgtggctggcagggagccactcaggtaagcaatgtaaactcaagaagaactcggtgcacttgttggactttgttagagctgcactgcaatcgcagactcttccactcagtcttcccaccttgactctctccttcataatgctcacgcccccatcactatctgatggctctcgctgccttcccaatgccaggcttcttccttcttctccctctgtattttcccaaagaaattgctcagacttctgatcctgctgggtgtctccttcttggaagactcagcctaccacagagtggaatagcctggagcaggtttgtagggtaagagtagaggtgagaaaagagtgctttacttcccatttctcaattgcagatttcttcccaaattttctagtctttgtctgtctgccagactggtgtgctgctgtcttgctacaccttcccgtctttgcattttcctgatgtgaccctttaccttgtcccaattctgaactttctatctagctttcaacctaggtagaccaaaggcatctgagcaacatcggtgtactccgaggaaggcagccatcttctcctagggttttgtttcggctgctgaaatattgccctcttgtggttgcctctataatgacatatgaaaattaacattttcatatgtcatagaatttcaaggccacaagaaataggcatttagtaccaaaataatttaaagaagtgccagacacagatctgtaagacattaaaaatgccatgacaatccattggcctttgtttcaccagcaacccatgctataaagaaaaagagtgtttactagagggaggaaattcacgggagtagagttttatagctccttctcccacatgccctaggcaaggaaaggccgtctccaagaggcttaggtcctttacttatcctatagaagttaggtctgtttcttagccacttcctggttgaacacaaagtcccagaagacccaccctggtgcccctaggggagtgacatggtgagagaaactcaggaagcaatgtagccaaacccaggttcagctgctcactgctcaaaagcccagcatgagacacgaattggtgggaggaaaagcatgttcattcggagagccagcaaaccgagacgatgatggaattgcatcttaaagtaccatcttaagtcggtacaaattgtaccctttttatgttaatgctggaggaggaggagggggttgggatggagaggtgaccaatgacctcagacatccgggcaccagcgagggtctgaggaggcggggaactttcttgtcttcggtcaggtcatgatgctcctataaatctttaacaaaacttcatgcaattgtttacataagtctcctttaatcccagagttagtttttaaaactacatgattgccgtttttgcgtaatatctcagtgctctaaaattatcctagcctacatgcaggcatgggtaaaggtccctgaaacaaaaatggagttagttatgttagttctcttgctgtttcactgttacagcaatgaacacctaccttcagagtctgagagagcaaagagtcctcttgccttattagtgggaagttatgatagcaagctggtattcctatcattgatagggcaaaaggggccacgtggatgccatgggaatgatgaaccttggtgaaggttcctggcccaaaagtggtacctcctcaaatgagaccccagcactgagaggctgtaagtttaacaagcacaggaattgaaggggatcacaaggcaatgtgaaatgcaggtgttcctacaaggtatctaaagaatccacaaatgcacccagtaagaaagataccgtttggatgcttgccccgcaaaagggcatcagcagctagggatgggacaaacagctccaggcaagtgaagagacatcatccccttccccttgacctcctcttccctgtcttaataccataggatccaggcaaagatgggggattggagtagatgagtaaggaggagtgaaaagagcaaaccatttctgctctccacctgcaggtctctaaatagccagtcagctctgatcagtggaaaagaagttctttaaattggattcaatattgaagttctaatatagattgaaaagcacagtttaacacctgataatgggtcttcatgaacactatgaaggcatttttaagcaaagcaaggaaaattacaggatctgccctaaatgtgacaggggaaggacagggagatctgatggagcctgttggaggcaaagagagagggaaaaataaggttttgtcctatttctatcccattgaatttagcacatttaataaatcgactacacacaccttaaaacgtccttacataatacaggatgaatgaaaaggttctgccaatgaagtgaattgaagtattgtcagggccctttaagggaaccctatatcttattcctagttcatgtcactcctctttagggacaaggatcttccagtgcctggggcttctctaattttgtggacgtcaaattgtgtaacccttataacccttacagattcctgtattccctaaggccactcttaaggagctcatacagggaacagacagatttcttcttctcttgatctcaaaaagcattgctcgtgatcgtttttgatacttcaagactgccatattctttcggatctggccaatgctgtgtacgttcaggagcatgaaaagcatattgttgcatttcaacatcacatataattttaaaactagttagttacaataaattaatggttgcttggcaaccaaagagctgaggttttgaaaggaagtactctattactgttcaaattagaacagcaagacttgttgaaatattctgagttctgttgaattccttatgatggaaccaaacccagggaaaaacaagggaacactcacattttacagctcagttaattttaggagagtagagaggaagtaaattgcatctcatctcctagcttgggttggaactgcccaatttaagaacaagtactaattagctgaaagtaaagctcagctgtgacttggctaaaaatgggacctcttgcaaaaatgtacttaaaactgcgtgtgatagatctgattcactttgcatgtgaaaactggactcatactgacaaaacaacgtgtgggggaaagagtttgggagcatttttaagacttcaagatgtttgttagagaaatgaccatctagtttgcccataatgtaaccagaaataaaatccaaactgacattttggcccagagtcttgatgagtatctctagccaacattcacttggttggctaatggtcaatctaataaccaagaaatagaactggatatcagaacaacagttttgataaaataaaggaaaggaagacaggctggataattcggagctttctaacagggttttggaaatgtgcataaagttttggagaaaatttaaccaatcgttttgaagccttccattagtagcaactcaaaactattcaaaagactgaatggtgaattaactcattttattttgaaactcctctgtgcttagcttttgactgaatttaaatttctgttggagcaagctaagttgttttaattttgatgttcaagtcaattaacctcttattgtgactttttgccttagttatacaaataaaattttatataatgttggagactcaatcattttgatgctgacatttcttaatcctacacatggtcacataccctggaaagatatacaaggctctgaaaacacagctgccacggggaagtgagattggatggctgggaaagagattgcttttcatgttatttgttttcacgtggtcctatacttgtgtactttttgaactttatgccatatgaatttattaataatttgacaaatcaatttaaaaccaactttaaaatcaaatttcaaatgcatgtggttcaaagaaaagcaccatgatagaattgaaagaacaggatctggaattagggacctgaatttgaatctcctcttggcgtttgtgtagttaggagaactcgggcaagttacctgacatctctgaatccctgttttccttatccttaacgtgggacagagtatttaatttacatggtttggtgaggacaaggcaggtaatatctctctgacagacctacttcatggcatgtgctccatggactggttatattattggtagcattcaatatattcagtaaaaacagtataatgtgtgccttctgtaatccccaaggagacagtaaatgtgttggtaacatcccagttaaatgcgtacctgagaacaggattttcccagacatagcaacatgggtttacagttttaaccatttcaccaacctctgccccaggctcttctggagggaatcaacacagcattgaatccctttcaattaacctttcttcttaagatcatagttctatcaaacttttaaaaattagttaaattggccaggagcggtggctcacgccagtaatcccagcactttgggaggccgaggcgggtggatgacctgaggtcaggagttcgagaccagcctggccaacatggcgaaaccccatctctactaaaataaaaaaaattaacagggcctattggcagttgcctgtaatcccagctactcagaagtcggaggcaggagaatagcttaaacccgggaggcggaggttgcagtgagccaagatcgcgccactgcactccagcctgagcaacgagagcgaaacttcgtctcaaaaaaaaaaaatagttaaattgtgtttccctattcatggaaatcattctgctattattctcagtgagtgtcttggttcgtgggtctccctcaaaccattttttaaaatttgatttgcttcagaatgtctcttatttttgtttcaagttttcaaaaaattgtccccgatattttcgatcttttgtgttttttactctccccctcactctggcaataagcacaggctctgccccctttctcccttcatcctccggggaacaggctttgcagtcggaggcctgagcgccccggtacctccgctgcactacgtagagctgccaccaggtggagctgaatccacacctctgagaccgcacacgcctctgacacttggcatcgtggcctctctgggtcctgattctttggaaggtaggcggtaacaacaaactgttaataaaaattaattaacttggaaaatgagaaaaatacaatgatagcagaaactatctcaagcaaaaatcatttcatataatctcgtcgctgtaattagcagcatccacggaagacggtggcttcctctcatatagatccagtttaataccccaggctcagcccattagtctctccttcacctcattcgttctgcagtgtgttcctctgagcgcctcatagtcacacatctgcaggcagtgcacaatgccttttgcacacggtcgaggtccttgaactgagtactttgtgcatgctattggcctggagattacacaggctgcagaacatggctggcttgggaaaggcagcacacggtggctaccaaactccttcagcggcagaattc

SEQ ID NO: 92 - DNA, 159781 bp, Homo sapiens
gaattccacattcttgtataatcagagtatctacagcgctcctggagtaacccaaaccttatggttgctggaaagataaaaaaccaatgggccaattggggtgaaactctggcccggaaacgtggggtgccagccccctcagcacagatgcaatgcagagttatgggaggtgcgaatgactctgctctctgtcctgtctcctcatctgcaaaattaggaagcctgtcttgattatctccaggaacctcccacctcttcattccagcctctgacaaactctgcacattaggccaggagaagcccccgagccaagtctcttttctcattctcttccaacaagtgcttggagctccaagaaggccccctttgcactatgagcaaccaggtgctctgctgtgtggtcctttgtttcctgggagcaagtgagtcctgggttcagggagaaaattcctatctggagtgctgcaagttccaaatctaaggcctccccgagggacagcagcatcaggcgcctccctgggctgtactcaggcatgcctctctttcttttccagacaccgtggatggtggaatcactcagtccccaaagtacctgttcagaaaggaaggacagaatgtgaccctgagttgtgaacagaatttgaaccacgatgccatgtactggtaccgacaggacccagggcaagggctgagattgatctactactcacagatagtaaatgactttcagaaaggagatatagctgaagggtacagcgtctctcgggagaagaaggaatcctttcctctcactgtgacatcggcccaaaagaacccgacagctttctatctctgtgccagtagtatagacacagtgaagcacggatgtcgcctctctgtgcataaatgtgcccagtcctgcttccccgaccaggtgacagggctcctctgcactctatgatggcaggaaacgccactcagccactaagcaggtttaaaaaactgtatataactaaaactctatatataaactatgcatataaaactaaactatatatgtatacatttatatataactaaaactttatatgagactaaaatgatagttttatatagttttttaaagtatagttttatatatatataactatatatatatatcattttttaaactatagttttgtagttttatttatttatttactttttggagatggagtctcactctgttgcccaggctgcagtgcagtggcatgatctcagctcactgcaatctctgcctcctgggttcaagcaattttcctgcctcagcctcccaagtagctgggattacaggtgcataccaccacacctggctaatttttgtattttagtagaggcagggtttcaccatgttggccaggatggtctcgaactcctgacctcaggtgatccacccacctcggcctcccaaagtgctgggattacaggcatgagtcaccgtgcctggctgttttatagtttcatatagttatttttaaaaactatataaaagtttttgtatagccacttagtggctgagtgaagtttcctgtcatatatgatatagatatagatatgtttatatatgatatagatacagatatgttatatatatgttatatgttgtatataagatatatacatatagagagagtcagagagacacagagaagaaggaaaagttaatcttacaacccccagcttttttctattttaccgaatgctagatgaatagatggatgaatgaatagaaatgaatgaatgaatagaaaattttcccttctttcaggaagataaaaaagcctgtggaaagagagatgtagaagacaaaccctgtaatcacaatttcatatgacgcgtgctttaatgagagacgttagtggagtataggaagtaacacagccaattctgtctggtgacatcaggaagggcgtcaaacagaaagcaaattttgagatgaaagttattattcaaatttcaccagatgggcaagtaggatttcaccagatgggcaagcaccaaaagagggaggcaggctaagggaactatgaaaggaaagagtgatgagataataccaggaaaaaaattatcaacactccctcctccaccggaatatggcaatggaggaaaatttggacaaatgaatggagtcaagttattgaacaaaactgagtttcttgttctagtggtccttcattggatatctgtgtagaaacatccaagaggctccgtaagtgcaggtctggcacttagaagagagggttgggcttgagagaaatgtttgagtgatagttaagcacacaggtgtgagtaaaacttcccaggtgatcttgtcttctatgctttctctctttatgctctgccacctatgccttgaattagaaggtaagtggtgtaagtggtgttatttcttatgttgacttacacatgtctatttgatcatataattacatttctggaaattgatgtttctatgttattcttcaaatacaactaaaactgctggttgaaaatttttgtaaaatattgtcagaagcatcaaataaccttagtctgtcctgctgtattgtcctttttttccagggataagaaatttttagaaaaatatgagtccctgtccagaatacacaagccttggctccacgaattttcttcgaattatttcctggattctgtgtttagctttggatttcttcttctacatagcctatgggagtttgactcacacagagtcccacagaaaccaaaatactaaaacatagagatggaaaagacagttctccctgaaaaggatctaaagaacattaaaacatggtatcatgagaactacaaccagtcattgaaactaatgttttctgacggtagtaagtaaaacactggaaatgagatggctctaagctacttcactttgaacgttcagaccatattcacagatgcctacacatcagtcattctctgagccagaggatggagccaaggaccttcatggcggtgggaaagacacagtcccatagtgctatctgtgccctgtatacaagccattttccagaggtgatgggattgggaaagactgtctgtccaatgagaggaagaaaacgaaagggaagacagtaagagatagacaatcttgtttttccttgtttttcttgtccgtgactagaatggacacaaattcctttgtttcagttgaggaatttattaaagcagggcataagagcttaaatagacttcaaaaattctactgtaaaactattaaccatttgcttttttcagggtaatcttaatactgaaaagaacactgtagctatgaagtttcatcataatctccattcccacaaccaggttgtaagagagatatcatctgaagtgaaggacaggaaatttttaaaatgtaaaatatcactgaatgttttcttagcaagttttgagaggccatcgcatctattaaataggaagataatttatataaaattttaatctagaactgtatttctttaacataataaacataattgctctatttaaaatcacattgaacataacaaattgtaaattagacaagtcagaaaaccaatttgtcaactgtttaaaaattgaagaaatagtccagaattcttaggaagcagaaagggatatttaacgtgtgagaaaaaggtactaccacaatagcagctttattcccaatggctccaaattggaaaatattcaacatctgacaatgcaatggagaaatgattgtgttacatttatgtaacagaatacaatatagcacaaaaaatcaagtgtaatttccaacacagatatttcaaatataacattgaataaaatatagtagacacaaaataatacagtatgtagtcagaatagtgattaaatttggtagcattatgtatttattctgagggagacatgaggaaggcttttggaattctaaattctatatcttgatctgggtgatgattacatgagtatattcatttcaaaaattcattgggctgaacacttaagatttgtgcagtctatgtattttatacctcacttagaaaacttaaaatggcaagtatattatcttgaccaataatctattgctgtgtgacaaaccactccaaaagttagtgatttaaaagaacaacatattattatctcttgtgattctgtagaagggctcagctggacagttctcacttagggctgctcacatggtcactgtcagatagtcactgaggctgaagatatctgaagactcaactaggctgaatatccaaggtggcttttttgtgcccctgttggttcgttacctgggatggctgcagtagctgtggacccgctgagcatttctctctgtacacagccttttgatgtgattagatgagctgtctcacagcatggtggcctctaggcagctaaagttttggcatggtcgttgaccaccctaactgtgagcattcaagagacccgggtgtggtcaactaggctccttacagcccagcctgagaaatatgcagtgacacctccaccacaatccagccagctcggattcaagagaagggcacccctgggaaggtgaccactggccagtgtgtttcatcaggctggtgtctttgaagaccaaataccacaccacagccatttgaatttgtgtcattacttggtactcttattttttccctgctgctctttttgcattgaagtccttttgggatgacatcaataaaactatttcatgtttttaagattgtatttgtcaagtatttctttttcaacctttctacatgcagcctttttgttgtttttattcttcaggtgggtatttcataagcagtgtgtattttttcagcccatgatttatagaactagaatcctcagtctattgtcttaaatgtatttctgtatagttttctatagaaggtgatttcctgggttttgagttatgtttcttgcttggttttgtacattaatttttctcacattttggtttcttcttccctcatgcatgaccttatttttgttgactatttttctcatttcattattttgcctttcagaagtccgcaattcattttcattttttgatggttaactgtaacattttattatataattatattaagaaaatctgagattagtcttatctttaccattctcctgaagcctatgtgaactttagaacaattaacacctatggttccccttcatgatttccaatattttggatagtcagaatgttagatctaccataactagaagtattgttttattttaccaatacttaattacaattacctacctatgtgttaaccatcatctttaatcgtcattgtttttgcacaaaactttagtataccaactcagagcagaaagaggatccatcatattctgtgtctgccctattaagcatgcttctctgctgcatggcctttgattcctagtagtagatttatcccaggcaaagatgtagagccctattatgggctatcagatctcaacaccaaggatttcttgtgccacagccctttggtgccaggcctctgactctaacttctatctctttttccaacagttctcatggatactgaagtcccccagacaccaagaaaactggtcacattgactaattttaagagatggccttgaagtagtctcagaaaatgaaaagtcatagcacatactagctattgacaatgtatggttttggctatggcaaacccataacacaaatggaagtgtcagggaagaaaaaccaccatgagcattaaggaacaaaagaatatattataggaatgaggcctgacacaatttggggagaagatggataagtgaaagtttgaaaagggtcagaaaaaacaactctaaccagctctggtgaaggtggatgaactggacttcgcattaagttttgcattaagctgttatatccatacactatatggaaccctgaaggggctggtgtaggaatctatgaagatggctgactctatgtgccaatagccctgtgagttctcagaaaatttggtggtggcactgcagtccctcctggtcagcagggctggcagtcggtataaagagctggatgtgaagcaggggaaagtcagcataaattggaactcaccggcacttttgatgctactccttactgcctggagccagtgatgacttcagaactcagtagcagctgttttactttccccttacaaacttcctgcatttcttaccccatgatcaactctaacccggaaccatactaggaaaaaagttgtccgaaacatattccttgcttagctaagttgacacagtgataaaaccccacaagaatatccagatgctccttgacttgcagtggggtaatatcctgataaatccagcacaaattgaaaacatcataattcaacttacaatatccagcttatctgtacataaccccatcataagtcaaggagcacactgaaatgcatattgcttttgcaccattgtaaagttgaaaagtcattgaaccatcatgagaccatctgtacctgacaattagtgtttctcaaaataaataggaagattttcttctgatctgaaggtcttccagccactccctcccagacatatcataatattggaccagaggtcacccatagcaagctgtccctacttattctttgcagaaaaagtacagttacagtatgaagtggcctcattttaatgaggcccaacatacccaggaaataaaaaatgcagccacaggagcatacagatgccctttaatagatatgtcaatattaacataatgcaatagctatatttgttataaaacgatttcactattgcacaaacataatatgatgggcgaagtcttaatcttatcttttctagctacctatgccagagaagcagaactaaatattaaatgaaaggcacaattgagaggctgttataaaaatgaaaacatagggctttcaaaaaaactttccagctccttgtaattgctacatatttccaacatcgatccattaaaacaagtatcccagcctgttcaaatcaaagaatttcttatgcctcctagaaactattttcactgtccagtacttagtatgacctccattacaatagaataaatttaattattctcacaacctcaacagtgattaacacggaaacatacaagctaaattgagaaatattattagaatgtttagaattaagtccctttatatatgagggaaattgtcatgagatacacatgaggtaactatctcatttagaaaatgatgaagtggcttcaacatgattatgaagaaacattggacttccagccgaggcactggcctgtgctttatcaatatttatggtagtgccaacctgtgggtctagtgattaacaaccatgagttgtcttggtgttattactttgaggatatgaaacagaagcagcaaacagactccaatgccattcattacctaaacctacactcctttccttataggaaactcacttaagtcattacaatgctttatgtctcagtgtatctttaataaatttggaagttgaattgggaagtctttaggccactttaggcaatgtatgggttttttgttttcttttgatatggggtctcactctgtcacccaggctggagtgcagtggcatgatttcagctcattgcaacctctgcctcctgggttcaagcaattctctccctcagcctcctgagtagctgggattacaggtgtccaccaccacgcctggctaatttttgtgtttttagtagagatgggttttcaccatgttggccagattggtcttgaactcctaaccttgtgatccacccgcctcggactcccaaagttctggaattacaggcgtgagccacctcacccgacctgtatggttttttgacaggcagagatggacgtaacatcagtcatgggcaaagattaccaccagggggcagactagggcatccttgggattctgtgatcagtcatccctcctcgctggtgaatggaggcagtggtcacaactctccccagagaaggtggtgtgaggccatcacggaagatgctgctgcttctgctgcttctggggccaggtataagcctccttctacctgggagcttgggtgggcatgtgcgtgtgttggcatggtcaagtggtggccagcagggttgcaatgtggattgtttatgctcatcgaagggagagggagaggccctgctctctagaggtgtaaatggtaaggtgaaagccgccggtcagaggagatgggggattatggccctagggagatgacgggaagattgcacaaaacaaacaggactctccaggagctgggagcacagggagggagtgaggctcagctctgcctggcgtcctgtctgactcggctcccactgggctctcctctctctctggcttctgtctcagcaggctccgggcttggtgctgtcgtctctcaacatccgagctgggttatctgtaagagtggaacctctgtgaagatcgagtgccgttccctggactttcaggccacaactatgttttggtatcgtcagttcccgaaacagagtctcatgctgatggcaacttccaatgagggctccaaggccacatacgagcaaggcgtcgagaaggacaagtttctcatcaaccatgcaagcctgaccttgtccactctgacagtgaccagtgcccatcctgaagacagcagcttctacatctgcagtgctagagacacagcgccaggaggggatcagacaccgcggcaagaacccctgcagctgccctccgccccagcgggccccctgagtgctgagaggggaagcgtggagaatggaaaaccacagctttcctgactgagacatctgggagtgtgtgtgcagggggtggggcgggggggagggggagaaaaagaaaagaagcactgtgagtgtggagtatggaggaggtgtagtgtttgagacccacgaaatggcaatagagttgggcctaaagtggtcggcggacatggaaagttccctgaaaattataaaacctggaattttgccctgactctgccacattagtcatgtattcttgaatagatctacacataatcctagaggtagatatgaagacagttgtataatcactgtgtatttcctataataaacttcagcgattggctttcttgtcatcatgctgggctctcaagacaaagataaccaagaggcagccaagtagagagttatgcatgaatacgttaccttaggggaggatagcaacagcattgaatagcattcactccaaatttgtgttctgtcctccttagaccaggccaccaaaataaaatcctatcacatttcctgtaaatgttgaacgccatcatgttctccatggtgtttcggttgatgaatgaacagagtaagactcggtacaaagggaggggagcaccctctatgcctaggtacacaccatacggaatgtatcgctagggaaggtgctggtgagctggctcctgggaaaggtgtcaaggggaagagggggcagaggtacctagaaggaagacctcagacaacatggcttgtctacagagttggaaagttctgccagtagttagaagacagtaagtggaacagtgaaaatcctttcctaggagaaaccaaacatttacattgaccacaaatctgtatgaaccaacagaaaatgagcaaaacatatgaccatacatttaatagaataaacatatatgactaataaacatatagagatatttcacttcattgatgatcaggataatatgaagcaagacacaatgatacatagttttatatccacttgattagcaaaatataaaaagtttagaaatataaaatgttagcgagggtatggattcataggattacttataaattactgatgggagcataagtactatcaaccatttggaaacagttcagcattatctcgtagttgaagattcctatatcccataactcagcaattccactcctaggtttacatcaggagaagctcttgcatacacatatcagaagacataaataaaaaagtgttcttcacagcaccaaacagtagaaaaacatggcaccaagccacatatgcactgagaagagtgaatgaataaactgtgacatattcatatgagtcaaaatgaatgaactacagtgaagagcaaggttataggtgaatcttagcaatataatagcaaatgtaaaaactaagtctaatgagattatgcaaagcataatgtgcttttcataaagctaaaaacaagtcaagaaaataattttcaggactgaaatatattagaacaaattatattgaaaggaaagcaaagatgagttgtatgctggagcctactttatcagctcatgggagctgactgtatacatttttcccaactccagttttagtgacatcattttgttagcttgaaattggccatagtgagggtatttacactacagaaattagcaaacacagcaaattacggtttgctttattttcctccagacttagctgtcaaccctttaccctttaccaacacactactggcagggaataataatgacccaagttcaggatttttataaggctggggcatggcaggaaatagaatgagagagaactatatggctatacattgaaatattgtcaaggtctatcttgcataatgttgaggaggagaagttttacaagttcctattatgttttttaaaaatattcattgacaagcaatgcctgtgtgttatgaaccacaggttaagataaataaaattgaatgcatatagcatcaaaaagaagagaaaacaaataaatgaatagattagagttcttacaagaaaaggatcaagggcattttatagtcaaaaccaggagtgaaatagcagtggcttaactgctaccatcctcatatagatatcggctgctgaattaatcacagcggacaacctaccacccaacagacctggacccttgtcaaccctttgcaacacagaacaggggtttagacaataagggtgaacgtgaaagcgtggagatgacacctggcccctgaccaaggtggaactgactggaacaagatgggagccaattctgcagtgaacacgctgctgcttttcgtctccgctatgaccgtgtgttgctggtggttaaataccccacctgggttcagtcacctcagactgtgccattgccactgatctcaggacccactttagttgtagccttttactctgttagcgttttcagcctggagaacagagctagtaaaatacttataaaatattccactgcttcactaacggcatggaaaagacaagagcttttaaggctctggcatgaaacagggagacagtggttacattcctatttcacgcagtcactatttccgtctacgttaagctgaggagtgtagtgtttcggtgacatttagcatggaacgctgctgggttcagacctgacattcccaaaccagctgactgtcaaggacacagcctactgcctacctatattaccttaggaaacgagacaacagcattgaacagcattcagtccatatttgtgttctgtcttccttggacaagtaccaacaaaataaaatcctatcacatttcctgtaaattttgaatgacataaatttttgatgagcaattctttttgaagtgttgaactttctgttctgattttatattctactctctgtgctttgttgtatttaaaatcaagttcacctttcagaggcagtgatgggtgaggtaagagacagactcttacatcctcctccccaacacacacacacacacatacacacacacacacacacacacacacggaggcactgtttttcccagtaatggagaagccatgggaagaatttcagaggtttcaagggagctagggtcgtctaattcctctatatccttggatatccccattcttaatgtcaaaaataatctctcgaactggtttcccagagtctcaacccatttgctatagtacatgcaccatctcaggtgtccaaagatgaatatttgataagctacttctcaacttcatacctctgctgctgtttttccattctggaatgtggaaagcagtgtgactcctattaactgaccagtagtcaattttaactacccataaatatgtgagtgtcttttatctgtaatctcctatctggtgccatttttgaaaaccagttaagactcttttatcctaaaaaatgaactatgtctaatttcttgaaagtaattattgatgaaatactccctggagagtctgaagcccctgatattgcatatttaattgttatcctccttttaataaaaggtataggaagaaattttaaatattattcctaaataccttacatcaagatgagctagagttaattaagtgggacgagggataatgaattcaagggcatttaagaaagattaaagaaccagtgcaaaatgttttaatcaggaaagaaattagtgtgtttaatgacaggaaagaagtcagcagagtgacaggagcagggggaggaggtggttgagtacagggcaaaattgaagaaggcaggaaggcaccagaccactcagaaccttactggtcaaggtaaatgatacagaatccaacataaagcttaataggagacactgaggttttcaacatttgacttctttagtaatcagattcgtggctgtgtgtgtatctgtgtatttaatcaccctggtcacaaagtgaagaaataatggaccatgcagggaaggcaaaatgttacctctaccctcttgcagtttttcggctggtcctgagaatggaagattaacaggaaggaaagcatacacatgtatttaatacaagttttacatcacatgaaagcccccataattaaaggaagaactgaatgtgcagttagagttgaacattcatatattgaattgggcaaagggtcatacattgtggaaaggtgaaaaagtaaaggggcttaggctagggttgctggttgaatggcaaagtgactaggaaggtgaggattagtttaacaagctttttttgttacagattccttggcctcaacatcatcccattctatcttggatgttaagaatattcttttttcctggtatagataagacatcttttatatgggaagcttattccatttttcaagaagaaaaggggaagggtcagagtactcctcttatacttgctattgtgtttaatgcctctagctcaaaatattccttatgccaaagtggcatattttgggcagagggttgggaggcttatgctgccaccctccagcagtgtgaacagagttgatgcggaggaaaaacttagctcaggcaagcagtagtttagctcagataatgatgatggtgttagaaatatggggaaaatgagacatttaaaaggaagtaaatcaaaggacttggcaattgattagacatgagcagcaatatgcagggggtggtgggtggtgattaagagagactgctacacacagacaaataagaaggaccaagtgggaagaagatcaagatttactttgagattgggagtgccttagggacagtaatctaaccaggaatatgcagagagcagttggatgtacaagtcatggactcagaaaatggatctggataagaagcacacctttgggacatttagcatcactggaagaatgaaagtgcctccaatcccttgatatacagtttacaatgaaaagatcagagagcataggatagcggtttagggagcacacctgccttgggggactataaaaggttgagggaggcaaaatgcactgataaaccaccatcggcattagactaatggctgaataattgtgtaagtaattgctagtaacaatgctgtggagtatgtggcaggtagcacatcaagtgctgcttttttcttaatttcgctctgatacctggaatgcctttttgctgcctcgctgccgggcgggccactcccgactcaggcaggccgaggcagagctccgcgggcattggatgaattcgctcctttgaccactagagggtgatgtggatctttctataaaatatctgccgctcatcaagtggggactcacagcttcaccggatatttcagatgagatgtttaggtactgactgaccaaaaaaattgcagatatcctgggaggccaattggtctttaaaatggcaggatctaatcttaacattttgtaataacccttagcgtttacccatatctggcacctgtagttgtgtgatttctacacagttgataaatatataaatgaataataccgtgatttctattcaacattgtgctgaatttgcaaccagtgaaacaaggggaaaaagttgaaaatgagaaaggaaagaaaaataagtattggcgcacgacaagtttatttatagagattcaaaagggtctaaagaagcaatgcattatcaataacaaaatgtagtaagtttactgaatttaacataaatataaaacattattttattttcacatactacaagcagttatgttttttaacgagagacaatttacaaataatgatataaaatagaaaataaacacctaagaacaaatctattagattagcaagactatcatgcagaaaactattaaaattttaggggaatcagggccgcgctcagtggctcacgcttgtaatctcagcactttgggaggccgaggcgggcagatcatgaggtcaggagttcaagaccagcctggccaatagggtgaaacccatctctactaaacgtacaaaaaaattagccaggcatggtggtgcacgcctgtagtcccagctagtccggaagctgaggcaggagaatggcttgaacccagaaggcggagcttgcagtgaaccgagatcatgccactgcactccagcctgggcgacagagctagcctctgtctctaaataaatacatttaagggaattattttaaaagtttgaaataagccaggcgcggtggctcacacctgtaatcccagcactttgggaggccgaggtggctggatcacctgaggtcaggagttcaagaccagcctggccaacatggtgaaaccctgtctctgctaaaaacacaaaaaattagctggacatggtggtgggtgcctgtaatcccagctactcggaagcctaaggcaggagaattgctggaacccgggaggcggaggttgcagtgagctgagattgcaccattgcactccaggcggctgggcgacagaaagaaactccgtctcaaaaaaaaaaagtttgaaataagtaaagatatacaacatgatcatgaaaaagtgaatccaatagtaaggttgtttcaatttctgcagtattatctatatattcaataccacagtaatcaaactacaaaagatttactttatgaaatttgtcaaataatctacaactaagtgaaaaagaacaaaaataagcaatatttaagaagtacaaaaagtgatgtgaattgctctaccaattatcaaattatgttatcatttaggataatgaaagaagcgtgattaaataggcaaatggaaaacagaaaatgaaaaataggcccatgaatatacaggaatttcatatataatagaggtgttattgaagatatacggaggaatgatgtaatatacaagttattctggaacaggtggttatccatacaaggaaagatgaatttaaaccttacttcacaatatatgtcaaaataaatcacaagtgaattaaatgcttaaatgcaaaattcaaaatgttaggagttttggtaaataataaggattatatcttcatgaacttgggctatggaagattttttttaacaaagaattaaaaaacatgtttaccccaaataaaagaataatgcattctactaaagaaacccaacaaaaagtagcacaaacagaataaagacatacaccacaaattggaaagatattagcaacacacatagctgacaaaggttgggtatccagagtctagaaaaaactgttacaaataaataatagctaatcaaccaaaaagaaatatggacaaagggcagtttacaggcaacactggtggcctataatatatcaaatatattcaacctccttagcaaccagaaagaagcaaacaaaaactatattgcaccatgagataatattaacatactagactggcaaaattaaacgtatattaaatagcaagtgtagtcctagatgtggaacatctgaacacactcatgagctgttggtgggatcacttatttggcttaatcactttggaaagcattttgttatgttatgtaaagttgacatgttgacttgaaaactcagtctttacattgccaggtatggcaacaatcttgcacctagaaaagcagagacatgttcgagaatacaatactgtttgtagcagcacaaacacccagggaaaaattagtgtgcattaattcaagaatgaataaattctagccaatgaatataatgtaatactagatggcagtgaaagtaaattgtctagattgtgtgtcaacgtattatcacagacctaatgttgaatgaaaaaataacattgtagaaaatatataaactagctgattcctcttagatacatttcaaagacacacaaaattaaatactacataatttacagattcttgtgtaaatgctaaagactataatgccaagctagtgaatgacaaatttaaacttcagattacacctacctgggcatgacggagaaacaatgaggaaatctaaaagagtaacatggactgagaaattttcagcaataatctaactcttaagctgattggttcaggcaaaggtattcattttattgcttctatatatgcattgcatatttgtcataaatattgttctgtatagttcaacatttcattatttaatgtagccgggcacagtggctcatgcctgtaatcccaacagtttgggaggctgaggtgggcagatcacttgaggtcaggaattaaagaccagccagtgacatggtgaaagcctgtctctactaaaaatacaaaaattagccaggtgcggtggtgggggcctgtaatcccagctactcaggaggctgaggcaggagactgcttgaacccgggagacaaaggctgcagtgggctgagatcatgccactgcactccagcctgggagacagagcaagatccgtctcaaaaataaataaataaataaataaataaataaataaatacttacttaatgtaaagcagctgctatgtgattttataagtgtgtcaaaagctactatttgtaaagaccgagttgtatgattccttacctgagatggaagggaggggaagaagcaaactgacaagttaaaaaagtaaatagagtgtaaattagttcaaccattgtggaagacagtgtggagatttctcaaggatctagaaccagaaataccatttgacccagcaatcccattactgggtatatacccaaaggattataaatcattctactataaagagacatgcacatacatgtttattgcaccactgttcacaatagcaaagacttggaaccaaccaaaatgcccatcaatgatagactggataaagaaaatgtgacacatatattccgtggaatattatgcagccataaaaaaggatgagttcatgtcctttgcagggacatagatgaagttggaaaccatcattctcagcaatctatcacaagaacagaaaaccaaacaccgcatgttctccctcataagtgggagctgaacaatgagaacacatggacacagggaggggaacatcacacatggggcctgtcgggggatggagggctaggggagggatagcattaggagaaatacctaatgtagatgatgggttgataggtgcagcaaaccaccatggcatgtgtatacttatgtaacaaaagtgcacattctgcacatgtaccccagaacttaaagtataataattttttaagtaaataaatgtatgagtgattttacttaaaaaaaatagcaaaacagtgagtaacagaaaaaaaaaaaactaaaagcaggctgaaacttacactatttttaacagctaaaacaaagtctgccctcctacattctttgaaattgaaatgactctgtcccatgtacagagcatctacaaaggctatggaaagtgatcacgtcacaaggaggttgctgacgggggctaggagagtgggtgaagaagccttacagaaaaagctaccactacgatttctttctgagccaaccatgtgcctcagacttctctgctgtgtggccatttctttctggggagccaggtaaggccctgttctgaactggttgaatttcagttccaagactctctccggtggctgcagtatcaagctccctcctgcgctttttctacagctgctctctccttcctccacaggctccacggacaccaaggtcacccagagacctagacttctggtcaaagcaagtgaacagaaagcaaagatggattgtgttcctataaaagcacatagttatgtttactggtatcgtaagaagctggaagaagagctcaagtttttggtttactttcagaatgaagaacttattcagaaagcagaaataatcaatgagcgatttttagcccaatgctccaaaaactcatcctgtaccttggagatccagtccacggagtcaggggacacagcactgtatttctgtgccagcagcaaagccacagtgccgaatgttagcccttcttagaacacaaactcattatggacccagctcaggaaataagtgtgtagcaggttggtaggcactacgtaacagaaacccaacttgaaagacaataaatcagaaggaaaaacttgtaaataacagctctaagtgagcaaaaaacaaaggggggttatttaaaacaactgatggggacaaaaccccagggaaggggccagaaggcataaaaagcttggattcctcagtgttcagcatattaggtaagatatgctaggttaccctctctctctctctacatgagctttatggatttctaacaatctttatttaaagaaggggattctgtgcttttcacttggtaaagttgtgggtgcacaaataagaatgacaagcggatcaactgtgtctttcaggtagaccctgatcttctgacccagcacatttccttgaactagagacagactctaaagggctttttgactgcttctcacagctctccctgccatagaagcctagtgggaaccattagcaattcctgccctatggaatgttacaatcacaaatttttatttttatttatttatttatatttattttaatttttttttgagacggagtctcgctctgtcatccaggctggagtgcagtggcgtgatctcggctcactacaagttccgcctcctgggttcacgccattctcctgcctcagcctcccgagtagctgggactacaggcgcccgcaccacgcccagctaattttttgtatttcttttagtggagacggtgtttcaccgtgttagccaggatggtctcgatctcctgacctcgtaatccgcctgcctcggcctcccagagtgctgggattacaggcatgagccaccacgcctggccaacaattacgaacatttttaaagcaactctattgagacataagatatatatggaatatgtatgcaataaacaaatccaactgctgcaataaaacacacccgcattttaagtgtacacttcaacaaattttaacacatttttatacccatgatgtaaccatgatgacaatcaagatacaaaacattttcatcgtctcagaaagtccctcacatctctttattgaggtcttgttaatttctctcagcatcgctttgtattttttattatacagatcttatatatattttcctaaattttattttaacaagattataaatgtactcaataaaaatattttctgccaagatttcacgtcagcctaattcaatttcgtctttacatttttcaattgacatctctacctcagtatgttacataaaaataccttctccagaaattgcatatggtttggagcaaccatatgtgagctcacagcgtcagcctcattcaccatgtgaaccaatcaagtgttagtgctgctctgtttccaggtaaaatatacttatttacatgtattggaaaagctgtgaaatttctgcaaggtgtactttaagaagagatacattttgttaatgaaaacatacctatgcgttaagattaattaaagggaatattttgcagttaagcacatgatttggaatgaggggttgcagccctgctggtcaagcctctgaattccattcttgtttctcccataggccaccttcatcaggtctatagttctacaacacagagtgtcagtagtagggaacgttgttcatgtgagtgcagggaatacttgggattctgtagtttctgctcaactttgctgtggacttaaaattgctccaaaaatacaattcactaatttaaaaatggatccaagtattcagatggagaattaccatattggaggcacgaaatgggaacatactgttgaatctgttgcaatataggaagagtgtttaatgacataaactttttcattatttactcctttatctaggaaataggacactatttaacactgactacaatgaggatcttaaatacagtagaactgtctaaattccatcaataagaatagtgcatatattaccaatattgggatctgaggtgtctcagaattagtaacacatagtactgtagagattattttaaaacatagtgtggagataattttgtgattccattttaggaatactatttctgattacatggtttcttagcataaagccttactccttcatgcaagagagtatatactatcatactatgtccctgtagttttctattccaataatgctcctcaggaataaaatatacatgataatcatgatgatgatatggataatgatgaatataattgataatgcagacagtatgtagaaagatagatgatagaatttgtaccatgtttccaggactagaacacaatcatggtaagtataatataatacctgttataattgaagtctgtaaacagtctaaagaagtagtttaaattgtttcccttgacaccttgacaaatctgcaaactacacatataggctaagtacttccgaggctatatgaacgttctaaaaaacatttcctgtctgtggattccagcataatgcatattctcttctaaggcagaagtttttaacctgggatccgtggacctccaaggagtgcagagataaaattcagggaatcaataaatttgaatgggaaaatagatctttattttaactaacctccaactgaaatatacctttccttctatgatataatgagtaaaccatagtagttttagtaatatcagtgacaaagtcaatgacagaaatcacagacatttgcttatatgttgcatagatgacagttgatataaaagtcagatattttcataccatgttaaatgcagtaaatatactttcatcactatgttgaaatcatgacagttttcagattcagcaggttatatttcatataatgaaatttaaaggtgttcctatattaatatatgagaatttaaaaaaattgatatctgcatttcaaaataattttctatattctagtttatgcatttaaaatgttattctgagatggggtccttaggatttaccagtctgacaaagaggtccctggtacaatgtgaagaactcctggacacagaattagatcctcaacgcaggcatgattgacaacctgaagcctagacctacgcattggaaacaactatgttgcaagcattctttctcagagtttcacccacactgccgcacctcttaatgcttctcactctaaataattactttatattctctttctgtctctctcctgctctttgttttctctctctctctctctctctgccttgtttttcttctaggagggaacagcaacagcttctaaaccccaccagcttgcaaccaaaagtttcatcatgaaagcatcttttaattgcagataacctcagaaatagaacaacatttgtctaccaaaacaaaagcattcattaagaaatcagctaggatcctatttttatttactaaaactacttggaagaacccatgttatacaatgaatttacactcatacaaatttctactcagttggaaaatgagactttagtcagctggtacaaccctatgaccataaatgtctcatttcacttgatacagtattgacttcctaacttcctgtgaattagaacttcaggtccagaaagtaataagagcaaacgcaaatctagtgtttcttatgtactaagaactgttctaaatgctttatttatgtaatgttcatcacaggttttgggtagttacttattatctcaattttacagataaagtgaaattgaagagatgctctgtaacttttccaaggttacatagctgcgaaatggcagagacaggactaaagcccatgccgtgtcccaagtccctgctctaatccattgtcacaagggaaggggcgcttcagacactttgctattcctaaaattgcaggagtagcccccaccccatctctactgtattaattatttatagtgaatacagagggtgtagagaatcggttctttaaaaaacaaaaacaaaaacaaaaccactaaacttccaaaccccttcttgtgttgagttgagcacaggtgcatggcactctgtgtatgactctgaccaggaagtgagggattggctcttctgaccatgcaggcaggcacttgtccatttagaagggatataaaaagcttctataagcagaagaggaggtgcatgtgacttgatcgctctaattcttagtctcaccatctgcaaaatcagctgtgaaaatcagtcatcacgtagcaatgacaaattctttatattaagccccggggaggggctagatctcagccccttcccttggcctctctctctctcttagagcctgtgtctgtaacttcagagagattttgtcgctgccatggggagctgggtcctctgctatgtgaccctgtgtctcctgggagcaggtgagctcagcacacatccaggtggtcaattcctattctgggcttgccaggcccttccctggccagcacctcccttccaggcatgatctccagcctttgtctcttggacccttggatgctgacatctatcagatgccattccagctcactggggctggatgggatgtgactctggagtggaaacggaatttgagacacaatgacatgtactgctactggtactggcaggacccaaagcaaaatctgagactgatctattactcaagggttgaaaaggatattcagagaggagatctaactgaaggctacgtgtctgccaagaggagaaggggctatttcttctcagggtgaagttggcccacaccagccaaacagctttgtacttctgtcctgggagcgcaccacaatggaagcacaaccattgtctctctgtgcggaaatgtgtcctcaccctacagcccccaccacatcctctagcttaattttttcatttttaatattttcttgagattttactatgtcctgttacttttgcaaacacaaaagatacaaaactgaaaagaaaatagatcctttatccaaggagctaagagtctagcaataaagtagttataacagaatggaaaatataatgtataatactaaaatcagaagtcatttgggagctttagggaggacatgcccaattctgtctgattgaatcagagaaaacaaagaggaagtcacattagaacttcaccagctagacctggttctgagtagggcattctgggcaaagagaacagcttttgcaaaggcatattaaagagtttgtcactttggggaacagtttacaaagagaaagaagatgatcaatttatatgaatcaaaagaaatggaatacatttgaggaagtagacagaaaggagtttttgaaaaagttgagtttttggttccatgaatacaataagtatgaaagtcctttgtaggctgttgctcaaaagagagagctgaagcttcattgtcatcagcagacaagcaaacaatacaatttttcaatatatatatatattttcctcatgtaactttgaaatgatactatttttccattttcctcatataactttgatccttaacaaagggcacagtttcaaacaatatgaaatcatgttagcagtagcagttcccatttgggataatagggttcaactgtctatggaacaatgagataaaaactagaagcaggcaactgcatagacaagatgtgaaattgagatgccataaggctggactagaggttgagattctgcagatttcagcatgtaaataattgaactatggggacagaaaattccaaccaaatatagatttagatcacagagataaaaggcatggaagttaagactgtggtattctggttccttatggagattaaagaagcctaagagtgaggagtgattagaacatgggatgtaaaaacaaaagagggaaagagagagagtgagagttttgttttgtctagtatttgatatttctaagaaaattcgggaaaaaaataaaggtaacccaggcagaagaagccgcaaacacttcttgggtaacagggaatagttggtaaaatgtcatatgttagtttactgaggtgcacagaaccttttccactgaggttccttttggaaagacacaagacttagctaagattccaagaaatcaccaaagtaggaaatgaaaagcctccatgaatgaagttgcatgagtctcctaccagtggataaaggataggataggataaaagaatagctgcaaaggataaaagaatagctgaggcactgaagtagaagctccaagtgagaggactaaatctaacaaacatgaagaattattataaaaccacaacaataaaagtggtgtaatataagggcattgatatataaataggtccaaggaaaaaaatacatgttcataaacacagagcaatggtactgcaacaatcaaagaatataattttcaataaatggtgataggaaaattgggtatctatataaagaaaaataagtgcaattggacacatctcaatatatagccaaaatcaatcccagctatattaaaagcataattgtaataaaatcacaaggcttctagaatactgtataagagcacatcttcatggccttaaagcagggaaagagttcttattccctcaatcatagggaacagattgataaaaatggctatatcaaaattaacatattgaatttatcaatgttaattatgtaacagtgacaagattgactgtatagtgacatatcattaaatatctatatatttataccaaattaatatccctatttatatttatattttcaagaaaagctagtatataaattttttaaaaacctacaaactaatttttctacagatcaatgagaaaaaggtaactgtcaatggaaaaagtgagtgaaaaccataagcacctagcaaaatctcactggtcattaaacatgtaaatgtggctatatttaataatcagggaaatagaaattgagtccaacgaaatatatacccacaagaatggctacgatgataaaaatagtaactatcaagtgttggcaaggcaaagtgtcaacaagaactctctgaatcactggctagagtgtatatcggtagatccagtttggaaaacaatttggtattatctagtaaagttcaagatgtgtgtacccactatccatcaattccacccttgagaaaggcttttctagagaaacccttctacgaaaatcaggacaagaatattcactgtaatacatctgtcatggcaaaaacgtataaaatatccaaatgtaacttaagagaagaataaatcctggttattaaaaagaaattacacagcagtgaaaattcatgaactaaaactaaacacacaaacatgaatgaatttcacaaatttgaatgaaaaattacattgcagaagaaaggtacagtattgtctcgtttgtgtaaagtttgaaagcatctaaaactaaacactattttgtttgcttatgtgcctatgcattaaaatataaaagagaagcaaataattacaaaaacaaacacctcaatagagttagagaacagaggcatggaatctgggaaaagaaataagagctttcaaatattctggtaatcttttatttcctgtgccaagttgtttttttaagtgatcattctgttggtattttatcaagttattatctatatattcaaagtccattttgtaatgtggagaaaacaacctcactgaacaattaaattagtaaggagaaatctatggaaagatatacattaagctgttaacattacttacctgaaatgaggatgagatggaggaagagaaaagtaagcgaaaaaaaaaatcatcaaaaaatgcacaatttaaaataaatagttacagagagaaaaagcaaaaaagggaggttatgtaaaagaagcactagtaaatgaacaagctaaaatacaccagaaagagctagaaggtgaagtatttttcaaagcagtcactagtttcagaatcataaagatagcaattacaacagagatctgaaatatataaaagataattagataactaatagccagaaggaatgtccagtcttgagttagaaactgatgctcaaattaatggcaaaggacgtttttgaaacaactgtgaaactttgcataaaaactaaatagtagataagatgaaaatgcatcgatgagaaaggatgatcattaactgaaaaaaagcttatcaaacagaatttcaagaatattgtttactaaaaaaagtgtctatatatctacacatttatatatggggcagagaaggatctagaaagactcactaaggtgttaacagtgataattgctttctggcagtggtatcatatttttattttgttattttattttctaactttctaaaatatgagtgtattgcttatattagcaaaaatagacataacatatttttaaatgaatacaaaataactgagttatatttcctgagttaggataaaagctttttttccctgatactatgaagtgtttttgctcaggaacatgaagcaataacatgatgattataagtcagtggagggatcacgtcacaagaaggtgcagaaaggggatgaaaaagcctcatccctttgcaacgtcaatgcgatcatgggcaccaggctcctcggctgtgcagccctgtgtctcctggcagcagatgcgccctgagcacaaaagaaaaatccttgtcctgggcttgccaaccagcagatccaagctttgttttgttttgttttgttttgttttgttttgtttgttaagctctttcctggactctttctacagcatctgtttctttctcttacagactcttttcatgccaaagtcacacagactccaggacatttggtcaaaggaaaaggacagaaaacaaagatggattgtacccccgaaaaaggacatacttttgtttattggtatcaacagaatcagaataaagagtttatgcttttgatttcctttcagaatgaacaagttcttcaagaaacggagatgcacaagaagcgattctcatctcaatgccccaagaacgcaccctgcagcctggcaatcctgtcctcagaaccgggagacacggcactgtatctctgcgccagcagtcaatccacagcactgaaatgtcagttcctcttagcacacaaacttgtcacagacccagctcaggaagcaggtgatgtattaggctggaagggagtaacagaaaataactggagccagcttaagccacagtgtaatttaacacaaggataaagggtgtttagcagaagtcaagaggtgatagaagttctgaaaaggcaccactagggctgggctctagaatggctatctctccagcgctgatttttattcaattttggctgctgaatgcttttctctccctgtacaccatctctttttctccaggcctcgtggtgagaatgagatggtcactaaagattacaaattcagttgccatcatttccctacactgataaataccaggctggctctttctaagcctcaattcaaaatcccaagagaaaaaaacagatcagtcatgatccagccattaaccttctcacagagcactcagcaggaggcatgtatgtatatatttaaaatcacataaatattacttttccactcagctcaagcaagggaagtgctccgtttttctgtatgtacatttggtcttgttgcttctacatgatagagagtactcatacccatttcttcagaaatacatagccagattttctccagttttctgccagaattgaaaattcttgtacaaataccttcatagacttgtatgattgctttataggattatatacccagagcaagtcatgattgctgagacatggaattctatgcatattttatctatctaaataccaccacgggttcttcaggatcactgtatacatctgcaatcccacataaaagtgaatagggtgttttcctacatcctaatatctcctttaatccttatccagtgatctagattgttctcagtctagcaatgtaaagagattccaatctctgtctctctttctctccaccccccacccctgcaaccctctcacctactgccagaatatcatcagtgtttaccataaagatacaggtgacaattttttaaaactaaataaaaccaataatttaaaggaactgagagattacgttatactactataataataactggcagcaatctagaaggctgaataatgttctctccctccttttctttcctttgcaattttctaattactaatgagtttgagcacttcttcatgtgatagtggtcctggatttctgttctcaaaatggcctatccatatccgctggcaaattctctattgacagttctatattttcctcaatgatttgtagggggtcctgagatatacaagatattagtctcctttctgaaactttaggcactggaaataccaccacccaatatggcaccacctctgtcccagacttcaaagaatcagtagatgtgggaggaaccaggtgatctcttaccttagcaggtgcatgcgtgttatctccattatgtgaatgagacttctatctttcacttccactctgctgagtgctcaacttgctgtctcttccattattactcatgtctttaagcagcatagaaaagttaccagccatggctgtccccaaactactatcacccactgacaaccctttccatccagaactgctgaaaaaatgcttcactccatttagctgtgcttttttacaatatggggcaaatttgattcaaattaattcttattgctcttttctaagtgaattatgctgcctggttatagcaaaggacagaaaaacttcacacatctttttggaagacttaatacttgcccacacattatctcttttagggccaaattccatccactgcaaacacctatctccttgagctcttgatatgacagctgatccattttgatttcacaaatgcttacagagcaactcccattcactgagacataaaggcattcagaaactttcagctacactacatggaattttggtctctggggaaagggagaagagtaaaaagaaccataaaaatgtatttcaaataatgtgtataaggatgacaaaatatagattactttcatgaaaaacattagaacattatattgtctttgggagtgatttatcagtggataaattaaaacaaattcctgaggaagtttgggaaaaaaataaatttaggaaaacaaattttaaatgatttcctgaaaaccatcagggtttaccataaagttaacaattgaaaaaaatcaaataatttaatagtgaatgagaatatgaatacagaaaattcatatgaatatggaatgaaatattagtaaaaatgtgtttgagaacacttacaaatgaattttgttgtccaatttgattaagagtctagtcaaagtgttactcttttaaactacttgtaatagtgtcagtttgacaatctggaacaaaaacctttaaaatgcttatttttgggaatttggctctaaatcaaaatagatagttgttactgtacttgttctattgccttaagccactataaaacttgacaaaaattgtaagacaactatgttcagacatcagacaacaggcagtacacgtcgccatctctgggaaagaggaaacctagaaggggaatttcgctattgtcctaagactctgccttggtatgacttctgggctgcaccacaagtatatgaagcccaagcagtgggcagtggtctacccagcatagggaggcagagattgagttcagaagtatggacatggctgatagtgatagggataagctactgcagagaaggaagctatgcagaataagacctccaaatattttatgaggtccccttaagtctttggtcaaaaactaagcagcaaatgcatgggaaacgcctccataagacctggcagagaacagttgctgggtagttgtgagaggaatagagattctgacagtcatacgagcgtgggagacatgaatcctgactgggcagagctgagaggccttgctgaaacccctgggaatgcagctggcaccacataagggtcacatctcaagagaaggactaccaacgtcctagagtaaaccactccagaactgccctaacaaagctcagcaagtctcaaaaggatctcgctgatcttccaataagttcactgccttttgaagaaaaatatctcagcactctctaaataaaggcaaatataaacatatacatatatataatctgtagatatataagtctgtagagagatatgtatctctagagtgtcaacaatgcagcatctacaattttgatcttgacatgaaaaaaaatattagacatgggaagaactaggaaatgttacacatgggaaaaaaataaacaataaaaaccaaccctgaaataatacaaatgttggaaatttcagatgagaattttcaagcagttattatagaaatatgttcaagaatttggaggaaaatatggtcatgatttaatcaactgatgaaattgattaacccatagcaatcaagacaaaaaggggaaagacacaaattaccatatcaatgatgaaggaaagcatatgtctatagatacaaaagacattaaaatagcgacagaatattataagtatatgcaatacattcttcaacttagatgaaatgaaatttcttgaataataccacttaccaaaatgattcaaaatgaaataagaaatgtaaagaacttcaaatgaaggaagttaaattttttatcaaaagccttccctcaaaggaaactccagacctgaattatttcttcatgaattctattctaaaattaaggaaaaaagactatccatcttacataaattttttaagaaaatagaagaggcagaaacacttcacaacacttttataaacccagcaaaaacctaatgccaaaatctgtcaaatgcattacagaacagtatcttttatggctgcaaatgaaagaaaacttttcacaatatattaacaaattaaatccaaatatgtctcaataaaatactggcaaactggatccaggagcacatcaaaaagcttatccaccacgatcaagttggcttcactcccgggatgcaagggtggttcgacatatgcaaatcaataaacgtaattcatcacattaacagatctaaagacagaaaccacgtgattatctcaatagatgcagagaaggccttcaataaaattcaacatcatgttaaaatctcaataaactaggtattgaggaacatacctcaaaataataagagctatttatgacaaacccacagccaatatcatactgaatgggcaaaagctagaagcgttccccttgaaaacgagcacaagacaaggatgccctctctcatcactcctattcaacatagtattgggagttctggccagagcaatcatgcaagagaatgaaatacaaagtattcaaataggaagggagaaagtcagattgtctttgtttgcagatgacataatcctatatctagaaaaccccattgtctcagctcaaaagcttcttaagctgataagcagcttcagcaaaatctcaggatacaaaatcaaagtacagaagtcacaagcatttcaatacatcaacaacaggcaagcagagaacaaaatcatgaatgaactcccattcacaattgctacagagataataaaatacctaggaacatagctaacaagggaagtgaaggacttcttcaagaataattacaaaccactgctcaaggaaaccagagaagacacaaacaaatggaaaaagatttaatcctcatggataggaagactcaatatcatgaaaactgccatattgtacatagtaatttatagagtcaatgctattcccattaaactaccattgacattcttcacagaattaggaaaaactattttaaaattcatatggaaccaaaaaagagcccaaacagctaagacaatcataagcaaaaagaacaaagctggaggcgtcatgctaccggacttcaaactataaggctacaataaccaaaacagcatagtactggtacaaaaacagacatatagaccaatggaacagagtagagaactcagaaatggatcacacatctacaccatctgatcttcgacaaacctgacaaaaacaagcaatggggaaaggattccctatttaataaaaggtgtggggagaactggttaaccatttgcagataattgaaactagacctcttcctcacaccttatactaaaactaaatcaagatagattaaagattacatggaaaacccaaaactataaaaaccctagaataaaatctaggctatatcattcagatataggcacatagatttcatgatgaaatcatcaaaagcaattacaacaaaagcaaaaattgacaaatgggatctaaagagcttctgtacagcaaaagaaattatcatcatagtgaacaggaaacctacagagtgggagaaaattctgtagtctatccatctgacaaagatctaatacccagaatctacaagaaattcaaacaaatttacaagaaaaaaacaaacaatcctattaaaaagtgggcaaaggacatgaacagacacttctcaaaagaagacattcatgaggccaacaaacataccaaaaaaaaaatctcaacaccactgatcattagagaaatgcaaatcaaaaccacaatgagataccatctcataccagtcagaacagccattatgaaaatgctggcaaggttgtggagaaataggaatgcttttccactgttggttagaacataaattagtttaaccattgtggaagatagtgtggtgcttcctcaaagatctagaaccggaaataccatttgacccagaaatcccattactgggtatatatccagagaaatataaatcattctattacaaagatacatgcatgcatatgttcattgcagtactattcgtaatagcaaagacatggaatcaacccaaatccccatcaacgatagactggataaagaaaatggtacatgtacaccatggaatactatgcagccataaaaatgaatgagatcatgtcctttgcagggacatggatgaagctggaagctgttatcctcaacaaactaacccaggaacagaaaaacaaatgttgcatgttctcacttataagtgggagctaaacaatgagaacacatgaacacagggagaggaacaacacacactggggtctgttggggggtggagtggggggagggagagcattaggaaaaataggtaatgcatgctggacttaatatctaggtgatgggttgataggtgtagcaaagcaccatggcaaacatttacctatgtaacaaacctgcccatcctgcacatgtaccccagaaataaaaaaaaaagaaagtagagttgctataaagtacatctactgggggggaggtaaaaccagataattcactcaaattttgatgaacaaaagcttccaaaaattaattttcttcaaaaaatagaacatttacttttggatcaaaaataaataaataaatccaaatatgtatggatatatgtatatatttgtgtgcatatacatatgtgtatatgtggacaattctacaacatgtccaagggagtttattgcaggagaaacagtggtttagcattccaaaatcaatatacttttgctgtacagaagctctttagatcccatttgtcaatttttgcttctctcaactaatgtgatcaccaagaatagttcatattcagctcccaaatattaattccactcaaattactgcccacagcagggggcaccaaaacagcatgtttactttaagaattgcaaataagggcaatgatttttttttttttacgttgaagacaaagccaaaataaaagtttttatgatcattgtcttgtttatattcatcagatgcctggctaaggaatttactggaacaaatccgtattttcattcatattactaatggagaactctaaccaaaaagagaagaagggaggggacactggaatatgtcatctggagtgtaggcaaaggctgtaaaatgtgcttgggtactcctaaataaagcaacaactattcaaaattacacaggagaggcagaagtggtgaaggaggaggtagatgaacaagagaggccatgaggagttggtaattaccaaagatgactcatgtgaggacatgaaggctcattgtttattaagcctactttgtatatgtttgaaatttttagaattaaaagtaaaaatatctaaaaataagactttaccaatttgacatgcagcaggaatgattagggtaggatgccatggtgtatccatgcatgagggagggtcagtgatatggacaggagacggaaatactgggtagaagagggtggtttcccagcaaaggccccaccctcaagcctggagacctgcagctgtaaatggggacaagcattcctgttttcattcccaaaaagttgtcttttgacccaccatgccccctttcttttacccatataaaccccaaaccccaggcttcagaggcagagaagcaggctaggagacaagcagagggagggcagaacaacgtggcagagaaaaagaggaggaacgtctgaaacccgagaggagttcagctggaggtggtcagagaagagttcagtccctggatggccaaactccaaggggaagatcatcttctcactccatccccccttccagctccccatccatcccactgagagccactgccaccactcaataaaaccccacattcatccttcaagcccatgtgtgacccaattcttccaggacgctgggcaagagctcgggacacagaaagctgtcacactggccctctgcccttgcaaaaaggcagagggtccactgagctggttaacactcaagccgtgtgcagatggcagaactatctgcccacttgggctcctgcatctgtccctctgtgtgttccctttcccctcaggggtttgagcagttgcagcaactgaaaaggtgagcaacactcctgtcgcacgtccttccaggggggtcagggaactcttcctttttcaccaggacgagcacagatctgaagcagcaaagagccagttgtttattacattgaacaatgtttcacactatcaccataactgttctgtacttgcaatctgctgcattaaatattagctctttcctcctaaagtcaggaataatttgtgttagaataaaatgaattctttaatgaacaactgtattttcagctaattcaaaataggaatgaaggcgttaagtacttctttgaagcacatacccacattaaactaacatctttctacaataagccaatatttttaataaagctctgtgcccagaaaacattgaccagaaaagcaggagccactaaaaaataggagcaatttgaaacaaagttaggaatcctgtccttcttacaacaaaaaagtctcaaactttacagagaatgtattcaaattgcatagtttaccaagaactgagttagaataaatgattaaatgcagaaaaaaaggagaagagttataatgtcctatcattcaagtgagactagacttcctttattcgaaattcaatttggttttgaattttctccagcctgttttatcaggaggatgatgtcaccttgaacaactgaaatggatatgccctgagaaaggggagagatacaactctctggtggttgccagtaaagcgccagaaaaacagaagagaagcaagtagaagaatttcagcatctgctaagaacatataatacataagccaacatggcatctttctttaagacccagtaccttgggagggacaatgacatcacttcctgaatcctcccagttttctatttccatgccctgcttccctcaacatccagagctggaaacacctccatcctgcctcttcatgccatggcctccctgctcttcttctgtggggccttttatctcctgggaacaggtgagtttggaacacagatggggaaatcactgccttaaattttccaggttctgaattaagcctatcctcagagattgcagcacgaggatatttaccagtttctgtcttcaatttctgtcttatttcccacagggtccatggatgctgatgttacccagaccccaaggaataggatcacaaagacaggaaagaggattatgctggaatgttctcagactaagggtcatgatagaatgtactggtatcgacaagacccaggactgggcctacggttgatctattactcctttgatgtcaaagatataaacaaaggagagatctctgatggatacagtgtctctcgacaggcacaggctaaattctccctgtccctagagtctgccatccccaaccagacagctctttacttctgtgccaccagtgatttgcacagtgcttcttggccacctgctctctacacagaaagacagacacatgggtgagttgtttgctctgaagggtacctggatgtgggttgtgggatgtggggtgtttagagctttcagtggtcttaggtagtgtgagctaagggccactttggatcaatgtccccaagccatgtgatgactctgaaagcacaggctacactgaatcaatctcccctgtctatttatttttcctagggagctagacgaatggtgacctttcaggagaaggaacttgagcatttgacagaagctcatgattttcaacaagagcatttcttatgagctgaatacaatgcagtttttatagtccttttgccattatttccacccactttgcaacatcccacactttgttctgttcccactgacagctcctttatcctgtctaacctttctctgccccagttcttccaagctcagctccaccatttagctctataattgattgcctttctactaaaaacaaaataactagcttgttttctaaaacttcactgtaagtaaatttaattgtcattaaatctgactcagaagttaaagttcaagtaacagagactgtgatttacaaaagtaatttttcatctactaccccacactttgatctctgctgagattcattttaacctgcaggtgcagatagacttgcattattatctggatgtactgaatttcaaaaaataaaattccctgtccccagtatgaggtcaaagctaggagcttggaagtgccccttgtttccaggcactagaataattccctggttcccctgctgtggggattcttttaggagccagtgaggcccaggcacaaaaataattgatcaaggactgccagagcttgacgtaaaagtcttcctgagaatcaagttgatgtcttcctcatggatttagtcttcttgtcccataagcctcaattatttcagcaaacgaatccatgggacttggtgactgttcagaaatgaagaatccaacttgttcccttttctacctgttctcatgtgtaaagcgtgttacttttagggattctttctcattggcttccatttaaaaaacaggtttctccagagttttgtttcctgctttctatgcacacctcatcaagtcttatcagcaataataattcttcccttacaagctgttaactgtcccagttaattgtctcctggacatttctgatagatttccccaggatttttccttctgccctcctttttcctcagtacacatgtctttcctcaaccttcgcattcattgtcatgacaacttctttcataggttcctgcctggcaaattcaactatctactggacacttgaagctggatgctccataggcaattcaaactcagtttatccctgaaataaactgcctctccatccttgcacttgcccattttggccacacactgtatttctatctcagtgattggaacagcccttctaggttcctcatttttgctatgcctcatattaaatcagtttctaaatctattacttgtatatcacacattgtcatagtttgtgttctccaaaagcagattttgagaggaaaattagtgtgcgggaaggtttgtggaaactgcccttgcagtccacgtgggcagagggaaatggggcagagggagaagttgggctttgctgtatcctcaacaaagtccttcactcaccccacagggagctctgagtctggatggtcctttagtgccatcccaaggtgagatggcaggtcttattcccactttccttgtaaccatgtcattatatgtgagttgctctgagaagcactcatgaatttgatggggaggaagtgtctctttagaacaagaccattcacagagagatgtcggcatcacagtttctaatatacacatatttatctgattcagttacccctctccctcctcattgcttctacctcagtgcagaccctcatcactcattgcctagaaataaatgcaatgccctctccctggcttactagcttcttacccctttcccttaccctatttctcacattgccaccagcatgaccacatatgacattcctcacacaacacacaaagccctttggaaatggttctccaactaaacatctggccaaattggccgaattcactccagcactttagactgtagctgaactgaactttttatatttccctgaatataccagcctgaattgcacaggtgtacctttgccaaagctctttccttcatctgaaatgagcttctttattccttttttgtcaaaactaattttttaattgcaaattttattacagattagtgggcacatgttgtgcaggtttgtcacatgggtaaattgcgtgatgctgagacttcaggtcccaacaatcccatcacccaggacataagcatagaatccaacaggtgattgttcagcccatgccctgctccctccttctcccatctagtgagccccagtgtctatggtttctatctttacaatcatgtgtattcatttagctcccacttaaaagaacatatagtatttgattttctgttcttgcattaattgcttaagataatgtcctccagctccatccatgttgcataaagggaatgattttgttcttttatggctgcatggtattccatggtgtatatgtaccacattttctttatccagttcactgttttgtttttttttttttttttttttttttgagacggagtctcgctctgttgcccaggtgggactgcggactgcagtggcgcaatctcggctcactgcaagctccgcttcccgggttcacgccattctcctgcctcagcctcccgagtagctgggactacaggcgcccgccaccgcgcccggctaattttttttgtatttttagtagagacggggtttcaccttgttagccaggatggtctcgatctcctgacctcatgatccacccgcctcggcctcccaaagtgctgggattacaggcgtgagccaccgcgccgggccccagttcactgttaatgggtgcttaggttgattcaatgtccttgctattgtgtatagtgcagcaatgaacataatgggtacatgtgtccttatgacagaataaattatttccctttgggtatatatccagtagtgggattgctgggtcaaatggtagctccattttaagttctttgagaaatctccaaactgctttacacagtggctgaactggtttgcattcccactaacagtgtataagtgttccctttcttctgcagcctcaccaacatctattgtttgaaataaatcttgagtgcctggctaatcctcacatatcctttaattctcagatcaaagatgagcttatctataacagtttttccaatgtctgtagacaaagattcagcttttctcttgtgtgtgatagtttatgcatttcaaagttatcatagttgttatgtcccttcatacttctttaacttttattttgggttcatggggacatgtacaggtttgttataataaacagttatatgcaaaactgtgatgctgatctctttctttttatggctgcatagtattccgtgatgtatatgtactatattttcttcatccagcttactgttggcggccttttaggttgattccatgtgtctgctattgtgaatagtgctgcaatgaacatctgtgtgcatgtgtctttatgatagaatgatttctactcttttgggtatatgcacaataatgggactgctgggtcaaatggaagttctgttttcagttctttgaggaatcaccatactgctttccatgatggctgaactaatttacactctcaccagcagcatataagcaatcccttttctcagcagccttgtaaggatctgttattttttgacttctgataataaccattctgcctggtgtgagatggtatctcattgtagttttgatttgcatttctctgatgattagtgatgttgagcattttttcatatgtgtgttgatcacatgtataccttttgctgaaaagtgtctgttcatgccctttgcccactttttaatggggttatctgttttctgcttgtaagtttaagttccttatagaatctggatattagacctttgatgcatatatagtctgcaaatattttctcccattctgtagtttgtctatttactctgttgatagtttcatttgctgtgcagaagctctttaattaggtctcatttgtcaatttttgatttttttgaaattgcttttggtatcttcatcatgaaatctttgccaagtcatatgattaggatggtataatatttcctaggttatcttccaggggctttatagctttaggtttatatttaagtctttaatccatcttgggttgatttttgtatatggtataaggaagggatctagttcaatcttttgcatatggctagccagttatccccagcaccatgtgttgaataaggagttctttccccgttgcttgttctagtcagctttgtcaaagaccagatggctgtaggtatgtggcattatttcctggctctctattctatcccattggtctatatctgtttttgtacagtacaccatgctgttttagttactgtacccttgcagtgtaggttaaagttggtaacatgatgcctctagcccttgttcttttgacttaggattgccttggctatttgggctttttggttccacatgaattttaaaatactgttttttctaattctgtgaaaaacgtcattagtagtttgataggaatattaggttggtgcaaatgtatttgcagtttttgcattgttggaatttgccatttggtattgaaatacattcttaagtaaatgtggttatgttatacatcgttttaatgaacattttcactttatgttttttgctaattacttattacttgctacttatttggtatttattttagactatacacatggtgttagacaaaaagcagatttgagtgattttcttattcaagttcaaactgagtcataaagtggcagagataacccgcaacatcagcaacgcatctggcccaggaactgctaatgaacatacatacagtgcagtgttggttccagaagtttttcaaaggagacgagagccctgaagatgcagagtatagtggcaggtgatcagaagttgacaatcaccagttgagagcaatcatcaaaaccgatcctcttacaactaggcgagaagttgttaaagaactcgaggttgaccactctacagttgttcagcatttgaaacaaattggaaaggtgaaaaactcgataagtgggtgcctcataaagtgagcaaaactttttttaaattgtcattttaaagtgtcatctcttattctatgcaataacaacgaaccatttcttgatcagattgtgacatagaatgaaaagtggattttatatgacaactgccaacaatcatctcaatggttggcccgagaagctccaaagcacttcccaaagccaaacttgcaccaaaaaagtcatagttgtgggcgggaagcctcccaggtgccgaggcaagagaccgaggacacgagctgctccagtataataaaatataaaataagaatagttataccagatatagatcttagatatgattatatatgaatatcattaatcattagtttgtagcaattactctttattccaatattataataatcctcgctctataatcataacctaggaaaaaccagggtatacagagttaggagctgaggagacatagcgagaagcaaccagaaaagagtgcgagccttctgttatgcccggacaggtccatcagagggctccttggtctagcggtagtgttagcgtcaaggaaaaacacccgctacttagcggaccgggaaagggagtctccctttccctgggggagtttagagaagactgtactcctccacctcttgtggaaggcctgacatcattcaggcccgcccgcggttatccggaggcctaaccgtctccctgtgatgctgtgcttcagtggtcacgctcctagtccaccttcatgctccatcttgtacacctggctctgccgtttacttagcagtagcaaattagtgaaagtactaaaagtctctgataagcagaataatagtgtaagctgtttctctttctcctctctctctctgcctcggctgccaggcaggaaagggccccctgtccagtggacacatgacccatgtggccttacctatcattggagaaggctcacatgccctatcctgcccctttgtcttgtatccaataaatatcagcgcagcctggcattcggggccactactggtctctgtgtcttggtggtagtggttccccgggcccagctgtcttttcttttatctctttgtcttgtgtctttatttctatgctctctcatctctgcacacgaggagaaaacccaccaaccctgtgggtctggaccctacacgtggtcactgtctggtggtctgctgccagtgtgatccaccacagctttctgaatcctggcaaaaccattacatctgagaagtatcttcagcaaattgatgagatgcaccaaaaactgcaatgcctgcacctggcattggtcaacagaaagggcccaattcttgtccacaacaacatctgaccgcaggttgcacaaccaatgcttcaaaagttgaataaattgggctacaaacttttgcctcatctgccatattcacctgacctctcaccaacaaactaccacttcttcaagcatcttgtcaactttttgcagggaaaatgcttccacagccagcaagatgcagaaaatgctttccaagaattcactgaattccaaagcatagatttttatgctacaagaataaacaaacttatttctcattggcaaaaaatgtgttgattgtaatggttcctattttgattaataaagatgtgcttgagcctagttatgatttaaaattcaccaaaactacaattacttttgcgccaacttaataccatcgaatctacattgctttggccagtaaggccattttaatgatattgattcttcctatccatgtgcatagaatgtttttctatttgtttttgtcatctctgatttctttgagcagtgttttgtaattcctgttgtagagacctttcacttctctggttagctgtattcctaggtatttgttgtgtgtggcaattatgaatggaatcatattcctgatttggctcttagcttgtatgtttttagtgtattggaatgccactttttaatgttgattttgtattttaaaactgctgaagttgtttatcagatcaagcagcttttgggcagagactatggggttttctagatatagaatcatgtcatctgcaaatagggatagtttgactttctctcttcctatttggatgtctatttcttccttctgcctgattgccctgaccaggactcccagtactatgttgaataggagtggcgaaagagggtatctttgtcttgtgctggttttctttttatactggctcttcacaaggctatatatattctttagttaaaagtagacatctcgatggaccagtgactatcaccctattaatcagtcatgggagcactgctgtgcatttggtattttaactttcgggtatgctatcacatcacagaaggcctggtcccctccccatcacctgcagccggacctgtctttgattcctaccaatcacctatattaattgtgcctaaattcaatattccgacagggcataactaccctaaggtgctaattaattcatgcttgaaggacataacagtaattaacagacaaacacatacaaccgctccccttattggacttttaaaatgaaaatctgcaacacccccctgccccatctctgacttcatcaacccaggaaaaaagacaccttgccaaacttcaaaaacaagtaagccttaattcaactctgccagagcccaaaatatttgtattttagctttgggtatccccaacagctacccctcaactaatgcaaatttttttaggaaactaacccctcaccaatctaattctacttttacaacaattatatctaacacgcacgcccatccattactaagcccatatcctaaatttacacaccccgaaaggcatcatctgtcaccttgtactacaccaaccactcgcgagtactaaaatctactccaccaactcctgctaactcaactttaaatccctgaaccctacaactgtgcatattgcctgtatcttcttctatactccaattttgcacttaacatatatacagttaatgtagcttaattatttaaagcaagacactgaaaatgtctagatgggcttatacagccccataaacagacagtcttggtcctggcctttctattaactcttagtaagattacacatgcaagcatccccatcccagtgaaagtacatctaaatcaccttgatcaaaaggagtaagtatcaggcacgcacaaatgcagctcaaaacacgttgctcagccaaacttccacgggaaacaacagtgatagacctttagcaataaacaaaagtttaactaaactatactaatatccagggttggttaatttcatgccagccaccgcagccatacaattaacctgagctaatagaactcagcataaagagtgttttaggtctatccttaataaagctaagcttcatctcagttgtataaaacccgggctgaaataaaataaactatgaaggaggctttaatacttctgaagacacaatagctaagacccaaactgggattagataccccactaggcttagccctaaactccaatagttaaatcaacaaaactattccccagaacactacaagcaatagcttaaaactcaaaggacttggcagtgctttatatccctctagaggagcctgttctataatggataaaccccaatttacctcaccacttcttgctcagcctatataccatcatcttcagcaaaccctagtaaaagtcacaaagtaagcacaagtatctacataaaaacattaggtcaaggtgtagcccatgaggcggtaagaaatgggctacattttctacacccagaaaatctcacaacccttatgaaatctaagggctcaaggaggattcagcagtatattaagagcagagtgcttaattggatgaggccataaagcacacacacaatgcccatcaccctcctcaagtatcactttagagattagtttaactaaaatccctacatatttatatagaggagacaagtcgtaacatggtaagtgtactggaaagtgcacttggatgaaccaaggtgtagcttaacacaaagcatctgtcttacacccagatttcaccataatttgaccaccttgtgccaactctagccctaaacttaactaatagtactaccgaataaccttaatcaaaccatttacccaaacaaaagtataggcgaaagaaattttacccaggcgcagtggacgtagtactgcaaggtaaagatgaaaaagttaaccaagaataaaatagcaaggatagacccttataccttctgcgtaatgaattaactagaaataactttacacagagaaccaaagccaaggcccccaaaaccagacgagctacccaagaacagctaaaagaacacacccatctatgtagtaaaatagtggggagattcatgagtagtggtgataagcctactgagcctagtgatagctggttgtccaagatagaatcttagttcaactttaaatttacctacagagccacttaatccccctgtaaatttaactgttagtctaaagagggacagctctttagacattaggaaacaaccttcatgtagagagtaaaaaacattatccccatagttggcccgaaagcagccatcaattaagaaagcattcaagctcaacatccaaccactctaaattctaatcacaccactgaactcctaacaccacattggactaatctattactttatagatgcaataatattaatataagtaacatgaaatattctccactgcttaagcctacatcagaccagaataacccactgacaaattaacagcctaatattaataaacaactcaacaaatttattattaccgatactgttaatccaacacaggcatgctctaaggaaaggttaaaaaaaattaaaaggaactcggcaaattttaccctgcctgtttaccaaaaacatcacctctagcattattagtattagaggcaccacctgccagtgacatatgttcaacggccacagtaccctgaccatgcaaaggtagcataatcacttgttccttaaatagggacttgtatgaatgaccccacgagggttcagctgtctcttacttccaaccagtgaaactgacctgcctgtgaagaggcgaacatgaataaataagatgagaagatcctatggagctttaatttattaatgcaaacaaagctcagataagcccacaggccttaaactactgtccctgcattaaatattttggttggggtgacctcggagcataatttaacctccgagcaacctatgctaagactaaacaagtttaagcgaattactatacatatattgacccaataatttgatcaacggaacaagttaccctagggataacagcgcaatcctattctagagtccatattgacaatagggtttacgacctcgatgttggatcaggacatcctaatggtgtagctgctatcaagggttcatttgttcaatgattaaagtcctacgtggtctgagttcagaccggagcaagccaggtctggtacatgtgtatttaagtcctccacacctcccatctataagtctttttaaaacaaagaaaatatgtttggttaagagaaggctggaaatgagagagggagttttactggacaaaaaatgtatagagacttatgtaacaattattatctgatattaatatctgatggtaatacataattgattgagaactagggtgaagtgacataatcccaaacatacatgggagaacgttcggggaaatcaaagctgtttttcttaatggaatctgagttctgagaaagaagacatgcaaaggaggatgcaaatatatgaaaatatatgaaatatttgttgttttaattgttaacacaaatttatatactcatatatttgagtctaattagaatatttaataagttaagtttatgcctggagtcctagttttagtattacaggcaaagaagcagagttagaaggaaggaggggaatgaattatgcatgctgtatttgagggcctttggaacttccgaatgctggtagagtacacagttggcactctgtatcaatggggtcctcatttgcagatttagtcaacctcagatgaaaaatatattttaaaaattacaaaataacaacacaacaaaaaaaatacaaaatctaaaacactgaggtataccaactatttgcatgacatttacattgtattagctattataagtaatctagagttgatttaaagtatacaggaggatgtgcctaggttatatgcaaatactgtgccattttatataagagatttaagcatcagtggatttaaactaatcccccatgaataccgagggaccactgggttgagaacatggtgctgaagctcataaaaagcccttgctgtgggattctgacataagacactgcataaaagctcaacacacatgccctatagtcagtgtctgtgattctctggaatcaaactctattctgtgaaaacaggaaccgtgatggtacaggctattcttggcaatgggaaatgaaacctcagaggtaatcctacttccatgtggtgcagagccctgagctaggagatgtttatcactgtttgggaaaccagaaccctcagcctttctcccttctgcctcgcctgaagacaggtgagtcctttgccataatatgaagtcttaatttagcattgccacattctggttccagatctttccctcctggctgaatattaagattgcattttgtctcttgtctttcttggtatctcttccctatgcaaacttcatggacactggaaggactacaaaatcctgaaaatcaagaaacctccattgagaaagggggttttactagaacaaaaatgtgtagagatatatacaaaaattatatataataatgtctgtctctgtaattattcacacttagcaattcccagcaccttctccagaggacttccctaactaaacaagaaaggtagtctttggggaaagtgttttcatcaataaaagacaagctatgtgtgagttattcctgcactgggcagcaaggagtgggtagttacctctgccttcgagtaccccttcatttgactaggacctgagactctctcatatctacttccaagcccaggttgagcacttcttttctttcctttctttagttgcttctactgtgaggtatagattttacatccagtcactgctgaagactttcatcaactcatcactcatccttcagtcatctcacactgagaacaactgggagcctcccgttttcctgtttctttaacatttgtcagaatctccccaaacctctaacacctttttttcagcagggggcagtaaaattcaatttattttttctgttctcagcacttactattaagaccagatttcatagtaaagtctaaggccaaatctcattaatgattttaatggttacttttgtcttaaaggagcccctgataggacaagagtatttcagggtttggtaaatcaaaactgttatattccttcgtgacacatgacagaggaagagtaagcaggggcccacatgtgttacatgtaaatacatacagacttgaagacatggtgttcaaatagtagagatataatagtaaaaacccaaagcctatgtcagcatcatgtgaacaaaaattttagtaaataccaactgtagatcttagtgaactagggcaaaggaagtggacaacactgggagaaattctgggattaatctttgtatctcacaatcaaaaccaaagacttttctgttaagaagaaatgggggaaagggcggagggagaatggcacttggtttagacattgtttactgcagcagcacccaaaccatttgtagcagtattaccaaagcatgtattggattatattttctgttctgtcatgattgatagtgcaattaaaggcagatggactaaaatcatcctaggcaaaggctaagttgataaagctgataaagcctgaacaccaagtcagtgaaaaatgagactgagaaagttattatcacacaataataacaccattctgaggactcagtgaattccagttactgctccaagctctttacatgtgtctatataaatagattgccccgtttaatgctcacaagttctcctgctccttgtctgatcaagccacgctgttcactggttccctcttctgcatgttcttctctcttgggtttgcagagttcattcctgttcatccttcagaacccaactcaaatgccacttcctttcccaacctttttaattaggtaaaatcttgctattacaggcactcaaagctatgtagtttttatgttcatagcttacaaaacagttgcaatggaatgttttgtaagaatattaaagacttgagttaagataagcaaagcatcaagcctactttggatgagggaagtcaacaaaaatattactcatttgatgggttaaaaggatatagatgaaactgtttcaacaggatgtctgtgggacccaggaagtttgcaggggctgtgtcatcacacacacacaatgacattatcaagagcccatcctgcttccccactactgggagacatcctctctagccccaactgtgccatgactatcaggctcctctgctacatgggcttttattttctgggggcaggtaagtcatagacacagttcattccaaaatctagaaggaataattcctctttgttgggtttgtgcctggctcagcatcaaagtccatcgtgaactctgttaccaatttttgtctcttcccataggcctcatggaagctgacatctaccagaccccaagataccttgttatagggacaggaaagaagatcactctggaatgttctcaaaccatgggccatgacaaaatgtactggtatcaacaagatccaggaatggaactacacctcatccactattcctatggagttaattccacagagaagggagatctttcctctgagtcaacagtctccagaataaggacggagcattttcccctgaccctggagtctgccaggccctcacatacctctcagtacctctgtgccagcagtgaatacacagtgctacatggataccgacactccgcacagaaagggtcgcctctaatgtgaggacatcttgcctccagaaacctcatcttaaactacagaaacccctacaaatcttcccagactcctcagccttgagggaccagtgtgctttaagtaacagtctggactaaagactatctctggctcagtctctaagaagctgagaaatgacccagccccacagtcatcctagctgactttttccttgcatctagttgttgttgttcaattgagcttgcacaaattttatccttcaagataaatgcgataatatttgacagttaccttatggctagctgaagaaagtctttgtcagctaagaaacaggaaaaggatcctttgactttctacacaggctgtctttatctctggttcatggtttcttcctcatgttaaacttgttccttcatacacagccacacaaagtccctgccctttcctgaccccagtcctgcacctgacggcttcagttcctcaatctatgactttgaacttagaataaaattttattttcacttgaaataagtgattaatgattattttcactaatatccctctaaataaatgtaattttagctatatctgcatgaggcctaaggaaaagaaaaggctccaactttggcaaagaatagtctttaacaatgtccctggattcagccctaaatctctttggagactacccttagcattggaagactatcccacggctaggtgattcttctgtcttggatatgctgaatctcagggaagtgttctctatccacatgagatcagacctgggaccctgaatagatttatttttcacagaagtatagactgctgtggagccctgggtgctgagctcagatgtgaaatctctgttttgaggttaccaaaaagtaaagtcacagagtctctgtcctggttttgcctccttaaaaagtagctttaatatgttagaaaagaatctagaaaacatcatacatattttattataaaagtcatttcttgttcattcttcttttctgtttgttttctacgatactagccattcctcactcttctttgtaggctctttctattctcattttccttattttgaccttatttctggactttttgttcttttcctcttaacctatacatacatcttagacaatatcatccaatctatttcttgaagcatatgtctcattagtttcaaacttattctctagctgcctactagatatttccacctctatatttcataggctcctcaactcagcttgtccccaacagagttcatcatcctcccaatagcatatcctcttttggagacaccatcatcttgggaggctcatctccaatggtcaggtgtccttagcaaacacctagaagattaacaaccctccttactgaactcttagcctcgtgccttacccttctggccttcttgcaaaagtgatatgcatcagagagttggccctctgtattcatgagttccacatccctggattcaaccaaccacagatcaaaaatatttttttcaaaaatcgtgtctatactgaacacatacagacttttttcgttgtcactattctaaacaatacagtataacaactatttacataacattgcattgtatttggtactatgaattatttacagatgacttaaagtatatgggagtatatgcatagattatatgtaaatactaaaccattttttatcagggacttgggcatttgtagattttgttatccttgggaggtcttggaaccaattcaccaagacactgagggataactgtagacaaatatgatcatgctactggatcccttcaccatttctccatgcttctccctcatattcaagataaaatttaaatttcttcacctggcttaatggtattttgtgatctggactccagaaattagcttatcttgaacaccttatcctagctatttttcatcctggcaatcctgaacttctgaccattttctatagtccatgttctcttacccatctgagaccctgtacccactgtccctctatctctgaagtctgcacttcttgtctacagggctgactcctactccagcatctcattaatcactatgctaacacaagaagtcttcatctgcttcagttctcaaaagaagtgaaaagcagacacttctcaaaagaagacatttatgcagccaacagacacatgaaaaaatgctcatcatcactggtcatcagagaaatgcaaatcaaaaccacaatgagatatcatctcacaccagttagaatggcaatcattaaaaagtcaggaaacaacagatgctggagaggatgtggagaaataggaacaattttacattgttggtgggaatgtaaactagttcaacaattgtggaagacagtgtggcgattccttaaggatctagaactggaaataccatttgaaccagtgatcccattactgggtatatacccaaaggataacaaatcatgctactataaagacacatgcacacgtatgtttattgcagcactatttacaatagcaaagacttggaaccaacccaaatgtccatcaataatagactggattaagaaaatgtggcacatatacaccatggaatactatgcagcaattaaaaaggatgagttcatgtcctttgtagggacatggatgtagctggaaaccatcattctgagcaaactatcacaaggacagaaaaccaaacaccgtatgttctcactcataggtgggaactgaacaataagaacacttggacacagggcggggaacatcacacactggggcctgtcgtggggtggggggagtggggagggatagcattaagagaaatacctaatgtaaatgatgagttaatgggtgcagcaaaccaacatggcacatgtatacatatgtaataaacttgcatgttgtgcatatgtaccctagaacttaaagtataataataaaataaaaataaataaatatttgtgaagttataaacttttatttgcaaggtatctagaagtggaattactgagtcatagggtaagggtataataaattaaaaacaaaaacaaaacttgtaaaatgttttcagaattggctatttcattttacatttctgtcatcaatgtgtgaggttccagttttttcacatcctctccaactcttggtcttttttaataatcatgattctggaaaatgtgtagtgtcatctcactgtggtttttaaattttgtttctctaataactaatgatattgagcatctttttgtttgcttattggttattcctatatgacctctgatgacatacctattcaaatcctttactcattttaattggatggtttgtctttttatttactgagttttaactgtcccttatcagacgtatgactttcaaaactttttttcctgctctgtgatttgtcttctcattttcttaacaggtgactttgaagataaaccattttttattttgatgaggtccaatttttcaatttatcttttatgaattatgcttttcctgttacttctaagaaataactaagccaaagtcataattttttttctgtcttcttctagaagtttcatagtcttttggctgggtgtggtggctcaagcctgtaatcccagcactttgggaggctgaggagggtgaatcacaaggtcaggagatcgagaccatcctggctaacatggtgaaaccctgtctctactaaagataccacaaaaattagcccggcgtggtggcgggtgcctgtagtcccagctactggggaggctgaggcaggagaatggtgtgaacctggcaggcggagcttgtagtgagcccagatggtgccactgcactccagcctgggtgacagagcaagactctgtctcaaaaaaaaaaaaaagaagaagtttcatagtttttgctcttatatttggtgtacaccatgttctgagttaattttggggtatggtgtgaggtaatgatccaagatccttattaatagtattagtatttttgcatagtgtaatttctgtactatctgttgaaaatattatttcatcattaaactgactttacaccatattcaaaaatgagttaaccatagtggatgggtttatttctgatctttgttgatcttatgttaataccacactctgttgattattacagctttatcgtatgtttttaaattggctagtgtaagtcttttaactgtgtttttctttttcaaaattgccttgactattcaagtcctgtgtatcaccatataggtttaggatcagctagtcaatctctacaaaaggtactactagaattttgagaaggattgctgtgtacttattgataaatttggagataatttctatcttaacaatactgagtcttccatgatcacggaatgctttttccattcctctagatcttttaaaatttatctcaacacttcatattttttccatgtatagatcttacatttctgttgtttaatatattgcaaagtgctattttctataatgtaagtataaaactatttttcttaatttcagttttggattattactagtattagaacacatatgatttttgctatacatactgtatcctgaaatcttgctaaatggatttgttctagaagtttctttgtagatttcataggagttattttttttttttacatacaggatcatgtagtctgagactaaaaagaattttactttttcctttccaacctggataccttttattgcaatttcttatctgactgtactgtctgacatctccagtgcaatgttgaataaaagtagtgaaaacagacattgttactttgctaccaatattataggcaaagcattcaatctcttcaagctttcatgtttaaggtgagtgtttatttctttcatgctgttagtcaggatgagagagttcaatctgttcataatttgttgagattttattatgattgggtacaggttattttgtcaaatttattttattgcacacattgagataataatctgatatgtttttattctattaatatggtatattacattagttgattttggatgtcaaggcaatcttgcattggtgggataaatcccacttggtcatagtatataatcttttcatatatggctaaatgaggtttgctaatattttatggagaccatagacatactagtttgtagtttttttgtgatttctttttatttagaatcaaagtaattctgacctgttaggctgaattaggaaattgtggactgaacttggatgaatttaggaataatctcttattctttattttgtggaagttttttcttgtaggagtggtattatttaaatatttgatggaatttaccagtaaagtcagctagtcctgagcttttctctgtgacatggagtgacaaactattgctcacatgttaaagtcaagctatggcctatatttgtattactcataaactaagaataaattttatacttttaaagtgttagaagacggaagaggaggaataggagaaaaagaactgacagaggttgcatatggcccaaaatatttactatctagctccttactgaaaaattttgctgacctctgctctatatggtgttatttactaaaatacttctttacttgtaatatgtctatccagacatgtggctttttttctcgagttactcttatgtctttctaggaatatgtctgcttcacccaagttgtcaaattcattgacatagtgttgttcataacatttccatatatttctatagggttagtaattgtattcttcattttcactcctgactttgcaatttctattttcttgctttttatcttgttcagtctgactaaagtgttatcaattttatagcatttcaagtaaacagttgtagttccattgattttctctattatttttctattatctattgaattgatttttaatttgatctttttttttttttttttttttttttgagatggagtcttactctttcgcccaagctggagtgcagtggtgctatctcggcacactgcaagctccgtctcccaggttcacgccattctcttgcctcagcctcctgagtagctgggactacagccacccgccaccacgcccagctaattttttgtattttttcttttttagtagagacggggtttcaccgtgttagccaggatggtctctatctcctgacctcatgatccgcctgcctcagcctcccaaagtgctgggattacaggcacaagccactgcgcccggcctaatttgatctttgttatttcttccttatgtttacttttggttgacttttctcttatttttccagtgtcttcaggtagaagtttagattatgatggaaacttttgtagttgttttcctaatgcagttatttaaagttatacatttccctctaatcatggctgcattccatgtacattgatatatttttagttttttagttaaaagcataatttttctagaaattccttttgaagcccatgagttatttaggagtgtgatgtttaatttccaaatatttgtgatttttccagcttctttctgttgtttatttctaattaaatccctctgtgatgagagaatatactttgaattattttaatcctcctatctgtatgttattatataacatataatctatatggggaaatactctatgagcacttgaaaaagtgtacattctgctgttgctgaatagtgtgttctaaaatcatcaattaagtcaaatagtttagtagtgtttttcaggtctttttacccttatttactttctgtctagttggtgtggtcaatttttcagactggaggatttaagtcaccaactataattttggtatgtttatttttgtttcatttctgtcatttttactttatgtactttgggactctgttgttaggccccaggagttactccacaatgctgtacgggcaaatgctttctatactaaaagtaactaaacttagagatttgtgagtaccatcaagcatacccatatatgtaaaattggagtcttagaaagagagaagtgagaaaaagacaaagaaaaaataatggccacaaacttctcaaatttgttgaaaaacattaatcaaaagaatctagaagcttaacatctctcaaacacagtaaacacaaagatatctatgtctagatacattatagttaaacttcagaaagccaaaatccacaaataatgtattgaaatcaatatattttttcaacaagagaaaaatgactcatcatttgaaagagaagagcaatacaattaatctgactttaaatcagaagtcattgtttctgactttaaatcagaaacaatggagatcagaagataatggagaggcactgaaagaaaaaaattccaccaaaaattctatatccagcaaaactatcctctgtaaatgaaaatgaaataaagacattcccagataaacaaaggctacagaattgtgtggttagcagacctgtcttacaagaaatattaaaggaagtcatccagctgagagaaaatgacattgttagcaactaaaatccatagtaagaaattaaaagcaccttaaaggataaatatatgtgtgaataaatataaaaaatacatatgcacaaacacacatagaaggaatatatattttgtatattttttatatcatttgatatacatatataggttgaaactttaatcattatgaagtgtttttctgtaataatattttttgctttaaaatttatttctctgatattaatatagccactcaagcttttatggttactaatatgacatatgcttttccatactttactttcaatatatttgtgtctttaaaactaaagtgatttcccatagtcagaaaatagttggattttggtctttctattttacaacataaaatcaactcaaaataaattaaagacataagcataagacctgaaatttttaaaatactattagaaaacataggggaaaagcttcttaatactggtcttggtaaacaatttttagatattactgcaaaagcataggcaacaaaaaccaaattagacaagtgggattacatcaaactaaaaagtttctgcacaggaaaggaaaggaaaggaaaggaaataatcaacagaataaaaaggcaagctacaaaatgggagaaaatatttgcaaaccacatgtctgaaaaaggattaatatccaaaatatataagaaattcacactcattagcaagaaaacaacccaattaacatatggccaaatgacctgaatagacatttctcaagagaaagcatacaaatgaataaatgtttatcattgctaattatcagagaaatataaattaaagccacaatgagatatcacttcacaactgatacactggctaacactacaaagacaaaagataacaagcagtgataaggatgtgcagaaaagggaatcatgtacattgttggcagaaatgtgtgatggttaatattgagtgtcaacttggttggattaaggatgcaaagtattgttcctgggtgtgtctgtgatggtgttgccaaaggagattaacatttgaatcagtggactgggaaaggcagaccaccctcaatatgggtgggtacaatctaatcagctgccagcatggctagaataaaagcagacagaagaatgtggaaggactagactgtctaaatcttctggctttcatctttctcccatgctggatgcttcctgctctcaaacatcggattccaagttcttcagtttttagactcttggacttaaactagtgatttgccaggggctcttgggccttcggccacagactgaagactacactctcaacttccctacttttgatgttttgggactcagactggcttcctggctcctcggatggcagaagacctattatgggactttacctcgtgtttgtatgagtaaataccctttaataaactcctcttcatctatcctattagttctgcccctttagagaaccatgacctaatacagaatgtaaattagtacagccattttgacaaacagtatggaggttcctcagaaaattaaaaatagaactatcatataatctagcaattccagttctagatataaatccaaaggatatgaaatctgtatgttgaataaatgtatgtactcttatgttccttgaagcattattcacatagccaaaatacagaattaacctaggtttccaccaagggatgactagatgaagaatatatgatataaattctgtatatgtatatataaatatatatattatttatacgtatatgtgtatacatacacacatacacacacacacacaatggaataatactcaaccctacagaaaaaggaaatcatataatttgcaacaacatgtttggacctggagacattatgctaagtgaaataattcaggcacagaaagacaaataatgcatggtctcacttattcatggaatccaacaaagtcaaacccacagaagcagagagtagaagggtaattgccaagcactgggatggggtttcaggaagggaggcataggaaatagggaaatgttggtcaaaaggtacatgttttaatcagacagaaagaagttctagagacctaatatgcagcatgattactatagttaataatatatgtactcttgaaaattgctaagaatgtagattttaaatgttcctaccaaaaaaaagtcaaaacaaaataagtatgtgagattatgcatatgttagcttgatttaattattccacaatgtatacatatattaaaatgtcacaatatcacattgtatacaataaatatatataatttctatttgtcaattttaaataaataataaagaaatgagatagctttcaactaagcttatatagcagtataatataaaaatttttgtagtaacaaaattatagtaattttggcttatattgaaatgtgcattaaacaagtgtttgcataaaatataattcaaattactattcatagcccacagccatgaaaacatgtgtgccttactcttggtacagaaacaaatagcttttactcctaaggaaaaaagaaaattcctgccttttgatgagaattgtttgagttttatacttattttatggggaactttgctgacctcttcattccaccatagctggttattcctcccttgcatgtacttttgtttcctgggggcagtgagtcttggaaacatttgggaaattcttattctgagcttgcctgcccacagcccaggttccttcctggagtctgcagcatcaggctctctcctcggctctctttctgtcttctgtcccctcagctcataaaccccagctcgtagaagctgaagccacctagactctaagacacctgattgcagagacaggaaaggagttctcaagataagtgccaagatttcatactggttttcacaagaatcagggttggaattagagccgactcattattcagttaacattgacattgttgattagagacatatccctattgaaaatatttcctggcaaaaaatagaagttctctttggctctgaaatctgcaactccctttcaggtgtccctgtgtccttgtaccgtcactccacagcactgcacaggcatgtgctcacctcacaaaatggcagtctcaaagggaggagtgcccacccacaagaggctccaccctattctgagaaagaacttctttcagaggaggagagaatagaactttccagaaccttttacatgagatttttttttttgggtaggaagtctgacctgagcagcaaccttgcatcagacttcaaaaggcaatatttcctatacctccttgtgctctactagtgagtacagaagtcgagaaaatgttcctaagtctatggccagttcaaatagtctcattttctatttctgagattaaattatatgtattaagatccttactctgccctttcaggtttattgctcctcagacaagatatcccctcttcaggtcccaaacacattcattgcaatgcctttcctcatccttgtcccagtcctggctctctagcttcttgagacaataacccaccctaaggtatgttgtgacatgcatcttctgtgtcactgggatccctaagtggtacaagcattcactcaattgctttagctagagtccccagaatatcttcacctcttctgtcacattcttcttccacattggtccataaacacatctttaacatttctgtttattaaaacctctcaaattcaaccactattttctatcccaacgaatactgccttagctcaggcaaccactgtcttcgatctgaattacttctttgacctgaattacttcaactcctaccaaatatccacctacctgatgtcttactctcttttctaactcagttcattctctgcagctgaaaacacttcctttccattgactttagggttatgaccagtcttctttatatctaaatgttagcctataagttttttcgtaaaaaaaaaaacaaacttccaaactacaaattcttaaaaccctccatgatttggcccttgcatacctatccagtcttgtgaaattcacctactctttacccactttttgcatacttatgctctaataatattcataatccctcagctctcccaaagctccatatgtactttctcactcactcctgagcctttacacatgctgttcacactagctagaataatctttctctccctatttatctgtactcctaatccttcatgtttaaatggcataatcatcatggctgagtctctgactatgcgtggtaaataccccatggtacccagagcttctacaatcatagagtatcacacatttcattgtttaacttattatgatagtttttaaaattattaatacaaaatatgctcaatgaggccaaggaccatgtccaaggttttaatttttgtatcttcaacagtattacaggctttgaataaagtaggtgctctttaaatatttattgaacaaaccagggttttatcagttcttgcttccctagctaagatatgatctcagtcatctaaacatttctctctcagaagtattgctgcagttatttagagattttcacattgtggtagactgaataataatctcccaaaatattcagatctgaatccttgaaaatcttgaatatgttctctcacattgctgaaaggattttgcagatgtgattaagttaaggatcttgaaatggggaggttttccttgattagctgagtgggctcaatatcatcacatactttcctaaaatatcttacctaaaaccacctctgtgaagccctctttcttttcccagacagatatggaggtttctttctttatgtgtttataataaattaaacaaacttcaacttctatcactatgttatgatatttatggtcatgtctgactcttcctagactagtatggtttttgagggattggactatatattcgcttacctttgtaaatccagtatgtaggacttggtacaatatattggatacagaattataagcccgatgggagcagacacctttatttgttgttcatgcttatatcccagaatctagtactatgtctggtgcatgtagtaagagtgaggcaagaggatgcaagtcagaaaaaggctatgtgacaatggaagtagagatcggaatgacagacacactttgaagatggaggaagggccctgagcccagtagtgcagatggcacctagaagctggaaaaggcaaagaaatggattctcccataaagcctacaaaaggaacaccacctgccaacaccttgatttttagccccataagactcatttcagacatttatcctgaacaggacagaagcaaaaaaatggaatcgatcaacataaaagcagaagtgaataaggtagaaaatgttttaatgatagaactaagaaataagcaaatgagataattgtttgccagccaaaagacagagaggacaaatacactaaaacagaagtgacaaagggaagtatcatgataaaatctatttttaaaaacaatattttgtataattctctgcaaacaacctaaaagcctaaatgaaatggctcacattataaatttagcaaaactgaccctaatgtggaaaaaagcctaaacaaaacaatgactacaaaagaaataaatgaatttgtaatagaatttcctcacagaaaagtgccagtcccatatagtttcttacagggatttttccacaccttttaaaatcagggactttgagaatacctaaaacattgcaaagtatagaacagtaggggaaatttctaaattattttcatgacatgagctaaatattaaggtgcaacaaaactgcaccttaaaaaaaaaatcaatctatagactggccaggcgtggtggctcatgcctgtaatcccaacactttgggaggctgagggtgggggtggatcatgaggtcaggagatcaataccatcccggctaacacagtgaaaccctgtctctactaaaaatacaaaaaattagccggttgtggcagcacgtgcctgtagtcccagctactcgggaggctgaggcaggagaatcgcttgaacctgggaggtggaggtttcagtgagccaagatcatgccactgcactccagcctgggcaacagagcgagactccatcttaaaaaaaaaaaaaaaaaaaaaaaaaaaaaaaactatagacttacatcactgattagtattgataaaaaagtattcaataacagagaatcaaataatgacactagaaaataatctacaaattggtgtttgctccaggatggtaagggtatttcaatattagtaaacttactcttaaaatccattatattagtcaatgggtttggcctgagcactgggaaagggatgggtaggaaatactgtctcagaaaggcattgagagagaacacatcctaatcctatctggaaatttacactccccttcagccattcacgtctcttaacaatagtctccagctttactgaactctttgcaaactccaaaaataccgtattctcttagatattgcataggctggtcccccagcctaggtctaccaggaaattatttgttttcctacaaatcttacttaaacccacactacctctgtgaagtcctttcttcccacggagatatggaggtttctttccctatgtgcttacaacaatttaaagtctgttactatattatggctttttggtcatgtctgactccttctaggcaagtatggtctttgaaagatgggactgtaaatctgtttacctctgtaactgcagtagtaggactaggaatgatatatagaatacagaatcataagcccccatggaagaagagaccttctttttgttgttcatgcttgtatcccagagtctagtactatggtgcacatagatgtatatttgttcaataatatgaaagactcaaatatgcctttgtggaattgaccctgcacttatgcctcaccatctcctacttaccccggaattatttattaactatctcatgtcttaggtctcatctcccttccctagttaagagtgggccctgttgctaagcaggtcaaaataggaggctgatgaagaaaatctctgtggaaaatgctgaagaggaacacaggaataaaaatacctttactctgatgatgccttatataaggacagatgcagttggtttaaacttctacattggctcatttctatgaatgccacacctctcaatttcagggacttcccgtgaggggcttcacaacaatctctgggctcagtggggagctactcccttggtgaatctcctcactgccactcaatgagccatcagggtgggccgtcacctctgctaagccacagaggtacaccacatcctgctcctgagaggaagggaaagacagaggatcataggaagtaaaccccttgagggaaatttcaatgtggaatttattctgtttcttgagtagcatatatattttccccatctcagaccctaacctcaagtgaacttactcccagactcacacacataaatatacgcaccagcaccatcccagcaaggaggcagctgcaacaaaaagaagcaggtgggagagtattatattacatatttaactacaggatcactccaagaattacatcccctaaaattattccctccattggaagcagactagtagccaataggaagagaaattgctaaaacaaaaatgtgttcagttggatgaagtatttatttaaaacagaaatgtatttatgaagacataattcttcagaattatattataagctaaaaataaaatcctatacccaccaactgactgaaaggaccatctctgggacaagggcaccccagagtaaccttgaatgttgagttcttggccaggacaggatggagggatcagacacaccttattatacctctcctttagagccatgatgaggtttgcttccctaaaggctaaacacaaaccagccctttgaaaagactctagcactaaaagcaacagaaagtgtgatgctgtccctcctttttcctggtaaaaggccaccaaccaaacagtgtttctggccagtctatggaggacgtgtagtgaggcttttggtgtcctttgcttcaccttttgatgtcagagagctgaaaactccacccccagatcatgctaacatggccagtttttttttacaggaatcccatgaaggggcaggaaactcaattgtggatgtatatgtttttccctttattaatattcatgactcctcctatagcttattgaatatctgtatttggccattccactcagcatgtatttcttttccctttgcctctccctagatgtgtgtttctggcttctggccagaggctgtgcttcccagcctgtcagaatggccacactgcaggctgcaaccctttatgagaaataaagctctcccttccaaatttgaacctcctcattcttccattgacagtatcaaagatcagatagttgtagatgtgtggtattatttctgagggctctgttctgttccattggtctatatctctgttttggtaccagtaccatgcgttttggttactgtagccttgtagtatagtttgaagtcaggtagtgtgatgcctccagctttgttcttttggcttaggattaacttggcaatgcgggctcttttttggttccatatgaaccttaaagtagttttttcaaattctgtgaagaaagtcattggtagcttgatagggatggcattgaatctataaattaccttgggcagtatggccattttcacgatattgattcttcctatccatgagcatggaatgttcttccatttgtttgtgtcctcctttatttcattgagcagtgtttggtagttctccttgaagaggtccttcaacgtcccttgtaagttggattcctaggtattttattctctttgaagcaattgtgaatgggagttcactcatgatttggctctctgtccattattggtgtataagaatgcttgtgatttttgcacattgattatataatcattcttctaagaagataccaatgaagtttcaaggatgattcagcatgataatgaactgtttgtaatcattcaagatatactaaatgctgaaggaagtcagttagaaataagaagtaggacaaccaaaggatagaacctagaagaagacaaagaaaggattttacagaagctgctcatgaaaagagatccaccaattctgagataaaagaactgggtttgagtaagccacttgttataagcatgctcaaggttttcagaaaaaaataaacagagctagtcaatgatacctggtaataaaagatattttgaatttcaggccattgagggtagcatgctaagtgtggttttagttttgggaattagagtaaaatgaaaataatttctgaagaagtctccagccaaactttaaaaagaaaaaaatgcaaggtatagaatatttgaaaaatttattattaatagttgaaagtacatattttagaactggactgatctggtcaccgtctagttttgccatgttacttaacctctctaaaggtagtttcctagcctataaaatggaaatagtcatacctggctctgagaggttttatttagttgagaaaatgtatgtaaattgcctgacacaatccctagccaagaataagactcaataataactaatggcggtagcagtaagagtgctactactagctgaccattctgaaagttgagcctgagtgagtgataactatacactgtgcagttgtaacttcttaacacattaattcatgtaatcttcacagcaaatccacaaggttcatacttttattagtacaacttacagagagtaaaactgaagcattcacagttaacttacttgcgtaaaatgagcttaagtagcagaacccatatttaaacttaggcactctctctccagagctttctttgttagccactaaccttgtggtagtgcaatcaagtaaatgggtttgttgtctgatatgctcagaagccaataagcatggcaccagcttttgagaaaagaaaaggttttactgcaaaactggtcagcaaggagaaataagccggctcaaatctgtcttcctgattcggggtcttggacaagttttaagggactgagagcaaggatttagtgatactgggttgacagggtctgattggagggtttcagatttaaccatttatggtaaagtaggttgaggcagatttgagcccggatctttccagccaatgaaccccttgcttctgaaagagtttcagcatccagattccaagcatcttcctgtcttcttggttccgaagggaggaatcgttcgttccaggtgttatttgaggtcaaagcttttggctctgtcgtacctacaagctaactcatattttgttatccacataacagacccagtttgggctgatcctgcagttacaaatccctccctttttgtttactttagttctcaatcttgaagaaatagagtgtctaccactctagctactttttgttgacaagggacataggtctgggtttgaggaatgaaattgtttcataaataattgcaaatattcataggtcctgagttgaggtcaaacaggtgggtcagggaattcgatatttaataactatttcatgagcagggggaattgatttaacaatcaatttaaaaaatagacagcaggtagagaccttgagagaaggaagagaaatcttaacacatacagaaatataattttgagtttaagtagaccctcaaaaaatagatcttattcctaatgaaaacacgctgtttacatattatatccaggttttttagagaacactagatggcgtcgagtggcttttggtctattatttgggtgggtctcaacttttttagaagtattaatgtaaacacagcatgacatattaaagcataaacacctctttgtttagccagtatataatctagagtaattttattatctattattactttagccaaagcacctggctctctctattgagccaccatggccattgtggtctccttggcaagctttttcagggcaatggaaaggtttttaatcatatgtttataagaagcaactccccaccatggcaacagagtttgtctaaagaaatatcctacaccatctggtgggccacctggtaaatatttaactgggaggaggtttagcatagatcttttggccaaggtgaacagttttatggtgttagtctaatgcccagcatcactaatgccacagacagagaaaggagtgactaagtaccctagtaaacagatgtctttggggcatcagctgtcaaggcattcatagtccgagggctggtcgtttgtttcatagacaaagacatatcctgaggaggcgcatagaataccagatatgttgccgggcgcggtggctcatgcctgtaatcccagcattttgggaggccgaggcgggcagattatgaggtcaggggattgggaccatcctggccaacacggtgaaaccccatctccactaaaaatacaaagaattaaccaggcatggtggcggacacctgtagtcctagccactcgggaggctcaggcaggagaatggcgtgaacccgggaggtggagcttgcagtaagctgagatcgcgccactgcactccagcctggatgacagagcaagactccatctcaaaaaaaaaaaaaaaaaaaaaaaaaaaaaaaaaataccagatatgttaacatctaagttctcagtttcaggaattttacttaggacttggtcaaagtaggagtcagagtatagaggagtctagaaggagttatctaacttacaaattggtagggaagagggcagtccttgaaggcatactaggttctttttatttaactcttgatgtaatcatgtagatctacagtttgaggacacatcagtgtatatctcctggaccagaggatagaaaacaggaagtggaaaataggtgtgttaagtaaagagatgattttcgtttctgcgttagccagtgtctggcttctgtgggcatgggcccctttatcctcagttttaaagctgttaacataagtgtctttgcaggggatgttaatggaaaacagggaactaatgatcctcccccagcaaatctgaccctacaggttatacctgtgggttttttatcataggtcaccagaatattaggcactttagagaagttggtcacagagataagcagcagatcagtgtgatcaagtgcagaggagggtttttgatgacatctctaacatttagatagattttgtgaggtaggtagggattgggacatttttatcaagaaattatctttttggccagtcatggtggctcatgcctgtaatcccagcactttgggaggctgaggtgggtggatcacttgaggtcaggagtttgagaccagcctggccaacatggtaaaaccctgtctctactaaaaatacaaaatttagccagatgtgttcacttgaactcaggaggcagaggctgcagtgagcgagatcatgccactgcattgcagcatgcacgacagagtgagactctgtctgaaaaagaaaaaaaaaaaagaaggaaagaaattatccttttatgttgaggtaaggcaagcaaaaggatataatagaggaaaattgtgggcatttttaacagaggaaatcattttgtttccctgagaggagatatttggctgatagaaaaaaaagcatcagaaaaaaataaactctacccaaggaagggctataaggtcccaaataatatttttgaggttaaatcaaggaggtagagatgattaattcaatagcatagaatagtatatatgacaacaaggcaaaaattaagttgcattaatacaggcctcgcccaatatcttgggcaagctgtctcctttaattgtctcctgtttctgccctcacagttccatcagatggaggctggttttagagacagaaatggatttccacttatctggagagctaggagccctttggccttattgggttttttaaaaagtaacttaaaaaaagattaggggcttccaagtgagttcctgggtggaaaagctggttgtgggcctccacagccatctggtagacggtcagtctggtcctttggcttttcttatctgtgaagggcatgacctgtttgggaattttacaggggccaagaggaatcttctgaaaatgggaataacttttacccatgaatgatgaatttagggcctcaacacttttaactttattgctgaatggatcactaaaggaacttcataaggacctaatctgtttgaactgtagttggtcttcagggtagcggtttttctaggtcttaagttgtacttagtttcctagacttagacaatgtaaaggaacatctataggaaacattaaaacagctagaagcgtaattatgtatagcagaaaaagttatacccagagactgtacacattttatagcatctaatgcatttacccatcatgatcattttcaatattaaaacagtatttagtcttaagaagggttgtcccacatagaattttgtaggggctaaactggtgcttacttttaggggtcattcttactctaagcagggcaagtggcaagatcttatcctatgttaaattgggtttttgacacattttggcaagtactttttttaagatattgtttatcttttcagtctttctaatagactggagcctctaagaggtgcttaatttccactgtatcctaagagctccataaatgtcttaggtaagtctgatatctctgttgtcactttgaattgaaaatgacaatccaaaggaattatgtcttttaataaagcttgagttacctcagatgcattttttgtttgacatggaaagaccttgacccatctagtgaaggtgtctataagtaccgacaggtatttatagtttcctccagctcctggcataactacaaagtctatttgacaatcttgtcttgtttctgttcctcaggtttagacccctttgcctgctggaggtggttctgtctttggattctctgtagcacaaataagacaattttgggcagccttctggatagtcttttgtacgtgcagcctgacaacaaactttggtaactaatgataggttgtgtttcttctataatgagttctttgatgtaactgggaaataatcctttatccagtgctcagggacaagaactattccttgctcattgtaaacctaggcttcttgttttacactgttccctatccaaatcttgagtataagtatgaaatccctactggtttgctctttctagatttacctttgagtactgggtttaaataaggacagattcatacttggaataagtaccagagcctttgttttaggctctcttgtcctggctgtatgtttttctgcctgattggctagattattgcatttagttatctagctatcagtctcttggtgtcctgggccgtgcattatggccattttttttgacatcaaaattgagtctaataagtctaatatctctcttgtgtgtttaattttattttttatgagattaatgagtctgtcttttatatggtcccatttgcgtgcactaccaaaaagacgtatttggagtctatataaatggttaccttttcatttgtcctgaggtgtgaagcttgtgtgacggcaataagttctgccttttgggcagagagaactgatgggaaagcctcagcttttaacattctctggtaagtcactactgcatatctggcttttcagagaccctgatccatgaagctgttcacactggtaaacattcccaggcctgggtatttcaaaaactgatttgtcaagccagacctgtttttgtagatcctctttagggatttcaggcaatggtccttcttctacctgtaataaggcaacttggagggtgcagtcttgtttaggagacaccttaatatttactcattctggtgaaaaattactgtgcatttaattttgttagcaagtcttatcccaacaaaggtattgaacattcaggcatatataggaagctatgtttaaataggtttaataggcttttcctctatggcatttgagtggctgaaagaaaggtttgcaaggatgtttccccagatgcaccagtaatagcagtgttctttgggaagacagggacttgtgttgtgtttgggatagagtatgtagctccatggtcaactagaaaatctatgcatcacttttgcacaccaattgtcatctgcacttcttggtgggaaatgtttacagagctaatagagtgtatagaagtccctgggtctcatcattactggttgctatgagtaagctgtggcatgtggtatgttgatttgtggggagttttatcttaaaagactatagacaagtatgttattaaagtttcccattttgtatagagttttacctgaaatgactggaataagatcctgtaaaaaggaggtgttctggttctgtggtattgtgattatggggattcctcttcagagaatcaccaatgggctagatattccctcttatgtgtctcagagggtcctaaacaccagatggtattgggccgcttgagatgttggggttaccaaggccccttgtatgctcctcctggatgagctattgaagttctaacccaggaatggggtatgtttttctggtggggttgcctataaaatcactttacatcataagccaattgcctcaacacctctgccagactcttagtcacttaggaataccctaaaagggcaggagaaagcaatgtatttcatctttggaatccaaggactttcatttaaataaacttctaatgaggttcttgtcacaaccatcaaaaattttaacctctgttaggatgaataattatgcaaaccaaaaactcagaaacacaaaggaaaaccaaaaccaagccgaattgaatactcaaaaagttacagcaccttactattgtacttatttttttggatgctaacccaaagccaggactgaaataatctaaccaggacctccctagggtaggattcaaaccgatgaagctgcacaaaaataggactctaatctacagtcctagaccaaagacaatttaaggtgtaagcacatattaacaaggtattgactccaaaagacatcttatccagaagaatttctttcctcaaaagagaaagtagcactcaaagggcctgaaatgtcatgacagagaataaggacctcacagctaagcctctggataaactggtctaagtagcaccactcagggtcagtgaagaaactttaattcccactgaggggctacagtgccttggcaggtgttggcctcacattgggcacctatatttgttatcaaacaaatgggtttgcacacagaagccaataactatggcaccagcttttgagaaaagaaaaggctttattgaaacaccagtcagcaaaaagaaaggagtgggttcaaatctgtttccatgatttggggtctagggcaggttttaagggatcagagagcaagggaaaggatttaggaatgttgatatggtagggtctgattagaaggcttcaaatatgactatctatggtaagatatgttaagaaacattttagcccgggatcttctgggccagtggaccgctcactactgaaagaggtctggctttcaggttccagtcatgtcttggtcttcctgtttctaaggggaggaatcttcggttctgggtattgttagaggtcaaagcttttactactgcacatgcctgggctacatgatttgcagttatgtagctgttggcagtgtgggagatgagtgttgtttctctggccaggaaataaatgaaaagtgctggttatcagggactaaattcatcacagcaccaagcaacatcctgcttttggtgctgccatgagcaacaggcttctctgctgtgtgatcatttgtctcctaagagcaggtgagtcctgggcacaggtaaggaatccctattactgaattcacaggatctaactataaaatgtttcttcataaaactcacattagtctcctctttcccaggccctgtctctatttgatcatccatttttccccccaacaggcctcaaggatgctgtagttacacaattcccaagacacagaatcattgggacaggaaaggaattcattctacagtgttcccagaatatgaatcatgttacaatgtactggtatcgacaggacccaggacttggactgaagctggtctattattcacctggcactgggagcactgaaaaaggagatatctctgaggggtatcatgtttcttgaaatactatagcatcttttcccctgaccctgaagtctgccagcaccaaccagacatctgtgtatctctatgccagcagttcatccatagcactgcatagccatatcctctccacacaaaaaaaggtgcataccaaagaggaaaagcctgccctcaaaattcctcaccccgaataagagaagtttcctcacaagtattgacaaaaagagccaaactctgtaaaatatttgaagagatttattctgagccaaacatgagtgagtgtggccagaggcagaggctcaagagggcgtaagaacatgtgtccaaggtgctcaggctacagcttggttttttggagacatcagacatcagtcaatacatgtaagctgtacattgtttcaatttggaaaggtgggacaactcaaagagggggcttccaggtcataggtggattcagagatttttcaggctggcagttggttgaaagagttaagttatcatctaaagatttgaaatcaatataaaggagtgtctgagttgtggggacaaaggttcttattatgcagatgaagcctccagggagcaggcttcagagagaagagattgtgtttcttaatcagacttttaaaaggtgccagactcataattctctcctggatcaggggaaaaaacctgaaaaggaaagaattatctacagaatgcagattttcctcatgatagacagctttgtagggccatttaaaaatatgtcaaaaaatatactttggggtaaaatattttgatttttttcagggcctgctgtgagtcatgttggtgtcttattgctacaaaaggtctgttttgtcacttgtaaggtctccattctaatgttaatgctggttggttgtgcctgaattctaaagtgaagagggtataatgaggcatgtctgaccccacttcccactaagacctgaactggtttttcaggttaactttggaatgctcttggccaagagaaggggtccacacagttggttgtggggcttgggattttatttttggtttacacaagattataccaaagcccttccctaaatttgatatgccctgcttccctctttccatttttgtccttctaggacatctttttggttgttattaaacccttagtttcttgtcaatatcccactagactacagggcatcaacatgatatgaacacttatcttggtttatttgtgatactatagcaaaatgactgagattggataatttgtaaacataaatttgtcacaattctgtaggctcggaagcccaagaacaaagcacctcagttcaatgtctggtgagggccttggtctctgcttccaagacggcaccttgagtactatgtcatcacacgagaaaagtgcctaagctagttccccagcccttttatgagtcactaattcattcatgagagcagaaccctcatgacctaatcacttctcacctcttaatactgccacaatggggattacatttcaaaatgaattttagaagaaacacattcaaaccacagcacatttctagacaaactttcagacacagatatagggaaattttaatgaaattgaattttaccaagtaaagacaaataacccagatttgcaaatacccttcaaagattcttcaaagcgatctcaatggttaatcgtgttgtttaggaaaataagaacagtggcagcaagacctcctcagtggtacaatggcctcagcagcagtaaaagagggtagtaaacattatgcagactttgtgtgggctcaggatcacccacagagaagaaggttatttgcatgtatgtgtgtaactgtgtgtgtttaagagaaatgaactatgtttatttacagggattattgaggagcagaacctcagttgggtagatgcaggtataacttttaagatcaatatccatgtctttgaatagataggctagagatacagatttactgagtagttccccaaagatgcatgttgggtgataaccacctatactagttttccaattactgcaaattcagcaggttaaagtaacaattgtcttatctcatagtcctgtatgtctgaagtccaagaaaagtggctggatttttctcagggtctcataaggcggaaatcaaggggtcagctgtctgcattctcatcaggagactggctcctcctcccagatgattcctagtattggtagaatttggttccttgtgacagcaggtctagggtcttcattttttattggctgtcacagacagcaatgagattggtcattagctccttgcagtttctttctggtcctcttgatcttcaaatgcacatcaaatctgtctcatgtttaaaatccctctgatacccacttctgcttcaagacagaaaactctgcatttaaagggctctggtgattagattaggccaacctgaatagtatttattttgtcaaataatgtaacataatcgctggggtgacatctcatttttaggttccactcatgctcaaagtgaaggacattatacatgggcatgagtcattggaggtcattcttggaattctgcctatcatatcaatggaggtcaaatgccaggaaagtcaagaatagaaattcagagagcatacaatcaaatacattaaattagaattcaaaactattcaagagatggttcagagttttggccatgcagtgcatcaaattttcttactactgcttaatcaaggacatagtgcagaagtagaatgaattggtctttattaaaatggaacaaagaccaggtcgaggaaggaaaggcaaaaaggtagaatagatttggctcttactggaagaacactggagattcaagacgagaaacaggattgttttagtccctgagttaacaaaagagaagaaagatgaaaccagaacagttgccaatgaaggagcagtgaagtggaaaggcagaatggagtgagtgtggagagcacttttctgaagagaataaacttagttatcagatgaaaagagatatataattagctttgtccttataaattttgaggtaacttactatggaaatactttttcttatcagttaattaatttggggggaggtagcacaatcctttgaaattccaataagtagaaaactacttattggaatttcaatgacctcaagatgaagccttgaaaaagaaatgtctgttagaatccagttaacaggagaacacctactgtgactattatcagcaagttggtgaaaacttcctgaagaagaaatgtgggatgatacagaaactaactaaagtctcggaacagcaaatagtttctcctcttgtgaattaattcaccttccacaattaagcagagataactcagggtacctcaaatacttatgagcttcacagaaatgaattgctaccaaattccattgatggaggaagataagaaaatgatcaaagaaaatgtaccttcagagaagaagaattgttgagaaggtagcagtcctttctcctttctctttccatgaggtagttgctattcattactttatgatggggactgggaacacaagaatcaccactcatggattaatgaattcaagatctatactttccattttgattccaaatttgaacttaaatttattcaggacaccaactgaacacttctacctaaaggtaaaactcatatcatatttccctcccaagatgcatttcctctgagttcctgacttgacagagtcatttgtttgtacaatatatgaacactgagagtcatgccacatttctttctcttttgccctggacatccaatttttatgcaagcactttcatttctaattcctaaatatcttagttctttgtttgctatctcaatcactgcaaccactgacatgtttatgcccattttactagcttaccaaataaatataaaaggtctcattaatctctctagttccttattaatcctcatttcatctaatctagtattattagtatacccaagtataatcttccaaattgcaaagatctgtttctatcactctttctgcagcatccttcagtggctcccccatggtctacaatatatacaatctaagtttattaaaatgaaaaaaattatgactatccctttaatattttgaaaaaaggaaaattagtcctttaccagaaaaaaatagcactgtattataatgtcaagttcacactagagtctaggatggtatcaaagagctctatatttttcttcttgagtcactttgatatcctcccacagtaagaccactatagttggtgtattagtctgttctcacactgctatgaagaaatacccaagactgtgtaatttataaagcaaagagggttaattgattcacagttccacattgctggggaggcatcagaaaacttacaatcatggtggagggcaaaagaagcagacaccttcttcacagggtggcaggatggagtgagtgccagcaggggaaatgccagatgcttataaaaccttcagatctcgtgagactcactcattatcatgagaacagcatggaggaaactggtcccacgatttaattacctacacctggtgccacacttgacacctgtggattatggagattataattcaaggtaaaatttagatggggacacagagccaaaccatatcagttgggtactgaggaggacatactgtattaatcatgccttcttattgtctgtattttctaatgttttgacatccatattttctgatgttttgacatctgaggacttgctgatcttggagggactgaccctctcagtgttaactcattcctagggatagcaaactactttccctagagcatgcctttcataccaaatcaaccaatccaaagcctctactccaaaccacctcctttattgggctctcatactctaagcccctattctcctaccctaattaccacagggccaggtactaaacaacttgagataatccctacactttggagcctgctcaaatttttaaactagcccatgctaagcctacttagcctgtgtaccctgcctccctcattcgttcagtgaaaaccacaataaaggttcttgccaatgtttcctgtcactccttctatcttctgacccactgttgtgattcttattgctatgatattttttctaacttggtcttgaggtctctctttttagactagccataaaccaatatagccattctctaggagacctctgactcaggggagggggagttaaattcaggtgtgagtgtcaggtgagacacagtggagcaagtgaaaacaaaatgcatgaaaggaagaaatttattactcacagaacccaaagaggttagagaggcctaagagaagtgtgaagatggcaggagctcatccagtttgggagggaagggagggtacaggcaaaggcaggaggagggggtgggcgaggccagtggaactattccttaggctttcctatgggggttatgagtcagctactttaaagaaaacgtttcagaaggagaaaacttacttgcaggactctagcattggccattaggctttatcatggtcagcagctctggagtgtgctgggttttgggtcaggggaatgagaaatagaccatatagccgacaaccacatagggagaagttttaactggggcaacgacgacagggtatgactgggtttcaaataatttgtttcaggccttaaaaaaaattggggccaggcacagtggctcacatctgtaatcctagcactttaggaggctgaggcaggtggatcagtttgaggtcaggagttctagaccagcctgatcaacgtggcaaaaccccatctctactaaaaatacaaaaatcagctaggcatggtggtgcacacctgtaatcccagctacctgggaagccaaggcaggacaatcacttgaacctgggaggcagaggttgcagtgacccaagatcatgccactacactccagcctgggtgacagagcaagactccatctcaagaaaaacaaacaaacaaacaaaaaactgggcctgtattgccctgcatagtgtgtcatgcccctttcttcttgggaatcgtaggtaacaaactgtattttcagtggcagctgtctcctcatccattagctctaccatacttgaataataatagcactcatattctaaaacacttgcttcttatgagtaggaagaatgggtcactgcttcagaatcccagacatgtccaggaggaggtgaaaaccaaatgagcagatcatacccagcctgattgaaacacacacaatatagtcagccctttgtctctatgtattcaccaactcttcaagtacacctatgtatagcatgctgacaaactctgtcttcttcaatctgctaaatcattttccactttcctacattgctgtgggccaggagagccctgggtgtagtggaaagtggggagtgattaaatccatctaggaaggagatgggtgggtgaaaaaaagtgtgtaacatatacaaaggtttctatgattacaagcctactatgaaatccagtcacacctaccactcacagtcccacttactttgctctaagccacactgaactctatctccaaacatgctgtgcataatatttcccttacacagcacacctgcaaattcctttcaaatataacttaaaacaatagcactacatgaaatgtgccattttcccaagaagattgtagactctttcccctgtattctccatagcttacacaattctccctttctacaaataccaaattatcatgtttattggtatagtgatcttaccatgggcctacaaaatccatgtggtcaaatgccacgcctttccattattccttccccagaatcttctcctatgcatgacatccatgtttaatgaatgatcagacacaattaatatgggaacagggatgctgacttctgtgtttatgcctctattctcagggtctgaaacagcacctgatatttaacaggtgttcattatgtggctgttaaaaaaaaaaaatcagcaatgtctacaatgatttgatcctgggtttgcctcttctctccttcttcctccaaagtatatttcttaaatttaacaacccttgccttccttttctgtctaagggctactggtaggtaggataatgactccgaaaggtgtctatgtcctaaacctcagaacctgtaaatatgttaccatacataataaaagataattaagtttgtagatagtttagtgtgctaattagctaaccttgaggcagggagattatcctgactcatgcaggtgggctcagtataaacacataggtacataaaagtgtatggactatggtgagagtgatgtgacaactttacctgctgttgctgctgaagataatgaaaggggccacaagtcaaggaatgtgggaggcctctagaagctagaagagaaaaaagaaaacattctctcctagagcctccaaagagcaaactgccaatgagaccgaccctggacttccaaccaaaagaactgtaagataataagtttgcgttgttttaagccactaatttgcagtaataggatacagcagtaagagaaaactattataaggctctatttccaagcagctgaaaaaaggcagctgatgaaagaagttgtgccgggaagtagcctaagaggcaaaagtacaaaggcaggagtttgaatcagacgatgccacttttaagggtggatttgtcagagacatgtgaaccacagcaactccatcttaaataggagctgggtaaaataaggttgacacctactgggctgcattcccagatggtgaaggcattctaagtcacaggatgagataggaggtcagcacaagatacgggtcgtaaagaccctgctgatgaaacaggctgtagtaaagacgctggccaaaacccaccgaaaccaaaatagtcccaagagtgacctctggtcgtcctccctgctacactcccaccagtgctatgacacaaatgccatgacatcaggaagttaccctgtatgttctaaaaaggggaagcatgaataatccatcccttgtttagcatataaaaggatataaccataaaaataggccacaagcagccctcagggctactctatctatagagaagctattcttttattcctttattttcctaataaacttgctttcactttatgctatggactccccctgaattctttcttgcttgagattcaagaatcctctcttggggtctggataaggagcctttcctgtaacagctttctggtgatgatgaagggactgtagtgaggaaaccctggaaagaaaggataactttgggtaagtgttggggtcctgtaacatcttcctggcaaaccctgaagggatgatactaagacgacctccccccaacccaaggaaatagactgcagcaccgattggacaactttgggtaagtggtggagtacctacccaggtaaagaatgggattgggatagaggctcaacttaggggagttagagtctctcctaagacagagagggttaaaggcccctcttaataaaaggcaaggacacttgaatgaccttgggttagaggcccgatttaggaggattagaatccctttccaagatttagggggttagtggcccttcttagaaagtctgtcttggtaaagtcctttcgggctaagaacgggttttgcactacaggatgttaactgctattctctttggattaatctgccttcaactccttgctgacagctgtgtgtaacaggattaggcatgtacaggatcatgggacatggggaactattttctccctaaaacagaaaacttgagagctgatgggactgctggaaaagatccttcacaaccatcatgcggccacctgaaccgttcagtgtcactgcaatgggtgggtctttctctggtgtctccgagtgcctccccttccccaccctgcctcaggcagtgctttcttctttctctgtttctctgtctctctctttttctccttgcaaactggttgaattaatggtaaaagtaactgtctcctataaagttttgattaatggaagaaagggtttttgaggctagacttaagctgtagcaaatctgatgtgctttgtgtgtttttctgtattattctgtcataaagaggggtaccttatgatagaacactggctgaggacacttgtaaactgcttttcaagacagaccagcaaactggtcagttacaaactttgctgtaggttcctgagaaaaattggatgagatttttttttgtcttgcatgtccttgggagcttgaagctgtaaccatgtggccatgttttcgcttttcacaatggcatcctgtgttcagggttctattcctgcctcaggggatgagtttttttatattcctatgtgtatgtatttacatgtattatgtgtatgtgatgtttatttctaaaagagcattgattaatgggtttaatgagagcttaaatcaaatattttgtcagaaaagtaaaaagtgtagtgccttttagttcacgtgactttaattttccagaaataaggacagttttgaagattattgataaaataaaaatatcttcaaaaatgtaaacatttggcttaaattaggcaggacacatattaagactgctaaatgcttgaaggtcataaactgcttctttaacttttgaaaaatttttaattaacctaccttgaagccattagattctagataagacctggggacatgtggagttagccacgccccctagctatgctggagtcagcctttatctgcacttctgcctggtgtgtccaaggctaggctccacacctagtacataattaaaatcctgaatttagcaacttttcgtgaaaaaccttggtaagagtcaacattataacatgtaattgatactactgaagaaacagttttatatgcaaattgtgtaaagaaagtgaaatgcatttttcattaaaattatatatatatatatatatatatatatatatatatataaagtcatgggaatttagatttttgcctagattaaagcattaaaggatcgtttcaagttaggatgaagctgactgttcaagaaagctgtggaaggcttatgaaaaaaataaccataaaagagattctgtgtgcgaacattggctaaaattaaaggggtgttattcagttattctagaaactgaacattggaataaaagcactattctactctttaacaaaaacttgtaaagggttataaaaggtttataaaaaccttaccttatggtcaacatgattaagattgaatacatttgtctataaggttttactaagaattgggtttgacatcaataatgcatgaatacagcagtgacatttggcttatttaatattacagtcatacaagaagcattatcaaatacaaaatggcatttggtttttttgggctgtatttgtataaatgtgtcattggtacatgttccaaaattattttaaaaaaaacttctttaaccctgatatgacttagtgtatgctattaataattgttaattaaaatcattgcatgccacagagtcaaccacatttttctagtcaattttggctttaattgtggctgttctaagacttttggtcatccagacaattgtctcatattagttctctgtaaaaggtggtttagaattaaatgtaggactctagaaaactgtgcttttaaatgcagattttctgataaatttggacattgtgacatcagaacagaggaaaacctttcaggactcagggagagctgaaatgttcatgaatatcaagcagaacagaagttaactgcatggactaaactagcaaaagtctaacgtgtaaaatgttttctccctaaaacagaaaacttgagagctgatgggaccgctggaaaagatccttcacaaccatcacgtggccacctgaactgttcagtgtcactgcaacgggtgggtctttctctgttgtctccgagtgcctcctcttccccaccctgcctcaggcaatgctttcctctttaactttttgtgtaaaatgttgctgatcttttgttttgtgtttcagagtcaaggaaacttttgagctattacagcttttagcaattgagtaaagtatacatgtgtgaacaaaattgagagcatatttttttctctttacttgatttctccagattttggaaactcattgtgaatagtctcaatttatggcaatatagttatttgcatgagtgtaataagaatctgttgggtttttgttttgttttgttttattattattattattattattatttttgataacaagacacaattggagaaactggttattttaccaagactttgatggaatggtatactctaaggaatcaaacttgacttgccaagtcaataaaagccccttggggaactggcctcagacctttgatacaacagtccatgtacatgatttctgacctgtggtaagtaaacaatgtcaccttctaacaggtccaggagccccaagttatcttgggaccccaagaggagaggaatttactcagctcataggtatttgaggatacaaacccatggtagggcgcggcttaaaaagagtcttatccaagattccttctaagaaacaaagttccatcaaaaccagtgttaaaagtctatgtgaaaaataattattcttgctgtactttatataaataatcaggccaagtataataaaacaaattggtcttaccatgacttatctttagtgaaaatggaaaacaggagaaagaatattacgtttcaagacctatgttacacttggtattaaattctagtctcatcagttgttgtttgtttatgcagtttaggctaaccctgcttattcctatgaaccaaccagtgatctttgcctgctactctgaaaaaacaaggcattttggtaatgtaaaaatctggatttcattctaattctgggcatgtactggaattgcctagccacctcatgtcagcttggttccagtagttgcccagttcatgaagagccttctaatttagtttacttgggatacttttgcttattttgttatattgctgttttactctttgtgtaggaatgcagactaagcttactaaatgttttcttaaaccgaatacttattaatctttcagatatcacctttcgtcaggactcaagagttctgaatggccttcatcatactgaagctttctgactgagctcctctttaccctgaacacaagagaccataatagtcaggcagaaatatcattgcccctattcagcctgaagaagttacagaagatgaatctttgtccttctacaaccttaggattaagggttcttttataaaagggaaggaggaaatgtctaagacatatgaactagagcaacttcatcctgaataggagctgagtaaaataaggctgaaacctactgggctgcatcctcagacagttaaggcattctaagtcacaggatgagataagaggtcagcacaagatacaggtccttaaaaccttgctgataaaacaggttgcagaaagaagccggctaaaacccaccaaaaccaatatggccatgggagtgactgctggtcgtcctcactgctacactcccaccagcaccataatagtttacaaatgccatagtaacatcaggatataaccccatatggcctaaaaaggggaggcttaaataatgcaccccttgcttagcatataatcaagaaataaccataaaaataggcaaccagcagccctcagggctgctctgtctttggagtagccattctcttattcctctttcttaataaacttgctttcactttactcagactccccatgaattctttcttgcacaagatccaagaaccctctcttgaagtctgattgggactttttcttgtgacagattctgccagtttctgttcttggcaggttccatttctacaaattcctcatctctacaggtttaggatcagaatgttccagcagggagcactacagctgtttcaatcttcagggagactactcatcttgggaataattccttcctttgtcctgtcagcataatgtgtatggaccctgctaagcagcacccagtcatgaaagtgctgccaccgaggaaggtaaggaggttatgacaaaaaacacagaacgtgaccctttgaacagcaggagagtagaaaccgttcttgtcatcagaaatttcagagaggaagctcactcactgtccagcttccctcccacacaatggaagcataaaaatggaaacccattttgcacaagaaattagcacgttgcccctcaagagaattatatcctatgtttgtttctgtaggagtgtctaaacagttaaaaccatgtaccattcacaaaaatctatacataaaacatgaatgtttagaaagtgaacacatatagaatgatatttgtttcaatttaagatgccaacctggatacaagtacacattcagtttgactaaaattgctgtaataataatctaaaagcaaaactaaagaagggtagaaaaaggaaggtaacagattcctgccattgataatggaaatcatagcatgtaaacaaagccaatcctgcttgggaagttcaccctgagcctgcaaggaatgtggggaggcagcatggggcgcctggatgttacaggtagttagttaggcatgagtggggcaggagagggctcccttccccccaccgcccagaatgtcagacaatctggtattgattcagagattataacgttgcctctctaataataatgcataattcagcagcctgagatagggaggtacaatctcttgctgatccacagctgttaacattaaagtgtcaattgaatgcaggcaccaaggagaagcaaagaaggtttccaataaaatctcaggtattgggcaggtgaacccaggtatgtgcattgagagacaaaagggtggagtacgaccttccagggacactccaacagaaacaggaagaaagcgtcagatgggcatgcatacaacttcctaaacacactgcgcatgctcacttccgaagtgtaaggagggcactgtgcattcgggcagcctatcctaaggggagaataatgagaaaggggcacaagatggccgcctatgaagtcccaggatcaaggttaaatgccgcacttgttcttcaagtcacctgcttggatctcttccaagtgttctttcttttcttccctgttctaaagcctttttaataagcttctactcctgctctaaaacttgtcttggtctctttttctgctctatgaccctcagtggaattttcttctgaggaggcaagaactgaggttgctgcagaccagcaaggattcactgctgataactcaagataccttccaccagtaacttggagatgacaccaagagacaacacaggcaaaggaaagtgtattaattctgttttaggtgtagaaactggagtgattggaaaataattcctaaaagaaattgaaaagtcaaattgtcaagcagtaagttcaccatcacatttaccataaagcatgtagagaaatggaaatatttacacatcatagttgagagtgcaggatttgcagtcagacagtttctggcacttagtagctttagaaagtgacttaagccctctaagccctcagttttcacatctataaaatgaagtaaataatataagcctctcagaagtggggtgagggttgaatgaaacaatatgtgagtagtttaacacagagactggcactgacttaagaaagtattgtgataaaagcagcagtggagaaaatattttgaatagctgtatgcatggcaatcctttaacctctttattcatggcaactcatttaattgccacaacaaatatgtaagtacttttattatttccattgttatggactgagttgtgctaccttcttcatttcatatgttgatgtcctaagtcccagtgccccataatgtgactgactatatttggagatggggtctttacatcgataattaagttaaaattaggtcattagggtgggccctaattcaatatgactggtgtccttatcaggaggttaggacacagacatgcaaagagggaagaccagaaagaaggtatagaaaaaaaaaaattgttatctacaagccaaggagagaggcctcagaagaaaccaactcaacaaattttaaaagatgtattttggagaacaaaactgttagaatatatttagaacagaaaaaaaccatttcttctagaactaagttggtctaaaagtgcatatcttggtaaggctctgtgaggaaatgacctaatctggagagaagctgctgggacactcgtctgtgtgtggcctgtggctcacaggggcaggtattctcagaacgcacatgggataatcaccatcctggtgtgtccaggctctgggaacaggctcttcctcgtggctttcacatgagtttcctggtgggctatgtagtcacttttctgcatccttcttttaaaggctcatgaatgtcaaagtaacacagaccctgagatgaggcaggaaagttgtatcggaatgttttcagactatcaaccagaccaaacgttctggaatccataagatccagggctggggataaatttaatctattaattattcttctgaagttggcagctttgaaaaagatgccctgagtcagcatagtcattctaaccaaaaagaaaaaagggaaaaaataatcatctttcccaacccttaaatcgtccagcactaaccagactctgagaccctctgcagcagcagcctatcagtgcagccacatcctctctgagcggatatgacaaaccccagggttgaagcgacctaacctatgagccgccacacacactcaagatgccccagacaccctgcactccgatcttactcgttcctttactgttttcatcctaattgccctcttacacatttgaccacacatttttggtcttggtggttgtattagttttctgttgctactatacaaattgccacccatttagtggcttaaaacaatgcaaatgtatcaccttacagttccgtagttcagaaaccaacataggtatcacccagccaaaatcaaggtgtcggcagatctgggttcctttctgaaggctccaggggagaatcgattttcttaccttatgggttgttttcctctatcttcaaaggcagcacgttctgttgctctgaccctacttgcatactcacagctccctctaaacactgccgggaaaggctctccacgtttaaggacctgcgtgattacattggacccacctgggtaatccacgaactgcttcctatctcaaggtcggctgattagcagccctaattgcacctgcagctttaattcccatttgccatctaactgaacatccacagctgttacgggttgcagggattattagcacctggacatctttaaggaaccattcagccctccactccgatgttccactagagggcactaacatattcctgtaatataaacattaaaattcagataatggtgggagggaaagtttgataaaattgaatactgtattatcaattttaaaaacttgatatataaatatgtctcattggggtctttcaaaagctaatcatatagtacaagaaaatacataaactggagtgactctcagaactaaaatggcctgagcgtaagtgaaatagaatttgaagtgaggtgagaattctgcagtctattcctgggctcaaaatcacatagaaaaaaacaaaaaaaggttgctttatatttaaagggacaaggcataggttctcttacaggggtttttaggaaatggttcatcagtttagtaggtgttagcttaattgcttttatcgggatactgttgccccggttgggtggatgagcagtccctaaaaagagaaggaagagagcaaagaccgaaaaagtatgaaggagaggaagggatggcatggcgtagaatgaaatgctttttcatcaaaatgcaaagatgaaggagatgtttcagagtgcccggccgtctagagggttctgtttactttccattcccgctgttagggacataggagtctgccctacattagggaaatggaatagaataagtttctagaattcctaaatatggtggaattgggtagaaaagatcagagggaaggttgtaggaaggaagggtgggaaagtaaaacaactggctcctactgtaaggctattggagcctcaggctaacagcatcattttagtaccttggttgaggtagaaaaggaaacgagagcagaatagcctcatagtcaaaggaacacagaaggagaaaccacattgctgaggagagtgaattagctagtagagggacagaatatagaattagctacctcctaaatcttgaattaatctaatatgaaaagacattgggaaaaattataatactctgaagtgtaattatgtacctgttcaactttgaaacaccacggaatgttgggaaatccaatatccactaatagtgagctatgtggacgcgagtaaattctgaaagattttgctatttgggatgtcaaggtttactaagtaacatgaaattatttacttgcagtgggtttttagaatgaaagttgttttccctctcttaagaatacccgaattcacagctaggatatggaggatttgccaggaaaatgcaaacacctgtggctgaagtagagccaagctctctccctacatttttttccagaaagcagtggtgaagaaatagaaaaagagagaatactcctcttagatcagagctaaggtcctgatagcaatcactcctttctcaatgcatggaatggaaactgttagagctgcacctctcaccatgaaggggtctgggggcaaggaactcatctctgaggtttgagagtaggcctgaaaaccgggaagggggccccttcttgtctggagatgataatgatttggcaaaaacaatgacgggctctgtgaggctctacttgtggtaggaagcttttgggaagaaaggggtagcctccttctattccaccatccaggaatacattcgttcctacaaagtacaagaaggattcaaaggtatacatgtgtcaaaaatcacaatgagcactgtaaatatatgcaatttttattcatcaactataccttaattttaaaaattaagaaaagttcaaaggtgttcgaggaggaaggcattctggggaatcctaggaaagtcacctcaatgtaggaagaacatattcaggcagaaaagagagcagtaccagcagctgctggaagatctaagagaagcttgacactcctggccccaaacactgcctggctacaacacgatatccagggacagataccttccatgtacagcaagctgtggagtggcaagaaagcaaagcacgtaccaaaagcaggcaggaagcagagctggctggtaaggctctgaggttactgcaggaagcaggtgttgcctctgcctttcaccagcttcttctggagaagaacagagaaggggaaaagaagaaagatgctccagataccatctttggtggaaacagctgctagctctagcaatgatgactaagtcaattttgctaaagagcaaagaagctgtgtgtcttggattttaaacagcaatagactagcaaaataatctatgatgtgaatctgagattttacaccctagactcttttaaaatgtagtgactaaaaatatataccagtggataaatgaagtcagggatatacttgaaattttttctgccagagtagaaatgacttcaaaatatatgataatgcagctttcatgtaatcccagctactggggaggctgaggcaggagtattgcttaaacccgggaagcggaggttgcagtgagccaagatcatgccactgcactccagcctgggtgacagagtgatactctgtctcaaaaaaaaaaaaaaagataatgcagctttcaatattataagctttatgttctcacacttctaagtgataatcaaatgtgttacaccactttataccctgagatccaaaatacataaatatttgacagtttgtacaagactgtattaataagaaaatgtggcacatgtataaagaaaggaatctcacagattaaggaaaatgacattgattacaaatgtcctcagcctgagttggctgtgttgcgtttgtacacttcagccctctgagctgaagtgggagtggtttctctcctgaaaatgtttctgaggcccaaatagctgaagaggtggagacgttacagaaaccacctggagcccccagaactggcagacacctgcctgatgctgccatgggcccccagctccttggctatgtggtcctttgccttctaggagcaggtgagtcccagaacacataggcaacttttggccttattttgtaggcctcagcccaaggcatctcctaaaggcttaagcattggagatccccttcagcgctgcctctaactctgtccccttcctttacaggccccctggaagcccaagtgacccagaacccaagatacctcatcacagtgactggaaagaagttaacagtgacttgttctcagaatatgaaccatgagtatatgtcctggtatcgacaagacccagggctgggcttaaggcagatctactattcaatgaatgttgaggtgactgataagggagatgttcctgaagggtacaaagtctctcgaaaagagaagaggaatttccccctgatcctggagtcgcccagccccaaccagacctctctgtacttctgtgccagcagtttatccacagtgttgcacagccagctgctctctgcacaaaaacagagggtagctgcaagaacaaggagactcctccttcaggagacccctcaccgaccaacaggataaacttcctccatcatcccacagaagcccttccccacacgccagcctcagggactctgcaatgcagccactctgtggaaccaggggtccatcctctacctgctgtaccaatgaggtttcaaagttgggcaggacaagctcactgagttaggtctagtgccagggtacactctcccatcctttcttcttgtggagcttaaatctttaaattcaactaaactgttgcccaaactgaagactccatttacaatctaatgggtctcaacaatatttggttctgtattccaggtcctatttattctggaggttttgtcacttggaggaacaccatgtttggagttatttatgaaacccagcacctcctattttcttcctctcagcagatggtccaaatgcccaagccagagatgcaagactgatcttcactctctctctgactttctccttccacaccaaatccactaccctatcctgcatttttctaagtactaaattcctcacaaattttactaacttttctaatttcactgatctcacctggatcactttagccaccttccaagtagccaccctacctgcaagcctgcacctgctcccacccaaaaccactccctcaagcttaaaaccctttggtttatttctattaactagctaaagtctcaagtttatgttagtttgcaagtctctcagcccctccatgatgtgacctttgcatatcccccacctttctaacactgacttcccttatccttcaactaccacaactgcctgcatctactccagaaacatcccatttctcgcacatccccaaatatgtccactgctgactcactcctgggtctttatctacaatggtcactctacccagaataccatttctctctctggtattcatctgttcttccagctgctcttttgtgcagactgcagctggctgtgcagcactgtggataaactgctggtgcaaatgtacagagaggtctggactgggcgactccaggaatgggggagattctccttcatagaccaatttagaagtcacttcctccaagacgattgccttgaatcattgactggattatttctccgctgtgtgttcttctaacagcctgaacagagctaacaccaacaccgagacaccaccatgaactcaccagccattgacttctctgttctatagctttttgcctctttggaataggcatgtcatgggtgcaggtatgacgtccttgaacttggtttgctagaccctacattaagcctttttctggtggttacacatcagtatatttcctaagttctctctttttagccacaatgtccatgaatgctggtgtcactgaaatttcagtttatcaagtttcagagtcagaatataaagttctatattacaaccagaatatgttttatgaccaatatgtgctgagccagacaagaggcaggaatgaagctccaactaatctatttctcagttggtgcttggagtacaaacaaatagagagtctctaatagacctgtgtctcttgagataagactgagcatttcttttttttaatatatatatactttaagttctatttcttgcaacctccagacatccagcccttcatagacactgccagccgttaacccgaagccctgcacagccacttcctctctgaacagaaaagactgccacaaggggagagacggtcttaccttcctgagcctgcccttgccagaggaagccactgccaccgcagaagcacttaggagcctttcccacctccttgcactgagacttatggaactcttgagggccctagtctgtaaaagtccatccccggcctggcgcagttgctcatgcctgtaatcccagcactttgggaggctgaggtgggtggatcatgaggtcaggagttcgagaccagcctggccaacatggtgaaaccccatctctactaaagatacaaaaaattagtcaggcatgatggtgcacacctataatcccagccacttgggaggctgaggcaggagaattgcttgaacccaggagatggaggttgcagtgagccgagatcgcaccattgtactgcatcctgggtgacaggatgagactccgtctcaaaaaaaaaaaaaaaaatctatccccagatcacggtgcgcctgtgagacagagctgtcaatgtcctctttcccttccttctcatttgctgtttcaatagggcttcatcagcctgagttctttattagaattgacctgcatcaatccagtgcccccctcataccacctactagggaaggctgcattctacattacggtcttcagggatcctctctggggccccacatgcttccctttttgtttacctgtgtctcggggcaattttaatcttagtcttatacttttcatttaagcaggttaggctacactatacacttacagattttgccagtagaagctttgagacttcacatcttgtaaaataaaaaaaaaaaattgtactaaagataacaatgtttatggttgtgaagctttttttgtaagcaaatagtctggtgaaactgaagttcaaaggtgtttgtgttgggtagctgtgtcagtatgcttgatttatggtaaggccaagtctgttggattagatattagatattcacagtaatgtcaaaactaaggaatatagtctgaataattacaataactattttatattattgcaaacaacttaaaaactattgtgacttgattgattcatactatgcatggatacagtttcaaaacctgtttagaccatcagaaagttttaatgaataatgttagcaaaataaccacaagtaaagtgttaccggaaaatgcagtataagcatcacactgacagttgtagctgacccttttgttttgatcagtggttctcgatgtgtaccaaaattacttggtgagatttctttttattgtgggaataacacttagcatgaaatctaacctttaaacaaaactaatgtgcaatatgatattgttaactctaggtacaatgttgcatagcagatttctagaatgtaattatcttgtataattgaaactttacaccaattgaatggcagctcagttcttccttctcccattttcctggcaattatcattctgttctctgcttctctgtgtttgacataatgctaagtgaaatgagccagtcacacaaggacaaatctttcattgaaggagtcttttatcaccaaaagtatttagaattcctggcacttggtgataataaaagcaaaaccatttcacttgggttttatgattgttttaaaatgctttgcaccctttatcgcttgcacctggggctgaacacacctaccaccccattattgatataccaccatctccccaaccccatcaggtaaacctacacatgtgagcactcacatgaacctacacatgtggatttgaaccagattcaaacccaggcagcatagttccaaagcctgccctattacccaatatgctacttgtagtaattattaagtatattgtatgagaaactaagactgctctcaataaaatatatgttgagagtgaggagagacagacagagagagagagagagagagaaaatggtaaggttttcctaatcacagttggtcaggaaaaaaattaccttcactttcaaagactgagactcaccagaaggactcatgggactcggcgtgtccttgtactcatagcaaagatgtatcacaaatatgtagtaagaatactatgatcacaaggaacaaagacatggtggactttggagaaatccatgtgagacttccttatgttctcttccatgagagagcacactctcaccccaacaatgaaaatgcagcaacgtgagaacaacctttctgcccagggaagctcattagagactcagcacctccaatactttcagtggctggtgttaggtgctgaatcgtgtcattaaacattcatatgttgaaatcccagcctccagtactaagaatatgactatgtttggagataaggattttacagaggtggttaaggttaaatgaggtcctcactaatatgactgggatccttataagaagaaattaggacacaaacatgcatagagggaagacaatgtgcagacacagggggaagccatctacaagccaaggagcgaggctccacgagaaaccaaccatgctgacaccccgatcttggatgtctagtctccagatgtatgagaaaatacatttctgttgcttaaatgacctagtctgtggtgacttatggcagccctcgcaaaataattcagctgatcacattggcaccctctgcctatcatgcagcataattccagacttgacgtaaagcaagtgttcagcctaacccacgtggtttgtgcaagcagtctagacacactaagccatgcttaccagttactatagtgggaacactcccaaaattcaagttcgcagatgcaaatcaagagccaaccatgcaagcagtcccttctaaggccagcagtctcaggcccgctgtgtcaactcttttctatacgtgcacatacacacagtgacacttccatgagcacaagggatgtccttcactctctagcacctctagaccctttctagtctagacaatggctgagggattatgagagtgggccgggacaatgacatcacagaccatcaacccactgcctggtcctgggagaagacctattctttcttcaaagcagccatgggaatcaggctcctctgtcgtgtggccttttgtttcctggctgtaggtgagtcctgggagttgctgggtctggggagttggtggcaacccctgtcctactattttgaggtcttttataccaagctcttttctcctctcctccttgatggcctgtttttcacccttgctttctgtctctcacaggcctcgtagatgtgaaagtaacccagagctcgagatatctagtcaaaaggacgggagagaaagtttttctggaatgtgtccaggatatggaccatgaaaatatgttctggtatcgacaagacccaggtctggggctacggctgatctatttctcatatgatgttaaaatgaaagaaaaaggagatattcctgaggggtacagtgtctctagagagaagaaggagcgcttctccctgattctggagtccgccagcaccaaccagacatctatgtacctctgtgccagcagtttatgcacagcgcagcacagctgcatcctctctgcacaaaaagagcggacgtaagagagaaggggccctaactcagggctggtgctggctccgatggcacattcgtgctaaatagaaaaaaagcggccactaaggagaaactagctccataagcacacttctttgcaaggagagaatgaggtattatttttcacccctttacaagtcagggactgttctggatttaattcccccagtccgatgtgttgtaaattcacaagtcccaacaaggaggaaaagtcctctcgcatattcacagtgtaaccctgttctaccatttcgttaatcaattttaccttcccttttctatcctcgtctctcttaactgtgcattttctactttgcttagtgttttgctcttggttgacatttcactagaggacattaacatattctaaattctttcgatgatttttactgtgcctgtgctgattcaagagaaagtttgtggaatttgaattttgttcattcaatttagaaagagaaaaactctgattaaaacaaattcttccaggttctccgatcaatcatattttgctggaaaaaattctgatcacagaaggtttaaactctgctgcagaaggtggtaggaatttggttataactgaactcacaatcttctggaaaaagtgtgtatttgtctgtctttaagaataaaacatatgctcttctgtcagtaaaaattaacagtgctttggaaatacaaataaatgtaaagggtattagaaatcccaaactgcagagcacttgcacaattattattggcaagacaaaacaggcatctgaaaacgtattttgattcagtgctaaatttttgtgtggaagaagtcagagaaaaaaattgaatgaatgtgtatcacaatattcaagattaagtttgtgtgagataggacttgagctgattttgaatacaagtaaatgagggaagagaaaccatcaaaaggaagaaataccctgcaaatgtttctgtgagagagtctaccagaaggaagaggaagattctttccctgaggaaagacaggaatcacaattctcctggctgaggtcaacatccagaacagagaaagcacatcttcccagaatatcattaaaatcctttcccttttgcgccgagaatacatgctagcggtgcttgcggctgcagcgtttcccctgagataacacacaaggtttgatacaagaaattctttctccaccttctaaacattacagtgcttaactcctacatcctgttcaagaaggagaattctgagcacacggtttgccatagaaacttcagactgacattgattaaaaggatgctgaaaaagcatcgtgagccagggcagcaacgtctctggggtcgtccacgctctgatgatgtcacacctcttggcccacctggaagacattttcccaacagcattaccaccatcaaagaaacaaaacccaactggtcactgcacttttgctgctcacacaatgacgaggatggcaagatctatagagaacggcaatatttttgtgcggaatgtgatgtttcactttctgttgttccgtgctttgaaattttcccacacgaaaaaattatctaatagtgattattatatacatttctgtgatgttaggattagaggccagttctgtttagaaataattccaagaacagtttttatattttattttcatgttgataatcagtcaaatttgcttcagcctcaaagagcatgtttatgtcaaattaaatgaatgctggcagcgagctgcactttttttactaaacaggaaaagggttaaataacagaacactgtatctacagattttcatattcagtgaaacttcaggttttctgagagtcctacattttcccacagattatttatttcttatagcaagtattgcccagactcagaagatcaactgcaagagatgggaacaggtaccagcactttgcgtccattcccagggctatgtgggaccatttccaacacaggggtcatcacctcaattgagtccctggtagaaagagtgctatgccagactcagcttcccttctggcatggttaccacctgctccctccaacacagcctcaccttgctaagaaaatgcagcccagggagagaggaagaacacataaaaaaatgaaaatgaaaataggcagagatggagtatcaaacatcaaagtgagtaacagaagacatctaaagaggtcaaaaggattgtagattgggataggaggtttgaatttagaaaaaaaatgaaaaagtgttcacgggggagttcacagtttacagaatagactttttttttcttcttcttttgaaatggagtctcgctctgttgctgaggctggagtgcagtggcacaatcttggctaattgcaacctacacctcccaggttcaagtgattctcctgcctcagcctcccgaatagctgggattacaggcgcacgccaccatgcctggctaatttttgttatttttagcagaaatgagttttcattatgttggtcaggccggtctcgaacgcctgacctcttgatctgcccaccttggcctcacaaagtgctgggattacaggtataagctaccacgcctgacccacataatagacttttaaaggcacataatagatcatggatgtttaccatgagggtacagagaataattcagaaaatgtaaaccattatttcactaaacatacataaacatacatcacattaggagaccaacaaattcacagaacataaaaattgatactctaaatctccaagtaagcaatgtttgtttatctatttatttatttatttatttattttgttttactttaagttcagggatagatgtgcagaatgtgcaggtttgttacataggtatacatgtgccatggtggtttgctgcatctatcaacctgtcatctaggttttaagccctataagcattagctgtttgtcctgatgctctccctcccctcgcccccgacccccaacaggccctagtgtgtgttgtttccctccctgtgtccacatgttatcactgttaaactcccatttatgagtgagaacatgcggtatttggttttctgctcccatgttagtttgctgaggataatggcttccagcttcatccatgtccctggaaaggacatgatctcattcctttttatggctgcatagtattccatggggtatacatgccacattttcttcatccagtctatcattgataggcatttgggttggttctatgtcttttaagcaatgttttaaattatgtgatttgggaaaatataacaaaataaattattttttgttgaatgggagtattaacagggctctttgatgggacatggctgggaagatgtctggcctcttcctgcagggaacaaggaaaatttagagaaggaggcaatttttttttctctagagtccactgagatatcacaggtagtttatacatataaaatacagcagccctgacatacagatattattttctcctaattaaaaataaatttaaataagtgaagtgtaattaaacctaaatttaaatgacttgcctataacctcacagctgaaaagttagtggaaaggcatgtttctatattgttttttaaataataagataattgaatccaagataggtatatttccatcttcagctgaatgggtcccaagaccaaccattaggtgaaagacgtaatccacacagccagggaattctaccttctacctttgtaacagcaagatagccatagcaccaaagacatttttaatgtcttagcacaagcttctaacacctccattttgaagtagaaggatgaaggcttgagagcagaaactggatcttgttagtgatggacaagtggacatagtcatattaattgtgcgttttacaagattctttgataatcactattaaaccagctgtagatacactgtatcatcatttatctcccatgtcaccatcatatcataagattaacattgatgactttgaaaatttgctgctaaaattaaattatctcaattttccagtatcctcctaactgacctagccaattttgtatggcttgaaaaattgggaagtcttctcatctgtgctagatcttcttcaattaatttcaattcattaaaacagaaatagcaagaaactaagagtcaatggggtttcttcatcccatcattccctataaagggcagtgacaagcacctagatgtaacatagatttcttctgccctctgttgagggcatcagaactggctcagttcactcagacatcggtggcagaaagttgagggagatttcctttatgcttaagccttcagtagaataaactggtacctgttctatccaatggatgctgtcttatttaacttgggacactgaaggggtactattcactaatgaaaacattaaaaagcagaccataagatattttaaagaaagagaaaacataatgaaggatgtataatcattacatagtgtatcagtctgttttcacactgatgataaagacatacccgagactgggaagaaaaagaggtttaattggacctaagagttccacatggctggggagggttcagaatcatggcaggaggtgaaaggcacttcttacatggtggcagcaagagaaaaatcagaaagaagcaaaagcagaaacccctgagaaacccatcatatctcgcgagacttattcactatcatgagaatagctcaggaaagactggcccccatgattcaattacctccccctgggtccctcccacaacacatggaattctgggagatacaattcaagtagagatttgggtggatacacagccaaaccatatccttctgcctcagtcccctccaaatctgatgtcctcacatttcaaaaccaatcatgccttcccaacagtcccccaaagtcttaattcgtttcagcaattacccaaaagtccacagtccaaagtctcatctgagacaaggcaaatcccttccacctatgagcctgcaaaataagctagttacttcctagacacaatggggatacagggattagataaatacagccattccaaatgggagaaattggccaaaacaaaggggttacaagtccccatgaaagtctgaaatccagtggggcagccaaattttgaagctccaaaacgatctcctttgactccaggtctgacatccaggtcatgctggggcaaggggtgggttcccatggtcttgggcagctccactcctgtggctttgcagagtacagtctccctcccggctgctttcacaggctggcattgagtgcatgtggcttttccaagtacacagcacaagttgttggtggatctaccattctggggtctggaggacggtggccctcttctcacagctccactaggccgtacccaggtagggaatttgtgtgggggctccaaacccacatttcccttctgtgctgccctagcagaggttctccatgagagccccacccctgcagcaaattttgcctgggcatccaggccttctcatacatcttctaaaatctaggtggaggttcccaaacctcaattcttgacttctgtgcacctacaggctcaacaccacataaaaggtgccaaggcctccaccctctgaagacacaacctgagctctatgttggcccctttcatctatggctggagtggctgggacacaggacaccaagtccctaggctgcacatggcatggggaccctgggcctggcccattaaaccagtttttcatcctggacctccaggcctgtaatgggaggggctgccatgaaggtctctgacacggcctggagacattttcccatggttttggggattaacattaggcttcttgtgcaaatttctacagctgtcttgaatttctcctcagaaaatggttttttttccactgcattgtcaggctacgaattttataaacttttatgttctgtttcctttttaaaatggaatgcttttaatagcacccgagtcaccttttgaacactttgctgcttagaaatttcttctgccagatacgctaaatcatctctctcaagttcaaagttccataaatctctagggtggggagaaaatgccatctgtctcttttctaaaacataacaagagtcacctttgctccagttcccaacaatttcctcatctccatctgaaaccacctcagcctggaccttattgttcatatcactatcagcatttttgtcaaaggcattcaacaagtctctaggaagttccaagctttcccacattttcctgtcttcttctgagtcctccaaactgttccaatctctgcctgttacccacttgcaaagttgctttcacattttcgggtatcttttcagcaacaccccactctactgataccaattttctgtattagtccattttcatgctgctgataaagacatacctgtgactgggaagaaaaagtttaattggacttacagttccacagggctgcggaggcctcagaatcatggcgggaggcaaaaggcacttcttacatggtggtggcaagagaaaaaagagaaagaagcaaaagtggaaacccctgataaaaccatcggatcttatgagacttactatcataggaatagcacaggaaagaccggcccccatgattcaattacctccctgtgggtccctcccacagtgcatgggaattctaggagatacaattcaaacagagatttggatggggacacagctaaaccatatcacatagtatatattgaaaatgtattgtcaagtatcttggatgagatacacattgccagataccatacagttacctgcctaagaaaataagccaataattatagtctattaatggtaacattagacagacaaatgcttacatggtaatgccagagcccatggtttgagatgctctgacatgtgatgggtctcatacatcactttcttgtctaaaaatagtagctaagtgttctgaaaccttgccctcaatgaactcatatttcttaattattgccattctgctttacaaatgctcaaaaatctgcatatttaatattcagttatgaatatattttatgcatgtgtagggtggcaggataagaagagggatgatgttaaatttactaacttataatttctaggtgtagaactattgcttgcccatatctgaatattaaagctatatttgtccttctttgaattttgattatactgtctcttccattttatttattaaaaattatgaccagagagagtgtgtgtagttgatacccaaagcagaaaatcaagttatagatgactagtttataaattaaacagaaatcccttactctcacccttcacagaccatctaagcaatacatcaaatgctagtagccaacattcttctttttgacaggaaactagaagtttattctaagaaactaaataagaagatctcaagccttggaattacatggcatatcaagagtgatatgagatgcagggctaaagacaaagagaataattgatatataaatatatagtctcatatagtcaattatccagtttctcttgttgagaactgttaatgatatgagattttaccatacttgcaagctaagagcttgacaacattccatggatgctagcagaagacaagagactgctggattacagacaaagtatttttaatactctcaacacagcaggcagcatgagcttcatatgtctataagtgacctgtgcctgcccctctgcccagttccccaacagtgacacagagcagtttctggatgctgtggcttttcccaaacctcatcaatctttgtctcatgggggtacattgtgtttattatcctggatagcaaacagatccagagggagatgttgtctctgtcttccaggttgattgctatacaaacattcttgacaagatagtccaaatgaaaagttgatataagttgtgcagaaatgtcagagacccatgaagaattaactctcaacacctctccactgcctttggcacagaacaagtaggtaactatacccacagtagcataataatatatttttatttgaagaaattgagcagcccctgaaaagagacttacaaatactgatatttcagtgtcccttacgaaacaaccagttccccgccaaatctcttcaagtaaaatctcctagcaaacaagtaccatccatattaccaggctttcagtcaggtttttagtgctttactcttaaaaatcaatatacaatcaaagatcactagtatacaaagtttctaacatagatagaaaggaaaaggatacagacattaaaagaaagaagagaaaaagaaaataaaaaacaagaaacagaaaaaggaaatgaaattaaataaatagtgggaacaaagaaaattgactcaagcatataaaataaagaaaaaaagtggacttctaagtagtaatcatgtaaattcttgtttctatcccagacagatataagaaacacatcgtccttaaaacagaataagataaaggggagaaactttaagaaagtcaaaataaatttttaaaataagagtcaaaagaaaactcgatataacatcccagaaaatagaacaaaaagttcaagaagttaaataacagaaaacatgaaagaaaatataagtgacttgaagggtgaacaaaggagagtcaactgtccaagagaaactccagaaaaaagaaaaaaaaaatttttaattatcagagaaattataccctaaaaattagttcccagaaatgaaaaaaaattagcctccatattttaaaatgcctgctgttggctaattaatgtcagacaactgaaatgaaggcatatcttcatgatttcagaacactggggattaaatgattctaaaccacaaaaagacaaagaaaatgttaaaaatcaaaattatacttagagaaaagtgataaataaatgcaaaagtggaatgacatcacatttctacacagcaacgctgaattccagaaaaaaaggtgcaagaaatatcaataaaattctgatagaaaatcattttaatcttagatttctctactaacccaatatatcaataaaatgcaaataaaaagacatttttaataatgttaggatccaaaacatttacctccatctcaagctttcttaggaaattactggctagtatgtctcagcaaactgagaaaacaaaccaaaaagaaaaaaaaaatggggtccaggaaatagaaattctcattcagaataataagaaagaaaagtgccaggataaaagctgggcagtggaactaattagcaactagcccagactaaagcagagggactccagggttgcattttcaaatagtgccaaaacgtagactatggatctattaaatgatacatctgagtaactcatccacaattttgtagtatcagtttgcatggcctgtcaaaaatccagatccatcctggagaaggtgatcccattaaaaagaatccagattattcagcaatatcaaatataggtagaaaccaaaagacaaaaatctgctgatttttcaaaccattaaaaagattgatgcagttctggtaatggcatcataattcttataagacccacgctcccacaaataacaaatataaactcaggacgaacatttttaaagcctatcttaagggacagcaaagcaaccaatagccagtagaaactacagggaagtcaacacttggatgacaggtaagttttctgtttttgtagctttttgctggaaagtagttcccagtcaaatagaaacccattaaaaagccagctgtagagttaggaaagacatccaagaagggaaagtccaaaaaagaacaacccaatgttctccatacaaactctgtttgaatctctggttgatgcctaaactatgcatgtgagaggaatactggaatcagcagtgttaaacctaacataactggatagagatttcagctgttgccggctataggaaacagaatttgaagtataaatccaaccaagttaaatgcctgttaaaacaaaaatccaaccatcgttagaaggataaaacaaaatctagatatattgttgacaatgtccaagatacaacgcaaaaattaccaggcatatgaagaaaagaaatcacatgacctaatttgaatgaagaggccattagtggatacaaactttgagtttacctggatgctggaattactagactgaaatttaaagtagctattataatcatgtttaaggatataaaagaaaatgttcttataatgaataaaataggaacgtttataacaataatgaaacctattaaaaataaatgaaaaatttaaaatttaaactgcaatatttgaaaattaaataaaatctcactaaacgaaatctctagcagattagagatgacggaagaaagattcagaaacttgatgttatatccatagaaattacaaaatctagaaaacaggagaaaaaatatgaaaaaatagcctcagtgatctttagaaaaatatcaaaaggtacaaaatgtgtgaaattggagtaaaagtgaaagaagaggagatataaaaaagcatggataaaaaacaatatttttttaaaaaagcctaattaaaaagtatattgaaagacataaaaagaatttcagaaaaataatttgtagaacacctacctaggcacatcacagtcaaattgtccaaaactagaaaagaagacaaaatcttcaaacagccagagaaaaatcatacataccaggaacaatgacatgaataatgataatttttcattttaaaaaagtgaataccagaagagaagggaactgtagctttaaagtgctacaagaaatataaaaagtcaacccagaatttgatataaaatattcagctaaaaattaaaatactacagtaaagttatctgaatataaataaaaattaaaatatccattgacagtagaactacatgatagtaaatcgcaatggaattctcttaggtaaaaaagaaataataccagttggaagcttggattgtgaggaagaaatgaagagcacaagaagtagtgaaatgcagtcagatattaaagagtcttaaaaattctatatcatatgtaagactagctaaagtaaaaatttcatcattgtattataggatatataaaatatatataatacagaatgacactaaaatctaaaggatggaaataggaaaaacagatctattagatacaaatttcttatattttaagtaaacttctacaatatagtaagtagacaaatagttttaaatgtatcattctttattttccagaatagccctgaaaatattagaggtatagcaaaaagccaacaaataaaaatcaaaacagaatctaaaaatattattcaaatatttaaatagagtcaattctaggagaaagtttggtataatattaaaaaatcaatcaatgtaattcatcttgttaacacatttttaaaaatctatttgattatacgtacagatagaaaaaacttggtaaaattccaaactcatttataataaaaacactcagaaaattaggtaaaaaagggacttcttcaatctaacaaaggcacctgaaaaaaaccaacagcttatgtcacacttaatgacagaaatattaaacgtcttcccatttttatttcttaaatattaaacatgttcaagatcataaacaagtcaataatgttcacccttaccacttctattccatattgtactgatgcataaagacaagaaaaatactaaaaagctaggtatcaaaagataaagaaaacctttttcagagatgaaaggactacttacatgcaaatattaaaagaaatctatatattaactactcaaattagtaagttcatacattaatttattattacaacatataaaaattatattttgtatactaatgataaacaattggataattgaattttaaaacctgaatttatattaaaaaacataaaatatttaaatttagcaaaagacatgcaagacttgtgtacagaaaactaaaaacagttgctaaaggaaatgaaagacagttttaaaatatagaaatagaaataatgtcctgttgcagcctctgcctcaggagtcccctgcagcctggaacacctagcaaaagaaatgcaggtgcagtgccagggattggagctggatccccacaagtcctagaagcaaaccttgtgagggggccatctgtctccccgacccacctcagagcatgcctgtgaacaagaaagtacgagagccacacaagctgggtgttagcctagctaccggccgttactcttaagcgcatctactggatcacagcacaaactacaacactaaaattaccgtgctaatatatgcaggatgtgaaaccaggtgcaagaattcacccacatatgcggattctgtacagagccctggccctccgaaagcatccagaaatgaagccaactgaccacactcagcttacaccacagttaagggaacaccaaccctaccagatgagaaagaatcagcacaagaactctggcaattcaaaaaaaccacagcatctccttacatccaaatgggtcactagctccctagaaatggttcttaaccggtctgaaatggctgaaatgacaaacacaaaattcagaatctggatagaaaggaagctcattgagattcagaagaaagttgaaactcaatccaaggaatccaagtaacccagtaaaatgatccaagaactgaaagatgaaatagccattttgagaaagaatcaaaataaacttctagagctcaaaaatttactacaagaatttaataatgcaataagaagtattaacagcagaatacaccaagctgaggaaagaatctcagagcttgaagaccagttctttgaatcaacttagatgaaaataaagaaaaaagaattttaaaaaatgaacaaaactggccaggcacggtggctcacacctgtaatcccagccctttgggaggccaaggctggtggatcacgagttcgggagatcgagaccatcctggctaacacggtgaaaccccgtctctattaagaatataaaaaaattagctgggcatggtggcgggcacctatagtcccagctactcaggaggctgaggcaggagaatggcatgaacctgggaggcggagcttgcagtgagccgagatagtgccactgcactccagcctgggtgacagagcgagactccatctcaaaaaaaaaaaaaaaataaggaaataagaaatatagggttatgtaaagataccaaatctatgcctcatcggcattcccaaaataggagaaagagtaagcaatttcaaaaatatatttgaaaaatatatttttcaaaaatataaataatgcctaatataaatataaataatgccaaaaatcgcctaatcttgctagagaggttgaaattcaattccaagaaatacagagaaccctggctagttactatatgagacaactatccccaagacacatagtcatcagattcaccaaggtcaaggtaaaataaaaaaaattctaaaggcagctagagtgaagggtcaagtcacatacagaggaaaccccatcaggctagccacagacttctcagcagaaaacttataagccagaagagattgggagactattttcagcatcctgaaaaaaattcaactaaaaatgttatatcctgccaaactaagcttcataaatgaaggagaaataaaatccttcttagacaagcaaatctgaggaaatttgttttaagtagaccatccttacaaaaggtccttaaggtagtgctaaatatggaatctaaagaacctgctgccataaaacacttgaatgcatagcccacaggcaccacaaagcaactacgctatcaaatttacataacaaccagctaacaacatgggtatgagatcaaaatcacacacatcaatactaatcttgaatataaatgggctaaacatctgcttaaaagacattgagtggcaaactagataaaaacacaagacccagccatcattgccttcaagagacccatctcacatgtaacaacacccacaggctcaaaacaaagagaggggaaaatatctatcatgcaaatgaaaaacaaaaaaggacaggagttgctattcttatatcagataaaacaaacattaaacaatgaagggcattactataatgataaagagtacaatccaacaagaagaactaacaatgctaaatatatatgcatccaacattagaacacccatatccataaaacaagctcttcttggcctatgtaaagatttaaacaaccaaacaataatagtaggaaacttcaacaccctactgacagtgttagacagatcactgggcagaaaactaacaaagaaatgctgggcttaaactcaacatttaaccagttgaaactaatagacaaatacagaacactccacccaaaaggaatgcttatacactgttggtggaaacgtaaattagttcaggcactgaggaaagcagttggagatttctcaaataatttaaaacagagctaccattccacctagcaatcccattattgaagatatatccaaaggaaactagatcattataccaaaatgcactcatatgttcatcaccatgcaattcacaatagcaaagacatggaatcaaccgaggttcccatcaacgatggattggatgaagaaaacatatacaccatggaataccacacaggcctaaaaaagaatgaaatcaagttgtttgcagcaacataaatagagctgaaggccgtagtcctaagtaaattaatgcaggaacagaaaaccaaatactacatgttctcacttacaagtgggaactaaacattgagcgcacatgaacacaaacatgggaatgattgacactgagcactactcaaggggaagagagagggaggttgacacgggttgaaaaactacctattgggtactatgttcactatctgggtgcagtatacccgtgtaacaaaccttcatatgtaccccctgtatctaaaataaaagtgagaattttaaaaagactaaatatgttaaaaccagtactctctaaattttatctacagtcattaaaatctcaattgttatctcaactgtttttgttttctaagaaactgagaagctgattctagaaggtatatgaacacacaaagaatttatgggaagtcccgctcctggttagaagcctatgtatgatgtttcaggccatagataattaattacaaaggctttacctggctggtttacagggtgtggagaggctgttctgcccaccccagacttggtgcacagccaatgcattgcagtctttgaagggagttgcagtcaaggaccccctggctggtcacgcccttgtgcatatttatattgccagctcaggatccttcattcttaggtctctttttctgaggcctatgtagaggtcttcttcaggtgcctctgtcaaggcctcctaataggagaggaagagagagccttaaagacacttttctccactctgagtacccagtgagtttccactttctccttgcagggctccccaacagtgagacaactccatgtctgtgctaatccaactaacacttgaccagtgccatttccacagggaaaaacagaacagggggagtcagtaatttctctggctttagactcttgcttacactattgaaggaggtaattaaagatttaactctttcctttggggcttgttgctttaattggctcactacctggatgcaatatacccatgtaacaaacctgcatgtgtaccccctgtatctaaataaaagttgaaattttaaaaagaataaatatgttaaaatgagtacctaagtcctcagcactctttttcagctatgctgagctcctgacactctagaatattcaaaacaatatttagaaagaacacatttggagtcctttcactgtctgaccaagacttactataaacccacaataatcaaagtaatgtggtactggcaaaagggcagacaaataaaagatacacattaaaaccacaatgagatactgctaaccatccacatacccactcaagttaaaccacctggcaacaccaaatgctggcaaaaatttggagtcccagaactcacatatattgttgatgaaagtggataatagtacaaccaatgtggaaaatgttctaatagtttcttataaaactaaacccctctgatcatctacccctatgagccagcaattatactcctaagtatttacttaagagaaataaaggcataaatctacaaaaaaagacttaaactggaatgtttacagaaagtgaattcatcattgccaaaacctggagatatcttgaacgtccatctacaggaggctggctaaacaaacggtagtatatctatatggttacatattccactgccacaaaaaggaatgaagtactgatacacacaacttgaacaaatcttaaaaatattattctgggtgaaagaagtaaacaaatcttaaaaccattattctgggtgaaagaaactttgcacagaagagcgtatgatgttattccatttatataaaattctagaaaagaataatttataatgaaaaaatcagaacactaattgcctctaaggagttagcagtgggaaaaactaaaggcatgagaaaactttggagataatggtaatattctacaatttggtaggttacacagtgtatgcatttgtcaaaacttgtttaacggtattcaagatttgtgtgtggtgctgtatgcaaattttacctgaaaaacaccttgaactccagttaattatacacgtgctgaactgcttagaagtgaagtatgcctccaactgacttttcaatgaattaaaaaattagatggattgatggatgaatagaaggatggatagatggatagttatgtggtaaagcagtaacagttttatccagaacctaggcggtgggtacatgcatgttcactgtataatagtttcagcttctatagatgtttgaaaattctcataataaaatggaaaataatggcatgattctgtgtattttttaataaaatcaactttgaaatatgctgataagaaccacattgctaattaaagaagtgaagtacaggaaggtttgggctgtgtgtttctgtgtaaaagaaggaggagtcagatttacataaacttgaacaagcaagaactattatttctaagaacatgtagcaaaataattacaagactgtctctggagaaggaacttaccttttgttctctgttataattgaatcattaaccaggtgcatgtattaattcaataaataaacacattaaaattcaatgagagtttagtatccataacattccccgagagaaaaatctagagaccactgcagtttgaaaagcatgaaaagggagaggaatatgtttgctgttttttgttttttgttttccaaacaaagagaatactgatgaagaagcaaagatttggaatttagtaaagaatagggatcatttgttaattttcagaagcttttaggataaataaaatgaaaaagatgctgggttattttggcatagagtttgatacacttgactaaaagatttaaaaatatacctacatgtcaagaaaaactgaagtattctataccttttactacttctacttagcagagtttatcttgagccactgtccgtggcatgtccaataagttgtaaaggcttcacacacactcctcatatgaacaagttgctgaaatattgttaaagtgtcacattttgtccattataaggtaaattgtttttcacaattctattttctttgaaatacgggtaagtcctataatcaatcttcacctttaatgtggtagtactaaacaccacccaaaagtaacaattagatatttaatagaacatcttataatagagagaatctcagaatcaaataaataagatgggttagtttttgcaagcctgtctttctggagtttcctagtattctttagagtgttaggcctatcattctcagttacccaccagactgtactttactaaggcacaggcaactgcaagagtcagacaatacttgatagtgttgatattgacacttgagatttgtgatcgcataggcattgatttgagtcctgactctgttacttactcttggattatatgaacttggataggttatttaaggtctctaggtcttatctgtaaaatttcctaatccgtaaaaatagtgtgatgataataaatagcctagccaaaaaaatagacttaaataaatgtatgaaaagtagagtaagtgctcaaaaacttagctctgcttttatgcaaaaatgaactattttaagcagttacatgatacgagaaatcagcttgataatggaaaaagatcataccattgtggtcaagttttacacaaacatgatctgtttcgtggcctagactgagttgaattagaatagaagaaaccatattacaagtattcaggaattaagcaaagacaaaaaaaaatagttatgactgtgataactgaaacaagggaagagatataagagacaatgcatttaatttgtgaattgacaaataaggtaggtgaggaaaaaagaggcttatggaattcttgaacctaacatgcaagaagagcagggatgccatttgttgggagaggggaattgaggaataagagcccgtttattggtgtgtgtacgtgttgggggaggaaggagttcagtttgggacaaccatgaagacccagcagacagctgaaatactgtaatgaagttcccttatattctaacatattacttttagttctttgaagtcaattctgcaccccactttttgctctacacccagacagtagcacagattggtgttcagtaatgacagatggaaaagtgatgggagaatggtggtgagtggctggtgcatgctgtgagacttgtgcatgaagactcatcctgagtgaagagccacacggttccaccagggggaagactgatttttgcatatcatgcagaaactcaaccacctgttagaggagggaaacagagtgggaaggaactacgctgtaggaaggaaagatgaacttgagtttcacttcttagtgccttttctcaggggagaggccatcacttgaagatgctgagtcttctgctccttctcctgggactaggtatgagccttgtcttttgaggagtctggggttaatgttaacactgggtggaaagactttctctccagagagtctgaagccaccagacagaagatgaaggggatatgttagattaaagaaccataacagagtaattgttggcacaataaaaaggaggcagttccctggggtcctttgggagctgaggtggtattggagagataaagcagagaccttcctgcctggggagatgtctgaccccaagcttgtcggtcctcatgaatatctctctggaactaggctctgtgttcagtgctgtcatctctcaaaagccaagcagggatatctgtcaacgtggaacctccctgacgatccagtgtcaagtcgatagccaagtcaccatgatgttctggtaccgtcagcaacctggacagagcctgacactgatcgcaactgcaaatcagggctctgaggccacatatgagagtggatttgtcattgacaagtttcccatcagccgcccaaacctaacattctcaactctgactgtgagcaacatgagccctgaagacagcagcatatatctctgcagcgttgaagacacagtgcggggcacagatcaaagatctgagcaagaacctcagctctctcctacccagctcctctcacacgagcctgaaggccctgccaaggtgggacagaaggaggaaaccacagcttttgggcagacacagctgtttctgtgtttgtgggtgggcatgggtatgaatggatagactggggatgaggagagcatctgtaggactagctggagcgttctatccacaggcaggaagagtggctcctggaaagctgagggtaaaatttcttctagaagggtgctcagaaatacccaataaaaacaatcagatacagtttccttcaagtggcggggtcagtaatagcctttaactgttttatctcaaggctctttttagctggttttctatcataatatattttggaagaactttagtcatcttgaaacaaagctggtacattatattaatgacatctggttgttctcagtgaataggaatgataaagccctctagatgcttcaatatgacaatatgacacatgcatcccaggccaatataaaatctgcaaagttcaggaactttctatactggtgagttttggagtggtccagatgtaagaagtaagctgctgcaccttagatcatgtaccacggagaaagaggtgcaatgcttagtctttggactttgaattaaactttggatatactgcatttgattgtgctactctatcccatttactatgtaatctgtaaagctggggccagtgcaagagagggttctgtggcagaagaagcccatgatgaaagcttcctgctgcttgggccatggactaagcagacccagttgttcttgaagagcctatggtagatactgatgccctgtggagctcctgacattccccaatacgagaatcacaaggcagtgtggaacaggtttgctgtgccctgatttgcacttcagaccattgcatcttgggctatacttttgttgctttccagatcccagagagaaagaatgctcacacacacaaattacatgaggagtgtttattacttacatacaggcagcaagggaaaacagaggcctaagattcagggaaagccagtcccactaggctcaggaaagctgcccagggtggatgaaatcttgtctgtgccttccctacttgcactgccactgagggacctcagagagcagccaccctgggttttatatcttagagcaacttgacatgcttggcaaagcattgaaggacattctatttctagaagggactggaacagagccctggctgttctggccagttcctccttatctcaggatgttacagtcccagaacattgtacagttatttttgagaactacaagcaagaaataggggagtactgagtttgtccaaggccacctggagaattgccctgcagacaggtgcagagttttggtgtaaagccatactcttaccggccaacgatcccctttcttttgaaaagttgctcctggctctataatggatgcctcataatggcattcagaacaaggtattatctgatctgcaaaactgtaaatttggctgtgcccagagcattctgttattaaatggaaaatacataatcaagaccatacttaagcacagctggaaaaaggcacgattcaatttcaagagcacatctcagagtctcatgctacccactcatacttttctcctcttaccttcaaaccacacccaagtttcatggaaattccatatttccagttgagaaacatgagcttatttttttgatgggtcttcacattattctggaaggatcattacagtctaaccaagtatggttctgaaaggtagtggtgaagggaaatcttctcggggccaaaacttaaattggtatacctgattgttgtccacattttattgaagaagagatggccagaagtatagctatatcttatgttcaattttctttcatactatcatctagtctccttacctattcagtcatatttttcttctttttgcttctctatgctacaatctgggtaatttctttaaaactactgtttagtttactaattcacacctcagctccagtaagcctctaatttaatctttcaactgactttgttcatctaaattatattaatttttatttctagaaaatccacttgggtcatttacaaatatgagtggacatttttgaaagcatcttgttccttgtgtattttaaaattattttctttttataagtatattaagcatctactgggaattattatctgacaatgccagcatttgatgcctttttgcatctggctttcagtggtctgctggctctcactcagggtagcctatttccttgtacattatgtaagttaatgtgaattcatctttcagaattctttaaatactggagtaaaagtgggttttctaggaaaattcatgtttgcctctgtcaagaaattggggcgctacagacctaatatcattttattttataattctcagtatatatcttcttggtcatagaatgtctatctcaaaccccaatgggctgactgttcagtgaccatgaatattcagaggaaattttttaaaatccttcacccaaagccaagaccaagacaaataatattctttgttaattgcttctaggattagttttctagctcatcctttcactaactgtgtatctctttgtgtacctcactttaaaaagcagtgattcctgtctagtttctggtccatgtaaggtctcatgggccttctccagtttccatgtgtactaattctccaggtcacaggaatgcacatgtatacctgttttatctcatgggctcagtgctagcttaccttcctggcccatgctcccattaccataggaagttgacaaatttacctacagtgaagccttggattatgaagcaccttcctatattacaaaattgcctctttaaaagcagtaaagcactgtggttaggaacttgaactttgtcaagtgacagacctaagtttaaaacttggttcttctgctttaacactaggtgtaaccttaacaagttacacaatttctccatgccttaatttctccatagaaaataagaataatagtgagtttttaaatgtaggttttttaaaataagaaagtgatacaattatctgtataaaaagcacatagagacaaaatatgcaattagtgtagttgctacctaaacgtatttctcactataaaaacatattttaccactggcaattccttcctcaagaataagtatggccctctctcagaaaattttatcattacaattgtttctcttttagctattttaattaaataaaaaatttgtggtattataaaatatgcatattatcaaaataaaaaagtcaaaatcactcagtttaataaaattagatcatacaatatgtagttttagaatttattcccttaacccaacaatatttcatgaatatcatttcatgtcaaaaatattttacattaactttaataagaatagttcgatatactgatgaccatccttcatacaatcaaaacccatgacaaggtatatatccataggctagatgacagggttatttaattttaaatagcaattgtttgtgtgcgttgaattatttctgttgcagactcagaaggaaatcatgaaagccctaagtctacctgcagatggctggttcttttttattcaggtgttaacttaaatgccacctccccaaagagacctttcctgaccactctacgtaacagcacttcagcagtcatgccatattatattatcactttatcctattttagtaatatgtactcatcatttactgaaagtgatgtatgtgcatcccatttctatacctcctcatatgtgcataaatgcatgcacatgcacacatgaatgcactgaaaacaagaaccttttctgtcttcttcgttgctgcttccaaatagcctagaagaactcttggaatatcactccaggaattcaataaatatttgtgagtaaataaatacatttcaaagataagaggaaaatttatacagctgcagtggatttccctggtggaaaactctacaaaggcatttgagtttagataatgtaagcccataagaaaattaactagattattctaacaggaaaggaataagcacttcaaactttatattttttattcttgttttaaatttatgttttagttgcggggaggatacaaaaagattaaaggacacaaaattacagctagataggaggaataagttccagtgttttacagaactgtaggaggactacagataacaagcattgtatttgaatagaaaggtccatatgtcatgtgccaaccccgttctgctgccttacccaagactgggaaatggaacagatgatatgggttctatagagaggcaaagtgcagaacctgctcaaacacagtggccctggggtggaaagttctcaattggaattgtgttggtgcctgtgtggatggagcattcaattctgagccttaggagccttttgaaggccctcctggccaagatgatcttgaggaaatgactgacccattggctgccttccaaatggatgacacagtctagacttttataaactacatgagtagaaggaacccagttgactggatttatcaccaaacctagcttgtgagcctcagtctagagctagcataatttagaaaaataaatgcatacatcatatattaaactctgagtatcatgaaacagatcctagatgttacaataataagaacctacatgggtgtttctcctgcactctgtcctggctttcttctgcttcttgtctaagggagcctggactcacttaagcagctctaataggccaaacaagagagtggtcaaggagtggctgaaatgtgaacagaaagactcaccattatattagagcaatcaatctatccttaaaatactgtgggtttagtgtcaagtgctagaggcttccccatttacccatacatggaagcctgaagaataaacagaactataaacttccctctgggcataaaacttgcatgtcttccacggcttcaaggtggggagcagctgggcaggcagaaggaggggcaagaggcagtcaagaggaggggcgggaggcaggcggggaggaatgggctactccgtttagctgatcagccttgaccagttcatgctctgggactccatcttacaagtcagacttttccgagtcacacagagcactcccttcactctccagattcaatgattcctgggatgatatagtaacgaaaataattccttattggataaagaaattgtgctgtgcgggagataagtagcttagaaaaaaaaatggatgaggagaggagctgggagtttgggggtaagacagcctaaaatctgacagtctggttggggaacgataaaagatactggaacccaaggaggagatcagtaagaatgtaggagaaagatctggtgggatttggagaagaaagtgttaaaaaataaaattggaatatgacagtttgcagactactaggtctgaaagacgcaactctgtagcaacatgaaggggaacaaactttgtctgaatagggaagtttctagtatgatctctgctttccttagacaagtaaccctggagaagacacttgacctctgagctttagattgttcatctgtaaaaaggagagaacaatatctgctgcctaccacctcagtgaggctgcactaaggatcagctcagaggaggcaaagcagaatgccctattgcacagcatggaggccctagagtcggaccaccatacttacatcccatctttaaaacctcctggctgtttggccttgagcaagccacttcacctccagaaagttcatttgatcatctgtaaaatgggcaagcccataggtggttgtgatgataaaatgaaaaaaaactttttaacttacatgagttacatgctgtagagtaagttatgtggtatatagtaagcacacagaaaagactcactgttatcaaaattaaaggaaagtggtttagtgtgctaagcactaaatacaagccagagagatgtcttgagaagtagacaaagaaatctacaattcagaatgaacagtaacaagaatgacatgtcctccaaattgagcttgggcagctggatctgaacctatcctacacatctgagtctacagtatgaggtaacagtctccacctatagctatcttctctgcctgtaaggtcattcctttctgaagaaagctgacctcagactattttgcgatcatttaaggaagagcgcaaaatactggagaaggctagtcttcaagctctagatacagaaaatcctcaaattcttgggtgttccctttcagactgagagtcagagccacaagcactgatccaaaaatccccttttccaaaaaaattttccatcttctaccaaggttcacctccctgtttagtgcacactagtatctacagttgttagagcaggagtctctccttatcctctaaggcaggtgttctgtgaagaccccatgacaagggacaaaatgaaacaacatgttcagggacaacaaaggaaaagcccattttatcaatgctccaaaacctggctacctcaggcttggcaagttattcgtgagcagagaagtttgtcatctacatggcagtcatggcctggatgggtctcgaactgtggcatggtaatgctctgagactaggtgccaggagaaagataaattcaatcatccatttctaccaggaagaaaagcaccaggaaggaatcagatgtacagtttgtcctctggggacctctgccttgatcctcaataaatctccttttagatacctcctcttagatgaaattcccacacttcacaatgctctccatggcttctgttggccttatggtcagctctgccaagatctgtattcttgggcaagacagaatccttctgaatctcagtctcttgctctataaatggaaacaattttgctctgcacaaattacaattagcatgtttgtgggaagttaaagtgtgaaactcagcataaatgaaaagtaatgtaccactgttgcttacatgaaaactcttgtaaagttgtcaggcactgtgcaccatctaagcatagcagtgttaggtatgggcccattagtgattagagggggtgcgaggcggagagggggtctccaagcagtgggtctcctggctgtggggaagctggctcagcggccataccaggagctgaaaccgaaggtactctgtgtgtcctctcaacaccatgggccccactttggcattatttccaattccctctggtttccatttgcttcctccctctagccccctggccaggtccgatttcaacaccaagtttctgagcttttcccattttgtccaccgtctctagaacatttctgcttcttttacctttcaaagaatccaaacttgaactctacttactcctgcccatcaccagcctgagctcagagttgctgagaagggaaagcaccctcataaggaagctcctcctttccctacatcattagacttgagcacagacagcatctccatttccacactgctctggccaggttgtgcctcagtcaattacacaactgtgtcttagtagccttggtagggcccaaatcaggatattctctaggaagattcactttgtactgagccaagcataatctcactgcatcgaaaatagaaaatgatcatctgatcattctggttcagactgtcagccctgagcaggtgggtcagtttgcatcacctgagtgcagattgcaaggacaacagtgaggctgcataaaaagaacctatgacaggatgcacatgagagagacaaatgtcttcacattgaagaaggggaggagtgcgccattggttttccatcctccagaggcactgagaaagctcctacagaaactgtgccccctccttctttgaaacacttcccatccttaagccttggtaggaaggagagaaatctggaagcccagaatcctatggaatgctgagtctcccttctccttaccccttagtgttggaattttcattccccaaaatcttgcatttgaccttcctgcacactgactggagagaagcatcttcatattcacaggaatgagccttagataagactttgctcctctcatgtgggccccaggaaactgaaatccaagctttttaccaacgcttgcccttccttaagtacattaaatacattcccaataggtggaaagatttgtaaacagctaggccattctccctccttctaaccctcatctccagggcctaagaaagcccagctctgttatctggggcttgactttccctgtcttccccatcccagtatccttgcaggaaacagccggtctcgctctctgctctcagaaggcaagtttccttatcacctgtgaatcacaaacccagagagtggccaaacatagccaggctgatgcaagaccctgggaagaggaaagctgcaggtgtgtttgtgctgggaggagtggtgaccctcacctcacagtcacctcctctctggatcctcgtgaggtataaagacgagtcctccaccaccagtcaggcacactctaccaccatgaatccactcctgatccttacctttgtggcagctgctcgtgagtatcatgccctgcctcaggccccaaccacccccccgttcctggccgacaaatgcccttccattcttaccacctctcctcttttgactgtgctctgatattccgtttcctccatctggcatatctccttcccatcctccttgggctctttttaagtctcacctgttcaccttctccttgacttcactcccaccactgtcattcatccatatccgagttgtggttggagaagctgggaagggggccaggtggggctgtcccacgaaatgaagcagcaggcttcaggcttggctccgacagcaacagaatagcaccactatagctgctcctaacctcgaatgcacctggggaggttgaaaaattactcatgccagagactcagctctagaaattctaacttcaattgtctggggtagagcttgtgttctgggcttttaagcttcccaggtgatttttaatatttccagccatgcagccaaggttaagaattgctgtcctattggccaataacaaagtctacctttgttctgccaaagtgagcctgggggctgccctcaactctgccctgactgcacagatctgagctatgggggaaggtggtcatggccaggtctatgcagacagggggttttcctagcttggcaaaagaatcctgacaatccagggcccaaatagccaggggaagtacacaggtgatgaataaaagagagaagcactcagtgggagagacaaccacatcccaactcctatcccactggaagcattgtgaggacattccttgcgacttcagcctggtgaccccaggagagctcggatcctccgcagggtacctagctatgtgccctgcaggcacagagacttgggagccacaggcagtgatgatcaccaggggtggcagagctccctcccttgcctagcctcactgtgcttgttaaggatttctaattagcagaaagcaatcacaggctgggagcgccacccctaacatgctattgacttgccttctcccttcccatctccactccagttgctgccccctttgatgatgatgacaagatcgttgggggctacaactgtgaggagaattctgtcccctaccaggtgtccctgaattctggctaccacttctgtggtggctccctcatcaacgaacagtgggtggtatcagcaggccactgctacaagtcgtaagtgtggggcccccgactgcaaagctcccggccagtctgcctgggagagcttggcttcagcccagggaactactgaggttgggtaagatggatgggagaggtggtggagaagaaaacttgttggcagctgcggactctccagagcagagagtgaacacaagacaggaacctctcacacccaggcaaatccatgaaacagcaagggttgtggtcataaaagcaggcagggatgatcttggggtggtgagagctagtgagaaaagcaggcaagtatcttttgctggttagctacacattaaagccaactaagaaagactttttaaaaatacagatgcctttgtcctatcccagggcaattaagtcaaaattttcaggaagagggtgtgaatatcagtgagaattttacactctacctctgctaactgtagagtgtatagacagagctgagaactgctgcctacaccaagaactctcaaacctgagtatgcatcagaacgccctgcaggcttgttaaggcacaaatcactgggccccttccccaaggttctgatcagtaggtgggggtaaggaccaagaattcacatttctaacaagttcccaggagatgctaatgctatggctacccttggattagattacacagaagggtggttctcaccaggccaagaatggagggaggaacaggcactgtgcacagttggcaaaggcctggggtgaagaatgctgggaaaacttcaaggagctccttgtgcccacagtgctagtgactgtggagattgtgggaaagagtctggggaggcaggttgaggagcagcctctggtgggatccctttgactcttccccaccccactaccaccaacctctggagcagataggtcctgggtctcataccttcactgacccacatccctctgctgcccatgcgatatggccacacaccccaccccatgcctccagagctgtccatgagcagagagcttgaggaacctggggaaggtgggataggtgccctggctgtgggagaaggtcttcaccatgcctgccctgcccatcagccgcatccaggtgagactgggagagcacaacatcgaagtcctggaggggaatgagcagttcatcaatgcagccaagatcatccgccacccccaatacgacaggaagactctgaacaatgacatcatgttaatcaagctctcctcacgtgcagtaatcaacgcccgcgtgtccaccatctctctgcccaccgcccctccagccactggcacgaagtgcctcatctctggctggggcaacactgcgagctctggcggtgagtgggacccttagtccttctacttccctccatcctcacaatttccagaacaaaccatgccccttaacttgaatcctctcacctccaggcttaagacacatttcgagtgcccattacacacagactctgcactgggcaccagagagatgcaaactatcaaggacttggctcctaaaatcaagagacaggacaaatggagaacttgatatgatcacatcttgggaggggttcaacaatgatcattctgggaactaaaagccagagtctcttgccaggacttatgttctggagtcctctccaggggctgtgttcctcttcagttttccatccaagattattgtctccttctctggcctgacccacatttctacttcctttgatctcttcctgatcctcacagccgactacccagacgagctgcagtgcctggacgctcctgtgctgagccaggctaagtgtgaagcctcctaccctggaaagattaccagcaacatgttctgtgtgggcttccttgagggaggcaaggattcatgtcaggtgatttgaccaacccttcccatgctgaggctcccactgatacctaggccccaccagggaaaaggatttgaactcaaaaggtggtggggctgaggaggctccctgcagtgcccacatggagaagtgaggaagactcccttgggctgcatcttgtctgcttaggaagaacagagaatgggccaccatgagaaggacatggagccacagagctggctggaaaggggtcttttaaggttcagagtaaatgtagctatattcctcctccatctctccatacaacttgtcccttcttccccccagggtgattctggtggccctgtggtctgcaatggacagctccaaggagttgtctcctggggtgatggctgtgcccagaagaacaagcctggagtctacaccaaggtctacaactatgtgaaatggattaagaacaccatagctgccaacagctaaagcccccagtatctcttcagtctctataccaataaagtgaccctgttctcactgtctgtgtctgtgcctgctccctctcactccttcacactggaaagcatcctccaatttcaggttagacacgactgtcccctttaaaggtaagcagagcccccatctcccaaaatgtgttccatggtacactagattagcacatacaaacagatggaatccaaaaataagaagaagcttgggagaaaggggagtactgttttctagagatacctgtttcagaaaggtggtctttggggtgggggggtgggtattgatttttatttgggcttctcacagtagttagagctactctgccttcagaacaattacagcacagaaaatgtgtcagcatcttcgaggtggcccaaaaaacctgaccagctgaatcttcttgctaaaatacaataataatgacaaatcctgttggtgatgacgtgcctctcccaggaatgtgtcggcaccaaaccctcgaccaagccctcccttctcattcacctggaaaatcagatgcaaataaatctccctggccgcctaactcttccctcagttccctagttccatctctgtgagcaggctagagagatgttccacctaccatagcaggagccagactgcgacttgggaatcaagcccagatctacacgctgggcttgattttcgtcttctttgcctttggggtaggatgccacagtgaatcccacagctaacaccagctcctcactctgaccagggaaagaaactagagagggtcaggattcacctatttgatcaattagctgaggaaggattcattttcataaaacttgcttgactttgagacacttcaagtgagttatttgggattctttaaaaggggtggaaggaaagatctgaggactgtgacaccaccagccactctgaccacacgttggctggcttgaacccactggatgcagcagagggaggcaggccctgtggcacctctggcacctgccaaagcctcctcctggcaattctgagagggcccatgttggggctgtagctcatccaagcttggcaccgaagatccaaggaagcttctctttgaaattccaccttcacctctgtcccaagtggttgtggacacccctgggagctggcactaagggccaggagcagccaagggagacagacaagttcagagcacatttccagttacagggaacagagcacaggcctccaagtgtccacagagcagcgtgcaaattgcagggatgagtagaggaaaacctctacatggagcacagcgttcctggcaaacacaggggactgcagtccacatgctgtggaatacacccaagtatgcatcagacacttgtttggtaaacagtaaatgtgtaagatcaattaccttgagagggccatctgggctccagatgtgtgacttgtgtgaggagacggctaccactcactatctccagaggaaaacagggctcagggctcgcacacaatggatagatacacacgggtcacccagaacatcaatacatacaaacatcactttgttcaacatggattttgtttttatggagtccaaacgcagaccgtagttcaccttacagccttgggtttgtctgcttttggagatatatatccagtagatagatagacagacaagacagataattttttccctttcttactataatgtcaatgccttatctgaatatcatcatcactcaagagtcaagggaagaaccaaacgcttcatataaacagggctgggctgggcagggagtgttagtttccagtgttttctgtctccattcagatcatccctatcaaagcccagctggtcacctcaagccaagacacagacataaggatcccaatggccttccagatggctgcttccacctcccacctgggccactaagactctttacacaggaaagtgagtcaccccagtgagaagggttgccagaagaaacagggcatgaaaatcacagataaccatgggatttcttccaagtggtcagtataaaatataccaacactaccatcaccaaaaacacaaaacaagcaaaaacatgcttattcaaaatcctagacaaaatactgtgtgagagccaggccacggggttgccttttcacaggccacacagctttcccagtccatgtactcacgtggaaccgtgagatgtgaaagtctgcagggcgtgtgctcaggatcgaggctggtactgttcacctatgggtccagaccaaagggcaataaggcagaaagctgatatctgtccaccgccacggcttagggcctccttctcacagaggctcctaagagcccccacctcagccttcacacaaaacatctccttctggctgaactacagccaggctggagtgccgtggcatgatctctgctcactacagtctccacctcctgggttcaagtgattcagcctcccaagtacctgggattacaggcactcgccaccatgcccagctgattttgtttgtttgtttgtttgtatttttagtggagacagggtttcaccatgttggccaggctcattttgaactcctgacctcaagtgatccaaggtactgggattacaggcatgagccaccacttctggcccaggacccattttttaaaaaaattttcaacttttattttagattcagggcatacgtgtgcaggtttgttacatgggtatattgcgtgatgctgaggtttggggcacaaatgttcttaccactcaggcagtgagaatagtgcccaataggtagttattcagccctttccaccctccttctctcttccctctagcagttacagtgtctactgttcctatctttatatccatgtgtaccaaatgctcagctcccacttatacagaagaacgtgatatttggttttacatacctgtgttaatttgcttagaattatggtctccatctccatccacgttgctgcaaagacatgatttcattttttcatagctgcatagtattccatggtgtatatgtaccacatttcctttatccaatctacagctgatggccacctagattgattccatggctttgttattgtgaatagtgctgtgacggacatgcaagagcatgtgtctttttggcagaccaattattttcctttgggtatatgcccagtaaaggaattgctgggtggaaaggtagttctgtttttaattatttcagaaatctccaaactgccttctgcattaatttttccataaactaatcgacagtcaggccaagagtgtataagcattccctttcctctgcagccttgacagcatcttctattttttttttttttttttttgacgttttaataatagccactctgcagccaagctctttcaaggccaatgtgggatagagccacaaacatcccttttccggaagagaattcttgcctgcccactggtagaattcttgttttcatctgtcttttattatttgtttttcaaagaaaaactggcctgtaatcccagcactatacgtggccgaggcgggcggatcacgaagtcaggagatagagaccatcctggctaacacagtgaaatcccgtgtctactaaaaacataaaaaattagccaggtgtggtggcaggtgcctgtagtctcagctactcgggaggctgaggcgggagaatggcgtgaacctgggaggcaaagcttgcagtgacctgagatcatgctactgcactccagcctggacaacagagccagactctgtctcaaaaaaaaaaaagaaagaaaagaaaagaaaaaaaagaaaaaccaaaggtaaagtggtaagatcttccacacctgaaccagtttgtagccaccagagcctgctgcgaaggggcccctcaagcatgcattcatcttgtcacctggaatttgagagatcaagaagccccatagcaacctaccatgcaactgcccatcagtgctgatcctttcaagggattatctcaattctgactctgcagacactggcagccacaggtgacaaaccctgtgtatctgtgggctttcctcatcacccagggccacaatggggtgcctgccctaggcagagacacagcaacattctcttaaactgaaattaagcataaatccacttcaccaataatcatctgagggctcagtccctgtctccttcctcggggattttaaaacacacatttctctgaccaaacaggtaggtgagatctgactttaaaggggggaaattgggttgaattgaggtatcaggaatggatcacaagtgtttttgtgtggggacaggcatccacatccctaactgtacctggagatggagaaaaatgcaggagaggagaagagaaaaaaaggaggaaaaagtggctgaaagtatttgaaagcttctctcatggttctttctggctctggttgcttttccaaggtcttgagtgcaggcagggccagctctggctgggagctgctgctctgggacatggaagagtcacttcacctccagaaagttcattcgatcatctgtaaaatgggcaagcccataggtggttgtgatgataaaatgaaaaaaaaacattcttaacttacatgagttacatgctgtatagtaagttatgtgctatataggaagcacacagaaatgattcactgttatcataatagaaggacagtggcttggtgtgctaagcactaaatacaagccagaaaaaatgtcttagagaagtagacaaagaaatctatagttcagaaccaacagtaccaagaatgacatgtcctccaaattgagcttgggcaggtagatctgaacctatcctacacatctgagtctatgatatgaggtaatagtctccacctatagctatcttctctgcctgtgaggtcattcctttttgaagaaagctgacctcagactatactgtgatcatttaaggaagagcacaaaatactggagaaggctagtcttcaagctctagatacagaaaatcctcatattcttgggtgttccctttcagacagagaatcagagccacaagcactaatccagaaaccccctttcccaaaaacgttttccatctcctaccaaggttcacatccctattgagtgctcactagtgtctatagttgctagagcaagagtctctccttattctctaaggcaggagttctgtgaaggccccatgacaaggggacaaaatgaaacaacatgtttagggacaacacaggaaaaacccatattatcaaagctccaaaacctggctacctcaggcttggccagttattcatgagcagagaggtttctcatctacatggcagtcatggcctggatgggtctggaactgtggcaagataaggctctgagacaaggtgccaggagaaagatgaattcaatcatccatttctgccaggaagaaaagcaccaggaaggaatcagatgtacagtttgtcctctggggacctctgccttgatcctcaataaatctccttttagatgccacgtgcagcaattcccacactttacaatgctctccatggcttctgttggccttatggtcagctctgccaagatctgtattcttgggcaagacagaatccttctgaatctcagtctcttcctctataaatggaaacaatttggctctacacaaatcacaattagcatgtttgtgggaagttaaaccgtgaaactcagcatcaatgaaaagcaatgtaccactgttgcttatgaaaactcttgtaaagttgtcaggcaccatgcaccatctaagtacagcagtgttaggtataagcccatcagtgattagagggggtatggggtggagagggggtctctgagcagtgggtctccgggctctggggaagctggctgggtggccatactaggagctgaacccgaaggtactctgtgtgtcctctcaactccacgggccccactttggcattttctccaattccctctcgtttccatttgcttcctccctctagccccctggctgtgtccaatttcaacaccaagtttctgagcttttctcattttgttcactgtctccagaacatccctgcttcttttacctttcaaagaattcaaacttgaactctgctcactcctgcccatcaccaacctgagctcagagttcctgagaagggaaagcaccctcataaggaaactcctccttttcttacatcattagacttgagcacagacagcatttccatctccacactgctctggccaggttgtgcctcagtcaattacacaactgtgtctcagtagccttggtagggcccaaatcaggatattctttgggaagtttcactttgtactgagccaagcataatctcccgggatctaaaatagaaaattctagacccacccctccacatcttcgttattgaacccaatatgtcacccatttaccatgtgctcaaatctctacctactgctgattctcagatcaaatcgtaacccagatttaccatggtccaaactctgacatctgattggggccatgtcatcctggttcaggctgtcagccccaagcaggtgggtcagtttgcctcaccctgagagcaggttgccagggcaaccatgaggctgcataaaaagaacctatgacaggatgcatatgagagagacaaatgtcttcacattgaagaaggggaggagtgcaccattggttttccatcctccagatgcactaagcttctacctaaactgtgccccctccttctttgaaacacatcccatccttaagccttggtaggaaggagagccatctggaagccctgaatcctatggaatgctgagtctcccttctccttcccccttagtgttggaattctcattccccaaagtcttggatttgacctttcccgacactgactggagagaagcatcttcatattcacaggaatgagccttagatcagactttgctcctctcctgggagctccaggacactgaaaagccaagcttgttaccaatacttgcccttccttaagtacattaaatacatcccaaatagttaaacagattcctaaacagccaggccattctccctccttctaaccctcatctcctcggcctacgaaagcccagatgtgtgatccagggcttggcttcccctgtcttccccatcccagcatccttgcgggaaagggctgctctctctctctgctttcagaaggcaaatttccttatcacctatgagtcacaaacccagagagtggccaaacatagccaagctgatgcaagaccctgggaaggggaaagctgcaggtgtgtttgtgctgggaggagtgctgaccctcacctcagagacacctcctctccagatcctcaggaggtataaagacaggtcctccaccaccagtcaggcacactctaccaccatgaatccactcctgatccttgcctttgtgggagctgatggcgagtttcatgccatgcctcaggccccaaccaccccctttcctggcagacacttgccctgccattcttgccacctttcccattttgactgtgttctgatattctatttcctccatctctccttcccatcctcttcggctctctttaagcctcacctgtttcagcttctccatgatttcactcccaccactgtcattcatccatatctgagctgtggctggagaagctgggaagggagaccaggtggggcgggcccacaaaatgaagcagcagccttcaggcttggctccatagcaccagtatagcaccattatatctgctcttaacctcaaatgcacctggggaggttgaaaaattactcatatcagagactcagctttagaagttctaacttcattctctggggtgcaacctgtgtactgggcttttaacattcccgggtgatttttaacatttccatgcatgcagccaaggttaagaattgctgttctattggccaataacaatgtctacctttgttctgccaaagtgagcctgggggctgccctcaactctgccctgactacacaaatctgagctatgggggaagctggtcatggccaggtctacgcagccagggggttttcctagcttggccaaagtatactgacaatccagggctcaaatcgccaggggaagtacacaggtgatgaataaaagagagaagcactcagtgggtgagacaaccacatcccaattcctatcccactggaagcattgtgaggacattccttgaatcctcagcctggtgaccccggggagaactgagcccctgcagggtacctagctacatgccctgcagacacagagacttgggagccacatgcagtgatgcttaccaggggtgacagcgctccctcccttacccagcctcactgtgctcgttaaggatttctaattagcaggaagcaaccgaaggctgggagcgctacccctaacatgctactgacttgccttctcctttcccatctccactccagttgcttcccctttcgacgacgatgacaacatcatttagtggtatacctgtgaggagaattctgtcccctaccaggtgtccctgaattctgggtaccacttctgcagtggctccctcctcagcgaacagtgggtggtgtcagcagctcactgctacaagtagtaagtgtggggcccctgactgcaaagctcccagccaggctgcctgggagagcttggcttcagcccagggaactactgaggttgggtaagatggatgggagaggtggtggagaagaaaacttgttggcagcagcggactctccagagcagagagcgaacacaagacaggaagctctcacacccaggcaaatccatgaaacagcaagggttgtggtcataaaagcaggcagggatgatcttggtgtttggcagagctagtaagaacagcaggcaagtaccctttgctggttagctacacatcaaagtcacttaagaaagagtttttaaaagtactgatgcctgtgtcctatcccagggcaattatcaggaattttcaggaagagggtgtgaatatcagtgagtattaaacattctacctctggtaactgtagattgtatagacagagctgagaactgctccctacaccaagaactctcaaacctgagtttgcctcagaaccacctgcagggttgttaaagcacaaatcactgggacccatccccaaggttctgagcagtaggtgggggtaaggaccaagaatttacatttctaacaagttcccaggagatgctaatgctatggctacccttaggttagattacacagaagggtggtgctcaccaggccaagaaaggagggaggaacaggcactgtgcacagttagcaaaggcctggggtgaagaatgctgggaaaacttcaaagagctccttgtgcccacagtgctagtgactgtggagattgtgggaaagaggctgggaaggagggttaaggagcatcctccggtggaatccttttgactcttcccaaccccattaccaccaacctctgaaacagaaaggtcctgggtctcacaacttcactgacccccatccctctcctgcccatgtgatatggccacacaccccacccgatgcctccagagctgcccatgagcagggagcttgaggaccctggggaaagtaagatgggtgtcccagctgtgggagaaggtcttcaccatgcctgccctgcccatcagccgcatccaggtgagactgggagagcacaacatcgaagttctggaggggaatgagcagttcatcaatgcagccaagatcatccgccaccccaaatacaacagttggactctggacaatgacatcctgctgatcaagctctccatgcctgctgtcatcaatgcccacatgtccaccatctctctacccaccgcccctccagctgctggcaccaagttcctcatctctggctagggcaacactctgagctctggtggtgagtgggaccctttgtccttctccttccctccatcctcacaatttccagaacaaaccatgccccttaacttgaatcctctcacctccaggcttaagacacatttctagtgcccattacacacaggctgtacagtggatggacatcagagagatgcaaagtctcaaggacttggctcctaaaatcaaaagacaggacatatagagaacttgctttgatcacgtcttggaaggggttcaaaaatgatcattctgggaactaaaagccagagtcccttgccaggacttaggtttcggagtcctctccagggacagtgttcctcttcaatgttccatcctagattattgtctccttctctggcctgatctacacttctactttctttgttctcttgctgatcctcacagccaactatccagatgagctgcagtgcctggacactcatgtgctgacccaggctgactgtgaagcctcctaccctggagagattaccaacaacatgttctgtgtgggtttccttgagggaggcaaggattcctgccaggtggtttgaccccttcccatgctgaggttcccactgatacccaggccccacccaggaaaaagatttgaactcccaaggtggcggggctcaggaggctccctgcactgcccccatggagaagtgaggaagactcccttgggctgcatcctgtctgcttaggaagaacagagaatgggccactgtgcgaaggacgtggagccaaagagctggctggaaaggagtcttttaaggttcagagcaaatgtagctatattcttcctctttctctctcttcatacagcttgtcccttcttctccccagggtgactctggtggccctgtggtctgcaacggacagctccaaggagttgtctcctggggctatggctgtgcccagaagaacaggcctggagtctacaccaaggtctacaactatgtggactggattaaggacaccatagctgccaacagctaaagcctctggtacctctgcagtctctataccaataaagtgaccttgctttcactgtctgtgtctgtgcctgctccctcacactgcttcacactggaaagcatcctccaatctcaggtcagccacgactcccccccttaaaggtaagctgaaccctcatctcccaaaatgtgttgcatggtacactagattagcacatacaaatagatggaatccaaaaattataagaaacttgggagaaaggggggcactgttttctagagaaatgtgtgtttcagaaagttggtctttggtgggggggtactgatttttatttgggcttctcacagtgggtagagctactctgccttcagaacaatcacagcacagaaaatgttgtcagcatcttcgaggcagcccaaaaaatccgaccagctgaatcttcttgctaaaatacatcaaaaaagacaaatgctgttggtgatgacgtgcctctcacaggaatatgtcagcaccaaaccctcaaccaagccctccctcctcattcacctggaaaattagactcaagcaaagctccctggcctcctacctcttccctcagttccctagttccatctctgtgagcaggctagagagatgttccacctaccatagcgggagctagactgcgacttgggaatcaagccaggtctgcacgctgcattttcatcttctttgcctttggggtaggacgccatatgaatcccacagttaacaccagctccccactctgaccagggaaagaaactagagagggtcaagattcacccatttgatcaattaactgaggtaggtttcattttcatataacttgcttgcctttgagatacttcaagtgacttacgtgggactccttaaaaaaaagtggagggaaagacatctgagcagccactctggccacatgttggctggcttgcacccactggatgcagcagagggaggcaggccccctggcacctctggcacctgccaaagcctcttccaggcaattctgagagggaccatgttggggctgtagctcatccaagcttgtcactgaagatccaagcaagcttctctttgaaattccaccttcatcttctgtcccaagtggttgtggacacccctgggagctggtaacaagggccaggagcagccaaggaagacagacaagttcagagcacatttccagttacagggaacagagcacaggcctccaagtgtccacagagcagtgtgcaaattgcagggatgagtagaggaaaacctctacatggagcacagcattcctggcaaacacaagggaccgcagtccacatgctgtggaataaacccaagtatgcatcggacacttgtttggtaaacagtaaatgtgtaagatcaattaccttgagagggccatctgggctccagatatgtagttcatgtgaggagacggctaccactcactatcttcagaggaaaacagggctcagggcttgcacacaatggagatacacacaggtcacccagaacgtcaatacatacaaacatcactttgttcaacatggattttgtttttatggagtccaaacgcagaccgtagttcaccttacagccttgggtttgtctgcttttggagacatatatccagtagatagatagacaacacagatacatttttttccctttcttactgtaacgtcagtgcctcgtctgaatatcatcatcactcaagaatcaagggaagaacaaaatgcttcatataaacagggctgggcaaggagtcttagtttcccctgttttctgtctccattcagatcattcctatcaaagcccagctggttacctcaagccaagagacagacataaggatcccaatggccttctagatggctgcttccacctcctacctgggccacatagagtctttacacagaaatctgagttagccctgtgagaagggttgacagcacaaacagtgcatgaaaatcacagataaccatggtatatctcgcaagtggtcagtgtaaaataaaccaccaccaccaccacaaaaaacacaaaacaagcagaaaaatgcttattcaaaaatctaagacaaaatactgtgtgagaaacaggccacggggttgccttttctcaggccacacagctttcccattccatgtgctcacatggaccgtgagatgtgaaagtctgcagggcgtgtgctcgggatcgaggctggtactgttcacctgtgggtccagaccaaatggcaaagaggcagaaagctataactctgtccaccgccacggcttagggcctccttctcacagaggctccaaagagcccccacctcagccttcacacaaaacatctccttctggctgaacaacagccaggctggagtgccgtggcatgatctctgctcactacaacctccacctcccgggttcaagtgattcagtctcccaagtacacgggattacaggtgcatgccaccatgccaagctaattttttttttcttttttgtatttttattagagacagggatttacgatgttggccagtgtggttttgaactcctgacctcaagtgatccagagtgctaggattacaggtgtgagccacagcttctggcccaggccccattttttaaaaaataatttcaaattttattttagattcatggggtacatgtgcaggtttgttacatgggtatactgtgtgatgctgaggtttggggcacaaatgatctcctcactcaggaactgagcacagtacccaataggtattttttcagccctttccacactccttctctcttccctctagtagttgcagtgtctactcttcccatctttacatccgtttttacccaatgctcagctccgacttatacatgagaacgtgatatttggttttctgttcccatgttaatttgcttaggattatggtctccagctccatccatgttgctgcaaaggacatgatttcattcttttcatggctgcatagtattccatggtgtatatgtaccacattttctttatccagtctaccgctgatggccacctaggttgattccatggctttgctactgtgaatagtgctgtgatggacatgcaagagcatgagtctttttggcagaacaattactttcctttaggtaaatgcccaataaagcaagtgctgggtggaaagatagttctgttttaaattgtttcagaaatctccaaacggttttctacattaatttttccatgaactgatttacactctggccaacagtgtacaagcattccctttccactgcagcctcatgagcatcttctattctgtggacattttaataataaccacactgcagccaagctctttcaagcccaatgtggggaacagccacaaacatcccttttcccaacgagaattcttgcctgcccactggtagaattcttgttttcagctgtctttcattgtttgcttttcaaagaaaaaccaaaggtaaagtggtatgatcttccacacgtgaaccagtttgtagccaccagagcctgctgggaaggggcccctcacgcatgcattgatcttgtcatgtggaatttgagagatctagaagccccacagcaacctaccatacaactgcctatcagcgctcatcctttcacaggattagctcaattctggctctgcagacactggcagccacgggtgagaaaccctgggcctctgtgggcttccttcatcacccagggccacagtgggctgcctgtcctaggcagagacacagcaacattctcttaagctgaaattaagcataaacccacttcaccaataatcatctgagggcacagtccctgcctccttccttggggattttaaaacacacatctctctgaccaaacaggtaggtgagatctgactttaaaggggggaaagtgggatgaattggggtatcaggaatgaatcccaagtgtttttgtgtggcgaatggcatccacatcccaaaatatacttggagatggggaaaaaagcaggagaggagaagggtaaaaaaggaggacaaagtgtctgaaagtcattgaaagcttctctcatggttctttctggctctggttgctttgccaaggtcttgagtgcaggcagggctggctctggctgggagctgctgctctggaacatggaagagtcacttcacctccagaaagctcatttgatcatctgtaaaatgggcaagcccataggtggttgtgatgacaaaatgaaaaaaactttcttaacttacatgagtgacatgctgtatagtaagttacatgctatataggaagcacacagaaataattcactgttatcataaatgaaacacagtggattagtgagctaagcactaaatggaagccagaaagatgtctagagaagtagacaaagaaatctatagttcagaatgaacagtatcaagaatgacatgtcctccaaattgagcttgggcagctggatctgaacctatcctacacatctgagtctacagtatgaggtaacagcctccacctatagctatcttctctgcctgtaaggtcattcccttttgaagaaagctgacctcagactatactgtgattgtttaaggaagagcgcaaaatactggagaaggctagtcttcaagctctagatacagaaaatccttatattcttgggtgttccctttcagacagagtcagagccacaaccgctaatccaaaaatcccattttccaaaaaaattttccatcttccaccaaggttcccctccctgtttagtgcacactggtgtctacagttgctagagcaagagtctctccttatgctttaagcaggagttctgtgaagaaaccatgccaaggggacaaaacaaaacaacatatttagggacaacacaggaaaaacccatattatcaaaactccaaaacctggctacctcaggcttggccagttatctgtgagcagagagttgtgtcatctacatagctatcatggcccagacggtctggaaatgtggcaaggtaaggctctgagacaaggtgccaggagaaagatgaattcaatcatccatttctgccaggaagaaaagcaccaggaaggaatcagatgtacagtttgtcctctggggacctctgccttgatcctcaataagtctccttttagatgccacctgcagcaattcccacacttcacatgctctccatggcttccattggccttatggtcagctctgccaagatctgtattcttgggcaagacagaatccttctgaatctcactctcttgctctataaatggaaacaattttgctctgcacaaatcacaattagaatatttgtgggaagttaaagtgtgaaacacagcataaatgaaaagcaatgtaccactgctgcttacatgaaaactcctgtaaagctgtcaggcaccatgaaccatctaaatatagcagtgttaggtataagcccatcagtgattagagggggtacggggtggagagggggtctcctagcagtgggcctcctcgctgtggggaagctggctcggccaccatgccaagagctgaacccgaaggtactctgtgtgtcctctcaactccacgggccccactttggcattttctccaattccctctggtttccatttgcttcatccctctagccccctgaccatgtccaatttcaacaccaaatttctgagcttttctcatgttgttcactgtctccagaacatccctgcttcttgtacgtttcaaagaattcacacttgaactctgctcactcctgcccatcaccaacctgagctcagagttcctgagaagggaaagcacccttataaggaagctcctccttttcttacatcattagacttgagcgcagacagcgtctccatctccacactgctctggccaggttgtgcctcagtcaattacacaactgtgtcttagtagccttggtagggcccaaatcaggatattctctgggaagattcactttgtactgagccaagcataatctcactgcatcaaaaatagaaaattctagaccaacccctccacatcttcgttattgaacccaatatgtcacccatttaccatgtgctcaaatctctacctactgctgattctcagatcaaatcgtaacccagatttaccatggtccaaactctgacatctgattggggccatgtcattctggttcaggctgtcagccccaagcaggagggtcagtttgcatcaccccgagtgcaggtttcaaggacaaccctgaggctgcatgaaaagaacctacgacaggttgcatatgagagagacaaatgtcttcacattgaagaagggaaggagtgggccattggttttacatcctccagatgcactgagtaagctcctacctaacctgtgccccctccttctttgaaacacatccccatccttaagccttggtaggaaggagagccatctggaagccctgaatcctatggaatgctgagtctctcttctccttaccccttagtgttggaattcttgttcccctaagacttggatttgaccttcccgctgagtgactggagagaagcatcttcatattcacaggaatgagccttagataaaactttgcacatctcatgggggctgcagaacactgaaaagccaagcttgttaccaatacttgcccttccttaagtatattaaatacaatcccaatagttaaacagattcctaaacagccaggccattctccctccttctaaccctcatctcctgggcctaagaaagcccagctgtgtgatccggggcttggcttcccctgtcctccccatcctagcatccttgcaggaaagagccgctctccctctctgctctcagaaggcaagtttccttatcacctgtgaatcacaaacccagagagtggccaaacatagccgagctgatgcaagaacatgggaagcagaaagctgcaggtgtgtttgtgctgggaggaatggtgaccctcacctcacagacacctcctctctggatcctccagagctataaagacgggccttccaccaccagacaggcgcactctaccaccatgaatccactcctgatccttgcctttgtgggagctgctggtgagtttcatgccctgcctcaggccccaaccaccccccgttactggcagacatatgccctgccgttcttgccacctctcctcttttgactgttctctgatattctgtttcctccatctggcatatctccttcccatcctccttgggctctctttaagcctcacctcttttaccttctccctgatttcattcccaccactgtcattcacccatatttgagctgtagctggagaagctggaaatggagaccaggtggggcaggtccacaaaataaagcagcaggcttcaggcttggctccaacagcaccagaatagcaccactatagctgctcttaaccttggatgcacctggggaggttgaaaaatttctcatgcgagagactcagctctagaaattctaacttcatttctctgggatgcagcctgtgtactggctttttaagcttctcaggtgatttgtaacatttccaggcatgcagccaagattaagaattgctgtcctattggctaataacaatgtctaccattctctgctgaagtgagcctaggggctgccctcaactctgccctgactacacaaatctgagctatgggggaagctggtcatgacgaggtctatgcaactagggggttttcctagcttggccaaagtatcctgataatccagggctcaaataggcagaagaagtacacaggtgatgaataaaaaagagaagcattcagtaggtgagaaaaccacatcccatctcctatcctacaggaagcattttgaggacattccttatgacctcagcctggtgaccccaggagagatctgaaaccccatggggtacctagctacgtgccctggagacacaaagacgtgggagtcacatccagtgatgctcacaggggtggcagagctccctcccttgcctagcctcactgtgcttgttaaggatttctaattagcaggaagcaaacgcaggctgggagtgccacccctaacatgctactgacttgccttctcccttcccatctccactccagttgctgtcccctttgatgatgatgacaagattgttgggggctacacctgtgaggagaattctgtcccctaccaggtgtccttgaattctggctcccacttctgtggtggctccctcatcagcgaacagtgggtggtgtcagcaggtcactgctacaagccgtaagtgtggtgccactgactgcaaagctcccagccaggctgcctcggagagcttggcttcagcccagggaagtactgaggttgggtaagatggatgggagaggtggtggagaaaaaacttgttttcagcagctgactctccagagcagagagtgaacacaagacaggaagctctcacacacaggcaaatccatgaaacagcaagggttgtggtcataaaagcaggcagggatgatcttggggtggtgagagctagtgaaaaaagcaggaaagtacctttagctagttagctacaccttaaagccacctaagaaagagtttttaaaaatactgatgcctgtgtcctatcccagggcaattatcaggaattttcaggaagagggtgtgaatatcaatgagtatttcacactctaccttggtaactgtagagtgtattgacagagctgataaccactgcctacacgaagaaccctcatacctgagtatgcaccaccagaaaaaactgcaggcttgttaaggacaaatcactgggtcccatccccaaggttctgatcagtaggtgggggtaaagaccaagaatttacatttctaacaagttcccaggagatgctaatgctatggctacccttggattagattacacagaagggtggtgctcaccaggccaagaatgcagggaggagcaggcactgtgcacagttagcaaaggcctggggtgaagaatgctgggaaaacttcaaggacctccttgtgcccacaggactagtgactgtaaagattgtgtgaaagaggctgggaaggtgggttgaggagcagcctccagtgggatccctttgactgttccccaccccattaccaccaacctctgaagcagaaaggtcctgggtctcacacctgcactgacccacatccctatcctgcccatgtgatatgaccacgtacccaaccccatgcctccagagctgcccatgagcaggaagcttgaggaccctcgggaaggtgggatgggtgccccagctgtgaaagaagggcttcaccatgcctgccttgcccatcagccacatccaggtgagactgggagagcacaatatcgaagtcctggaggggaatgagcagttcatcaatgcagccaagatcatccgccaccccaaatacaacaggattactctgaacaatgacatcatgctgatcaagctctccacacctgccgtcatcaatgcccatgtgtccacgatctctctgcccactgcccctccagctgctggcaccgagtgccttatctccggctggggcaataccctgagctcagggggtgagtggcaccctttgtccttctacttccctccatcctcacaatttccacaatgaagcatgctccttaacttaaatcctctcacctccaggacacatttctagtgcccattacacacaggttctgcactgggcaccagagagatgcaaagtctcaaggacttggctcctaaaatcaagagacaggacaaatggagaacttggtgccattacttcttgggaggggttcaacaatgatcattctaggaactaaaagccagattcccttgccaggacttgttttggagtcctctccaggggcagtgttcctcttcaatgttccatcctagattactgtctccttctctggcctgacccacatttctactttctttattctcttcctgatcctcacagccgactacccagatgagctgcagtgcctggacgctcctgtgctgacccaggctaagtgtaaagcctcctaccctttaaagattaccagcaagatgttctgtgtgggcttccttgagggaggcaaggattcctgccaggtgattagaccaacccttcccatgctgatgttcccactgatacccaggacccaccagggaaaaagatttgaactcccaaggtggggggctgaggaggctccctgcagtgcccacatggagaagtgaggaaggctcccttgggctgcatcctgtatgcttaggaagaacagagaatgggccaccgtgagaagaacatggagccacagagctggctggaaaggggtcttttaaggttcagagtaactgtagctatattcctcctccatctctccataaaacttgtcccttcttcatgccagggtgactctggtggccctgtggtctgcaatggacagcttcaaggaattgtctcctggggctatggctgtgcccagaagagaaggcctggagtctacaccaaggtctacaactatgtggactggattaaggacaccatagctgccaacagctaaagcccctggtcactctgcagtctctataccaataaaataaccctgttctcactgtctgtgtctgtgcctgctctctcacactccttcacactggaaagcatcctccaatctcagttcagatatgactctcccccttaaaggtaagcagagcccccagctcacaaaatgtgttccattgtacactagattagcgcatacaaacagatggaatccaaaaataagaagcagcttcggagaaaggcagggcactgtttctagagaaacgtgtgtttcagaaaggtagtctttgggggagggtattgatttttatttgggtttctcacagtggttagagctactctgccttcagaacaatcacagcatagaaaatatgtcagcatcgtccaggtggcccaaaaaatctgaccagcggaatcttattgctaaaacacaataatgacaaatgctgttggtgatgtcatgcctctcccaggaatgtgtcagcaccaaaccctcaaccaagccctcccttctcattcacctggaaaatcagattcaagtaaatctccctggcacgctgactcttccctcaattccttagttccatctctgtgagccggctagagagatgttccacctaccatagcgggagccagactgtgacttgggaatcaagcccagctctgcacgctgcactttcatcttctttgcctttggggtaggacaccacagtgaatcccacaattaacaccagctccccagtctgaccagggaaagaaattagagagggtcaggattcacccatttgatcaattaactgaggaaggattcattttcataaattttgcttgcctttaagacacttcaagtgagttatttgggactcattaaaaagggtggaaggaaagacatctgagggctgtgacaccatgcagccactctagccacatgttggctggcttgcacacactggacacagcagagggaggcaggccccgtggtacttgtggcacctgcaaaagcctcctcctggaaattcggagagggcccagcttggtgccgtaactcatccaagcctgtcaccgaagatccaagcaagcttctctttgaaattccactttcaccttctgtcccaagtggttgtggacacccctgggagctggtactaatggccaggagcagccaaggaagacagacaagttcagagcacatttccagttacggggaacagagcacaggcctccaagtgtccatggagcagcgtgcaaattgcagtgatgagtagagtaaaacctctacacggagcacagcattcctggcaaacacaggggaccgctgtccacatgttgtggaatacacccaagtatgcatcagacacttgtttggtaaacagtaaatgtgtaagatcaattgccttgagagggccatccgggctccagaagtgtgattcgtgtgaggaaacagctaccactcactatcttcagaggaaaacagggctcagggctcacacacaatggacagatacaaacaggtcacccagaacgtcactgcatataaacagcactttgttcaacatggattttgtttttatggagtccaaacacagaccgtagttcaccttacagccttgggtttgtctgctttgggagatacatatccagttgatagacaagacagatacatttttttccctttcttaccataatgtcaatgcctcatctgaatatcatcatcactcaagagtcaagggaagaaccaaacacttcatataaacagagctgggctgggtggggagtgttagtttccagtgttttctgtctccattcagatcattcctatcaaagcccagctgattacctcaagccaagacacagacataaggatcccaatggccttccagatagctgcttccacctcctacctgggccacatagagtctttacacaggaaagtgagtcaccccactgagaagggttgccagcagaaacagggcatgaaaatcacagataacaatgggaatccttccaagtggtcagtgtaaaatagatcaccaccaccaccaccaaaaatgcaaaagaagcaaaaaaaatgcttattcaaaatccaagacaaaatactgtgtgagagtcaggccacggggttgccttttctcaggccacacagctttcccagtccatttgctcacatggaaccatgagatgtgaaagtctgcagagcgtatgctcaggatcgaggcttgtactgttcacctatgggtccagaccaaagggcaaagaggcagaaagctgatatctgtccaccgccaaggcttagggcctccttctcacagaggatctgaagagaacccacctcagcattcacacaaaacatcttctggctcaactacagccaggctggagtgccatggcatgatctctgctcactacagtctctgcctcccaggtcaagggattcagcctcccaagtacttgggattacaggtgcatgccaccatacccagctaatttttttttttttgtatttttattagagacagggattcaccgttttggccagactggttttgaacacctgacctcaagtgatccaaagtactgggattacaggcgtgaaccacctcttctgtccgaggccacattttttaaaaaataatttcaaattttattttagattcagggaggacatgtgcaggtttgttacactggtatattgtgtgatgctgaggtttggggcacaaatgatctcatcactcaagcagtgaccatagtacccaataggtagtttttcagcactttccacactccttctctcttccctctaacacttgcagtgtctactgttcccatctttatatccatgtgtacccaatgctcagctgccagtatacatgagaatgtgatatttggttttctgttcctatgttaattcgcttaggattgtggtctccaactccatccatgttgctgtaaaggacatgatttcattcttttcatggctacatagtattcaatggtgtatatgtaccacatttccttcatccagtctaccgctgatggccacctatgttgattccatggctttgctagtgtgaatcagtgctgtgatggacatgcaaaagcatgtgtctttttggcagaacaattattttcctttgggtaaatgcccagtaaagtaagtgctgggtggaaaggtatttctgttttaaattatttcaaaaatctccaaaatgcttcctgcattaatttttccatgaactcatttacactctggccaacagtgtataagcgttccctttcctctgcagcctcaccagcatcttccattttttggacattttaatagccactatgcagccaagctctttcaaggccaatgtggggaagagccacaaaaatcccttttcccaaagagaattattgcctgctccctggtagaattcttgttttcaactgtctttcattgtttgtttttcaaagaaaaaccaaaggtaaagtggtatgatcttccaaacctgaaccagtttgtagccaccagagcctgctgggaaggggctcctcaagcatgcattgatcttgtcacctgcaatttgagagatcaagaagccccatagcaacctacaactgcccatcagtgctcatcctttcaggggattagctcaattctcgctcagtagacactggcatccacaggtgataaaagcccgagcctctgtgggcttctctcatcatccagggccacaatgggctgcctgtcctaggcagagacacagcaactttcccttaaactgaaattaagcataaacccacttcaccaataatcatctgagggcatagtccctgtttccttcctcagggatttaaaacacacatctctctgaccaaacaggtaggtgagatctgactctaaaggggggaaaatcagcatgaattggggtatcaggaatgaatcccaagtgtttttgtgtggggacaggcatccacatcccgaactgtacctggagatggaaaaaaatgcaggagaggagaagagaaagaaagggggaaaaagtggctgaaagtcattgcaagcttctcttgtggttctttctggctctggttgctttgccaaggtcttgagtgcaggcagggctggctctggctgggagctgctgctctgggagatggaagagtcacttcacctccagatagctcattcgatcatctgtaaattgggcaagcccataggtggttgtgatgataaaatggaaaaaaaaatgcttagcttatatgagttacatgctgtatggtaagttacatgctatatagtaagcacacagaaatgattcactgttatcataattgaaggatagtggttcagtgtgctaagcactaaacacaagccagaaagatgtctgagagaagtagacaaagaaacctatagttcagaatgaacagtaccaagaatggcatgtcctccaaattgagcttgggcagctagatctgcacctatcctacacatctgagtctacagtatgaggtaacagtctccacctatagctatcttctctgcctgtaaggtcattcctttagaagaaagctgacctcagactatactgtgatcatttaaggaagagcgcaaaatactggagaaggctagtcttcaagctctagatacagaaaatccttatattcttgggtgttccctctcagacagagagtcagagccacaagcactgacccaaaaatcccttttttcaaaaaaattttccacttctaccaaggttcacctcgctgtttagtgcacactggtgtctacagttgctagagcaagaggctctcatcctctaaggtctgtgaagaccccatgacaaggggacaaaatgaaacaacatgttcagcggcaacacaggaaaaacccatattatcaatgctcaaaaacctggccacctcaggcttagccagttattcgtgagcagagaggtgtgtcatctacatggcagtcatggcctggatgggtctggaactgtggcaaggtaaggctctgagacaagatgccaggagaaagatgaattc
